United States Patent Application Publication US 2007/0105122 A1 - sequence listing, part 4

SEQ ID NO: 6549 - DNA, 551 bp, Homo sapiens
  misc_feature (433)..(433): "n" may be a, t, c, g, other or unknown
  misc_feature (471)..(471): "n" may be a, t, c, g, other or unknown
  misc_feature (542)..(542): "n" may be a, t, c, g, other or unknown
  misc_feature (551)..(551): "n" may be a, t, c, g, other or unknown
gagtgtgtctttaacatttattgacggggtttcccacagggtccgcagtcaaagaatcgctgaaccgcgtttcctcgagagacggtgtgtggcatgggcgccttgctgctgccccagtcccagagcttctcctgtaggggtgtcggctacaggaaccttatcccagctccaaactggacgccatcacatatcctgtcgcctgtctgtactcccatggggacgcagtaattaagttccaaccgagcgatgttgccaagcctgaggacaatcccggccccgtacgaccagcggatgcactcagccagcttacgaatatgagctttggggccctccccatagttgaggttgcagaggtttcctgcgttgagaaagaagtgtgttcggaaaagttctccaaagccaccctgcctgccggaaaggtaatggggtgtanaggtgcaagccggcggcccagtacgcttcttcacctangtagtccctttgcttttggggcccaagcttggcattctgaatccgcggaccctttgggggtcccccgaggnaaaaacctn

SEQ ID NO: 6550 - DNA, 551 bp, Homo sapiens
  misc_feature (92)..(92): "n" may be a, t, c, g, other or unknown
  misc_feature (503)..(503): "n" may be a, t, c, g, other or unknown
  misc_feature (527)..(527): "n" may be a, t, c, g, other or unknown
acatttacacgtttattagctagtcaacatcaacatgcaaaaataagcactaactacaaacctctacgatacggttctctgtcagctacggnggttcatttgttttgaaaagtcatcagtacttctttcaactgaacgattaatttctgtaatggatagcaattagactctacagttatggaaccatccggcaaggcctctgcagaaatttggtcccgtggatttccacgttatacattctcgaagcaggaagtaaggcggcacacagagggtgtgatatcgaaacgacgcagctacgaacacagccccgcgatgtgatatcgaaactatgcacgtacgaacacagtcccgcggacacgacccgcgaggcaggcgggcgtcctcgaagccagcccccgacggtggcggcgccaggcgtttcggcagcagctctcgaatgaagccataagtgtcccttcgtggcgccggaatcgcgggtcactggaaggtcaatcccgggccgntgccacctttcccgggcaggccangggccaacaggaagtggtgaaagg

SEQ ID NO: 6551 - DNA, 551 bp, Homo sapiens
  misc_feature (488)..(488): "n" may be a, t, c, g, other or unknown
  misc_feature (497)..(497): "n" may be a, t, c, g, other or unknown
  misc_feature (520)..(520): "n" may be a, t, c, g, other or unknown
  misc_feature (535)..(535): "n" may be a, t, c, g, other or unknown
ccttgagacggagtcttgctctgttgccaggctggagtgcagtggcgccatctcggcttattgcaaactccacctcccgggttcaagtgattctcctgcctcagcctgggactacaggtgtgtgccaccacgcccagctaatttttgcattttcagtagagatagggtttcaccatgttggccaggatggtctcgatctcctgacctcgtgatccgcctgcctcggcctcccaaagtgctgggattacaggcgtgagccaccgcacctggcccgtcatacctatttctaaattacacaaattaagaaagaaaatgatcagaaattaggtgcagtttaattctggtttcataggaaaattgaaaactggttaaatatgattcctgaacaaaatcatagaaacttttatttaggagaagaatgactttatatgcgaaaagtagcattaaatctaatcttctttcctttagagcccttctatggtctcaancccttttcntttatccacatttcttaagagcntagttcatacccatnggctttttaatttctt

SEQ ID NO: 6552 - DNA, 552 bp, Homo sapiens
  misc_feature (455)..(455): "n" may be a, t, c, g, other or unknown
  misc_feature (496)..(496): "n" may be a, t, c, g, other or unknown
  misc_feature (517)..(517): "n" may be a, t, c, g, other or unknown
  misc_feature (548)..(548): "n" may be a, t, c, g, other or unknown
attgagacagagtttcactcttgttgcccaggctggagtgcaatggtgcaatctaggctcattgcaacctccatctcccgagctcaagtgattctcctgcctcaacctcccaagtagctgggattacaggcacccatcaccacacccagctagttttttgtacttttagtagagatggagtttcactatgttggtcaggctggtctcaaactcctgacctcaggcaatccacctgcctcagcttcccaaagtgctgggattacaggcgtgagccaccatgcctggccaatgttatttttcatagaaatagaaaaagcaatcctaaaatttgtatagaaccaaaaaagagcccaagtagccaaagcaatcctgagcaaaaacgacaaagctggaggtatcacactacctgacttagaaatatattaaaaggctatagaaacccaaaacagcatggnattggtataaaaactaacacattgatcaatgggaccaaatngataatccaaaaattaatccncatattacagccactgattttgacaaaggcnccaa

SEQ ID NO: 6553 - DNA, 410 bp, Homo sapiens
  misc_feature (379)..(379): "n" may be a, t, c, g, other or unknown
  misc_feature (391)..(392): "n" may be a, t, c, g, other or unknown
  misc_feature (395)..(395): "n" may be a, t, c, g, other or unknown
  misc_feature (399)..(399): "n" may be a, t, c, g, other or unknown
  misc_feature (405)..(405): "n" may be a, t, c, g, other or unknown
  misc_feature (408)..(408): "n" may be a, t, c, g, other or unknown
catggaaggccatgctaattttattaacttatatagtgcataaagtctagaatttaaaattacaaaggttttctacaaatcaataagaaaatacaaataacctatattaatcagaacagaaactcaattcaattatcttaaacaagaaagggactttattggctcacaaaactttaaagtccggaggtagggcaggctttaggcacagctggatctagggcctccagaaaaatgacatcagaacttagttctctttccatttctgctagcatccgagtttctcctcagacagactctctccacatggcacaaattcaggcttacatggtccttggttcctgggatctccataaagccttctttccagtagttccagcanaagttctgttannggncttnccttanccngg

SEQ ID NO: 6554 - DNA, 543 bp, Homo sapiens
  misc_feature (465)..(465): "n" may be a, t, c, g, other or unknown
  misc_feature (472)..(472): "n" may be a, t, c, g, other or unknown
  misc_feature (535)..(535): "n" may be a, t, c, g, other or unknown
gagatagggtctactctgacacccaggctggagtgtagtggtatgatcacggctcactgtactccaagcctgggcaagatcctgtctgtataaaatttaaaaaattagccgggcatgggaagctgcagttagtcatgattacaccactgcactctagcctgggacatagagtgagaccttatctcaaaaaagaacctatttatgtttattaatatgcaactgttttaattactaaatgcccattatgtagccataaaaaattagaatatgctttatgctgtactggagcaaattcgcaagtactataatgacattttggggtggggataggacagtaaggtataaaaatgggttatatggtaaacataacccataaatgttaataaaaaataaatgattatttgggtaaacataaaacaaaacacaaatacaaaacctaaaaagagggagactatgtgatatggntggctgngcttccaccccaaacttatcatgcatggaagtctcataaccctatggggcatggaggaacccntgggaggt

SEQ ID NO: 6555 - DNA, 550 bp, Homo sapiens
  misc_feature (423)..(423): "n" may be a, t, c, g, other or unknown
  misc_feature (476)..(476): "n" may be a, t, c, g, other or unknown
  misc_feature (491)..(491): "n" may be a, t, c, g, other or unknown
  misc_feature (510)..(510): "n" may be a, t, c, g, other or unknown
  misc_feature (537)..(537): "n" may be a, t, c, g, other or unknown
  misc_feature (543)..(543): "n" may be a, t, c, g, other or unknown
ccataccccagtgacacctggaaggccagcgacagaactgttcactctcctggaaagggaactgaagccagggagccaagtggatcagtggatcccaccgccacagagcccagcaagctaaaatccactggcttgaaattcttgctgccagcacagcagtctgaagtcgacctgggactcccaagcttggtgtggggagaagcgtccaccattactgaggcttgagtaggtggttttcccctcacagtataaacaaagcttctgggaagttcgaattgggcagagcccaccacagctctgcaaagctgccatagccagactgcctctctagattcctcctctctggacagggcatctctgaaagaaaggcagcagccccagtcaggggctaacagataaaactcccacctctctgggacagangacctggcggaagaagccgcttgtgggtgcaactttagcagacgtaaatggtnctggctggcaacttntgaagaaaaccagcgaatnttccagacaggactcaacttttgttanggacanctgcttc

SEQ ID NO: 6556 - DNA, 550 bp, Homo sapiens
  misc_feature (448)..(448): "n" may be a, t, c, g, other or unknown
  misc_feature (493)..(493): "n" may be a, t, c, g, other or unknown
  misc_feature (508)..(508): "n" may be a, t, c, g, other or unknown
  misc_feature (537)..(537): "n" may be a, t, c, g, other or unknown
  misc_feature (546)..(546): "n" may be a, t, c, g, other or unknown
ggagaggaagtagaatttattggttagtattaagaggggaagcacagtgaaagccctcatgagtgcagggcccggcacttgtccacagggccacaactggggatgtacttgaccccacagccatatgagccacttctcagccaccatgtcttcaaattcatcgacattgaacttggtgaagccccatttctttgagaagtggatcgtctggcagccagagaacttgaacttggccctgtgcagggcctcaatcacatgctccttgttctgcagcttggtgcggacggacatggtaacttggccaatgtgacccctgaccacagtgccctggggttttccaaaggcacctcgcatgcctgtttgaagcctacattggggtaatgcaaggtcagagacatgaacatacatctgaaaggcctattatcaaggtcccttagagcaacctatngaggaaacaggcttcatacaccaccaaggaactgctggttgcaanccttggacactgggnccccataaggaaaggaactcaatcccttnaatggctgnagag

SEQ ID NO: 6557 - DNA, 560 bp, Homo sapiens
  misc_feature (484)..(484): "n" may be a, t, c, g, other or unknown
  misc_feature (493)..(493): "n" may be a, t, c, g, other or unknown
  misc_feature (508)..(508): "n" may be a, t, c, g, other or unknown
  misc_feature (537)..(537): "n" may be a, t, c, g, other or unknown
cttttaagagatggggtcttgctgtgttgcccacacttgtcttgagctcaagcaatcctcccactttggcctcccaaaatggaatgattacaggcctgagccactgcacctagtcccttcagaattctgagggcagttcttccatgatttttcttagccatttctgttgggatgtatttttttcttgtgagattgtccttttctcttccacatcctagggtttcttttatccaccgtgctgtgcgcttggtggcctctttccgtcttggaaactcgtgactttcaaactcagatgtcagacctggagtgtcctcgtaacctttttcttttcccggtttgttatctttgagcttttgattttgtctgatgcttttcatcttcaggagctcttttccactctccccactgtgggccttcagggtcaagttctgagtcacaagcgctttctctgaagtcccaagccatagccatgggtcattaggangctttctgnccacatcatggttcntttggggggcttggtccctctaagggcangaagtccttggctcatgccttaa

SEQ ID NO: 6558 - DNA, 530 bp, Homo sapiens
  misc_feature (166)..(166): "n" may be a, t, c, g, other or unknown
  misc_feature (363)..(363): "n" may be a, t, c, g, other or unknown
  misc_feature (446)..(446): "n" may be a, t, c, g, other or unknown
  misc_feature (482)..(482): "n" may be a, t, c, g, other or unknown
  misc_feature (488)..(488): "n" may be a, t, c, g, other or unknown
  misc_feature (497)..(497): "n" may be a, t, c, g, other or unknown
  misc_feature (506)..(506): "n" may be a, t, c, g, other or unknown
  misc_feature (513)..(513): "n" may be a, t, c, g, other or unknown
  misc_feature (521)..(521): "n" may be a, t, c, g, other or unknown
gagacagattcttgttttgttgcgcagctggactgtagtgtcacgatctcggctcactgcaacctccacctcccaggctcaagtgattctcctgcctcagcctcccaggtagctgggattacagacgtgcgccactatgcctggctaatttttatatttttagtanagatggggtttcattttgtcatgttggccaggctggtcttgaacttctgatctcaagtaatccgcccgcctcggcctcgcaaagtgctggaattacagacatgagccactgcacccggcccatttggatctttttttcctaaaactttatttttcactttttattcatctcagtgtaacttcattatgtattcttgnatatataaaatcactcatatactaataaattaaagttgaaatcatccttacctggctctgccatggatcgagggtttttctgnaaaatcctaaaatctgggagaatcttctattaaagncccttntctataccncttaacctntgggaangggctccnttacctggg

SEQ ID NO: 6559 - DNA, 529 bp, Homo sapiens
  misc_feature (463)..(463): "n" may be a, t, c, g, other or unknown
  misc_feature (489)..(489): "n" may be a, t, c, g, other or unknown
  misc_feature (505)..(506): "n" may be a, t, c, g, other or unknown
  misc_feature (508)..(508): "n" may be a, t, c, g, other or unknown
  misc_feature (515)..(515): "n" may be a, t, c, g, other or unknown
  misc_feature (522)..(522): "n" may be a, t, c, g, other or unknown
agatggggtctcactctgtcaaccaggctggaatgcagaggtgcgatctcggctcactgcaacctccgcctcgggggctccagcaatcctcccacctcagcctcccaagtagctgggaccacaggcacacgccaccaggccaggttaatttttgtatttttggtagagacagtgttttgtcatgttgcccagactggtgtcaaactcctgagctcaagtgatccgcctgcctcagactcccaaagtgctggctgggattacaggcatgagccaccatgcctggccttaatttgtatttttaactattcatttgaccctctccatccttgaatacatgaaattttagaagacagtgctcacttaactgatacagcactctttaatagtctatctacaagtttatgttaaactgtgtttcttcaacaatgaaactgattttattttggctcaagtcaaaacactnaaataaattcttcatcaatttcttcnaatcttcatttaagcnncnagctttntgaggcntttaagg

SEQ ID NO: 6560 - DNA, 550 bp, Homo sapiens
  misc_feature (482)..(482): "n" may be a, t, c, g, other or unknown
  misc_feature (504)..(504): "n" may be a, t, c, g, other or unknown
  misc_feature (539)..(539): "n" may be a, t, c, g, other or unknown
  misc_feature (544)..(546): "n" may be a, t, c, g, other or unknown
gagatggagtttcgcccaggctccagccttgtcgcccaggctggagtgcaatggcacaatcttggctcactgcaaccaccacctcctggtttcaagcaattctcctaccttagccccgccccgagtagctgggactacaggcgtgtgccactacacctggcttttttttttaaattagagacagggtttcaccattttggccagtctggtcttgaactcctgaactcagatgatctgcctgcctcagcctcccaaagtgttaggattataggcgtgagccaccgtgcctgacctatattaagactttttatacccagaaacattatgccattacgttgaatatcacggttctgtctttcaagaagaaattaagtcttccttcaaccccataagacaggattgaaaaaaaaattagttttcttcaaaaaggattattaaatttatttctcaaaggttattattaaatttggtcctcaaactgngggtctggtataatggccaganggtattttactctatttgcatgtcaaaacggttanggtannnccaa

SEQ ID NO: 6561 - DNA, 549 bp, Homo sapiens
  misc_feature (507)..(507): "n" may be a, t, c, g, other or unknown
  misc_feature (512)..(512): "n" may be a, t, c, g, other or unknown
  misc_feature (531)..(531): "n" may be a, t, c, g, other or unknown
  misc_feature (537)..(537): "n" may be a, t, c, g, other or unknown
  misc_feature (545)..(545): "n" may be a, t, c, g, other or unknown
aaatagagatggggtctcattttgttgccaagactggtcacaaactcctggcctcaagtgatcctcccacttcagccccccaaagtgctggaattacaggcgtgggtccccatacccggcccagtttgttttttaatttagaatttgccgtggaccaacaggcagtcgtattctccacaactagtgcacagctcatgctgcatgtcatccacctcttttttctccctcaactccctctctctttctccctgtctctctctcccagagaaagagaacataactggaaagtgagctggtgcactaaagcatcaccaccatctgtccatttcccacactaggagatacctctgtattacgcagtcccatggcagaagcttctggaggaggaaacagatttcccttgccccttcagttgaagaatgaacatcaggaccagagctttgacttgccaatgactagggtggcctggtctaatggaaactgagagcctttatttctcggctctgnttgcnaagctttgtcaaacccaanatgctntgcaggtnggac

SEQ ID NO: 6562 - DNA, 526 bp, Homo sapiens
  misc_feature (445)..(445): "n" may be a, t, c, g, other or unknown
  misc_feature (465)..(465): "n" may be a, t, c, g, other or unknown
  misc_feature (488)..(488): "n" may be a, t, c, g, other or unknown
  misc_feature (499)..(499): "n" may be a, t, c, g, other or unknown
  misc_feature (506)..(506): "n" may be a, t, c, g, other or unknown
  misc_feature (508)..(508): "n" may be a, t, c, g, other or unknown
  misc_feature (520)..(520): "n" may be a, t, c, g, other or unknown
gtggagtgtgtgagagagataattcttcaaattccctttagtgcctccaacttctcagtccgctgatttgggaaacaaactggactcaacatttttcaccttccaattctctagaggttctggcttgaccttctttcctttggagcaatcttcctgtgtggggaggaagaaactggcaaaaccacccaagcttagttaacttcccaagtaaccactaggctcaaagaaatttcacctgtcccagccctgtcaaacaggggactacacactgctcctctgtcattccctctctgtgtcctgctgctactatcttcctcactccttaggaaagcacaggctgaacaggaaaatttctattaagatacccaacaaggaggctaccaatgagaaggaataaaatgccactcttggaggcatccctatctctctgaatgaacctgtttangtgcagcatacactcatacngaagaaaaggaactggctcgcanaataagccctnccaattncncaaggcccaaancggggc

SEQ ID NO: 6563 - DNA, 531 bp, Homo sapiens
  misc_feature (438)..(438): "n" may be a, t, c, g, other or unknown
  misc_feature (486)..(486): "n" may be a, t, c, g, other or unknown
  misc_feature (495)..(495): "n" may be a, t, c, g, other or unknown
  misc_feature (504)..(504): "n" may be a, t, c, g, other or unknown
  misc_feature (507)..(507): "n" may be a, t, c, g, other or unknown
  misc_feature (523)..(523): "n" may be a, t, c, g, other or unknown
  misc_feature (527)..(527): "n" may be a, t, c, g, other or unknown
ggcttttgctttctttattcagtcacgactacacgctcctatgtgactgtcctatggtacttggggaccgggcggtccacctgcagcctgggggaggacatccctataatgaacatgctgcctgggcttcagggggccactttggtggccaagatggcatccaggacaccccccaagtgcaccacctgcacctggtggaagccgtgcagctccagcaagcactgatactcgcccaggctccgctccttgccttcagtctgcaccagcatgttcagtgactgcatcagggcgcgctgcgccaccctcttctcctcatccaggagcgtctccaccagcagcaggccggcccctggcttgcagctctcggcgaccctgctgagtaacttgtggactttgtcgtctggccagtcatgcaggatccggcacaggacgtacagnttcaacgcttgggaagggggtccctgaaaaaagtcacctgctgcgaantggatctgnactggctgnggncccgggggttggaaanggcnggcc

SEQ ID NO: 6564 - DNA, 411 bp, Homo sapiens
  misc_feature (70)..(70): "n" may be a, t, c, g, other or unknown
  misc_feature (387)..(387): "n" may be a, t, c, g, other or unknown
  misc_feature (389)..(389): "n" may be a, t, c, g, other or unknown
  misc_feature (399)..(400): "n" may be a, t, c, g, other or unknown
  misc_feature (405)..(406): "n" may be a, t, c, g, other or unknown
  misc_feature (408)..(408): "n" may be a, t, c, g, other or unknown
cagaattcaaaatatgaaaatttattttgcataggaaacaataatctctggtaaacatcattactgcatntaacaaaacaatgccttcaattaaagggggaaagtgagtttttaaacattaggggttaatttagaagaaaatacagtatataataatctcaacatcatgtttagggtaaaaatgctataatgtgaaaaaagtccctaagaactggacagaacctacctaacaacaccatttaccgtgtatgttttcaatagacaaaacatattttgtaccaaattccaacagtggtaattctatagttgtggccctttaaaaaatggcagcattgtacttgaatcagaaagcttactgggatttcctcatcgaaagtagagattgcngntaatcctagnnccttnngntag

SEQ ID NO: 6565 - DNA, 552 bp, Homo sapiens
  misc_feature (462)..(462): "n" may be a, t, c, g, other or unknown
  misc_feature (466)..(466): "n" may be a, t, c, g, other or unknown
  misc_feature (502)..(502): "n" may be a, t, c, g, other or unknown
  misc_feature (548)..(548): "n" may be a, t, c, g, other or unknown
gagacagagtcttgctctgctgctcaggctggagtacaatggtgcaatcccagctcatcacaacctccattcactgcaacttctgcctcctgggttccaacaattctcccacctcaacctcccgagtagttgggattataggagcgcatcaccacaccctactaatttttgtatttttagtacagactaggttttgccgtgaaggctgggctggtctcgaactcctgtcgtcaagtgatctgcctgccttggactcccaaagtactactattacaagcatgagccattgtgcctggcccataatgatcatcttaatctcattcttgatatcaagaggaaagttttcaatacttcactattacgtaatattggctgtggagtgttctgttgataacctttggacagattaaaggaagtctattctattcctcctttgccaaaagtttttttaatcattatagngctnaaatttatcaaaatggtgctgcactttacttaatcnggtaaagggttactttaacagaggtttaccttaattgggaaacaanttgc

SEQ ID NO: 6566 - DNA, 544 bp, Homo sapiens
  misc_feature (426)..(426): "n" may be a, t, c, g, other or unknown
  misc_feature (474)..(474): "n" may be a, t, c, g, other or unknown
  misc_feature (504)..(504): "n" may be a, t, c, g, other or unknown
  misc_feature (506)..(506): "n" may be a, t, c, g, other or unknown
  misc_feature (509)..(509): "n" may be a, t, c, g, other or unknown
  misc_feature (519)..(519): "n" may be a, t, c, g, other or unknown
  misc_feature (525)..(525): "n" may be a, t, c, g, other or unknown
  misc_feature (529)..(529): "n" may be a, t, c, g, other or unknown
gagatggagtctcactgtgttgcccagactggagtacaactatatgcctaggggcttaatcagccctttggatcttgaatcatgatcgtattgatttttagatgaatctggggaagattgatggacttaaatgagtcttattatttatgacctgatatatttgtttacttttcttacattttaaaaaaatcatcaattattttaaaaagtcatcttctctctttaaaaaacctgccttctaggcaggagcacttaagaccttgggcaaatcgattcattcccttttgcccagctttctcatcatttaatttggaataacaaaagtctgcccctcccacccagggttgctgctgactcagaggagacctaagagaggcggagcgctgagaagtcccgaaactggctctgggccctgtggggtggtcnatggggtcatctctaaggaggtctggtgaattggaaggggctgacctnaccttctgtcccggacaggcactttggggncntgncctggctggncccagnaccnggatgagacccgaaa

SEQ ID NO: 6567 - DNA, 515 bp, Homo sapiens
  misc_feature (429)..(429): "n" may be a, t, c, g, other or unknown
  misc_feature (431)..(431): "n" may be a, t, c, g, other or unknown
  misc_feature (433)..(433): "n" may be a, t, c, g, other or unknown
  misc_feature (455)..(455): "n" may be a, t, c, g, other or unknown
  misc_feature (463)..(463): "n" may be a, t, c, g, other or unknown
  misc_feature (483)..(483): "n" may be a, t, c, g, other or unknown
  misc_feature (496)..(496): "n" may be a, t, c, g, other or unknown
gagatggagtcttgctctttcgtccagtccagactgcagtggtcctatcttggctcactgcaagctccatctcctgggttcgcaccattctcctgcctcagcctcccaagtagctgggactacaggcgcctggctaattttttgtatttttagtagagacggggtttcactgtgttagccaggatgatctcgatctcctggcctcgtgatccacccaccttggcttcccaaagtgctgggattacaggcgtgagccaccacgcctggctggtttgctctttagagtaatgaaaatgtcctaaaattgatggcagtgatggttgcacaactttgtaaatatattaaaaaccattgaattgtactctttaaataggtgacttgcatggcatgtgaattagaagttcagtaaagctggtctaaaatctgggngngnatatggatatttaaaaccagcngaacttgnctttgcaaaatttgaaatgnggataattttaanagtttcctttctttctttc

SEQ ID NO: 6568 - DNA, 556 bp, Homo sapiens
  misc_feature (373)..(373): "n" may be a, t, c, g, other or unknown
  misc_feature (402)..(402): "n" may be a, t, c, g, other or unknown
  misc_feature (443)..(443): "n" may be a, t, c, g, other or unknown
  misc_feature (447)..(447): "n" may be a, t, c, g, other or unknown
  misc_feature (487)..(487): "n" may be a, t, c, g, other or unknown
  misc_feature (510)..(510): "n" may be a, t, c, g, other or unknown
  misc_feature (514)..(514): "n" may be a, t, c, g, other or unknown
  misc_feature (534)..(534): "n" may be a, t, c, g, other or unknown
  misc_feature (536)..(536): "n" may be a, t, c, g, other or unknown
  misc_feature (555)..(555): "n" may be a, t, c, g, other or unknown
cgagtcagaaatcaatgtttactgcagagaacacagaagccagcaagcagtaggcaagggaggcgtcgcagtgagtgtgtcgggcaggctgggaaccagcgcaacggcccacgtggaccgaggactcacgcagagcaagtcacagaaagcgcagctgaaaacaaacggatgcttatcccagatgcacaggacacttaccaaggactgatggtctatcagagtaatgctcagcagctttggctggcaggacagttaaacttttggacaacagaaagtaactgggaaatgggacatctgccaccaacacgagaggccaagaccacagctgttacaggaggggtcagcgccacagtacatgggtggcggcggcggntgcacatgcatgcctggggaatgtgagtnttcagacatgccaggcgtccagccttaccaggaaacaggcncacngggacccaggcccaacccttaaaacccttgcttgatcccntgggttaaccgggggcccccggnaccncgggggttgcctttcttaananacttggaccttggggcccng

SEQ ID NO: 6569 - DNA, 544 bp, Homo sapiens
  misc_feature (312)..(312): "n" may be a, t, c, g, other or unknown
  misc_feature (452)..(452): "n" may be a, t, c, g, other or unknown
  misc_feature (461)..(461): "n" may be a, t, c, g, other or unknown
  misc_feature (492)..(492): "n" may be a, t, c, g, other or unknown
  misc_feature (517)..(517): "n" may be a, t, c, g, other or unknown
  misc_feature (528)..(528): "n" may be a, t, c, g, other or unknown
acctaaaactcagtggacaaactaaaactcagaaggtcaaaaagaaataatcagtcacagaaacagaatgttatctaataggcactaacccataacaaaagcaacatcttagacagaaccaagtcctcccagttaaaatgaaggctctcaccttcctcctactaacattgtttcataatattattgtgtgatggttaggaataaatacatgcattatcatatccccaaatagatagaaacccaaaaataatcttgttcaatagacagtaaccctatattgactgatgtaagccccaggaacttattcactgntatatcccaagcccctggtacagggattagcatacagggtactcaataaattctagttgatctgaaacgaactgaactaccttgtaaatagtaggcattgatagtagacaggaatgtagatcagatatcatgatcagatntcatggcangggttggagggagaaactcggttttgtaccngaaaggaagaaaccaaaatcagctncattaaaatgncccaatcccatggttt

SEQ ID NO: 6570 - DNA, 551 bp, Homo sapiens
  misc_feature (444)..(445): "n" may be a, t, c, g, other or unknown
  misc_feature (498)..(498): "n" may be a, t, c, g, other or unknown
  misc_feature (501)..(501): "n" may be a, t, c, g, other or unknown
  misc_feature (548)..(548): "n" may be a, t, c, g, other or unknown
  misc_feature (550)..(550): "n" may be a, t, c, g, other or unknown
aaatgatacagagtctccctctgttgcccagactggagtgcagtggcacagtctcggctcactgcaacctctgcctcccaggctcaagcgattctcctgcctcagcctcccgagtagctgggattacaggcacccgcaaccgcacccggctaatttttgtatttttattagagacagggtttcaccatgttggccaggttggtctcgaactcctgacctcaggtgatctgcccgcctcagcctcccaaagtgctgggattacaggtgtgagccactgcacccagccgcctttagatatttctaaaatggtgcagccactatgaaaaacagtttggcagttcctcaaaaaggtaaatgtggagttaccataggacccagcaatttcactcctaggtagtaggtttctctatgaaatcttccaagataaaaataaaaagaaaaacnnaaagaaaacttcatttgctcttcctcggtcaccaaaataaaactcaaattccntanctggcttggcataccaggcccctttataactaactttaacctatctntnc

SEQ ID NO: 6571 - DNA, 551 bp, Homo sapiens
  misc_feature (482)..(482): "n" may be a, t, c, g, other or unknown
  misc_feature (514)..(514): "n" may be a, t, c, g, other or unknown
  misc_feature (540)..(540): "n" may be a, t, c, g, other or unknown
aggaaagagaccgatttattgaaacatcacacaatttacataaagaagaaacacaagcaagagtggggtgaactggaacgcactttggctgcatcaaggcaaacctggtcttccaataaaagctctgacccgtagcggctgtggcacttggggcatatgaagcatcacttttgacttccctttattattataattcttgccactgaaaatagccactatttagctgaattatccattagacaactggagccagaagcttctacacattctagaatgtgaacaatttaactcttgctgcatcacccagaaaaaatggtggcaggaatggtgagggagaggaggaatctcttgagttagagcctcaggtctgaaaaggcaactggtaggatcatcccattccctctcagaagcttctgaagtggaagaaaaacaagcaaatcctaaagcaagtaactttattatcattcctttaaaaagaaccnagggaaaattcccacctatgtgaacaccaacnggttgggggttaaggaggtaaccaangggcccccttt

SEQ ID NO: 6572 - DNA, 538 bp, Homo sapiens
  misc_feature (485)..(485): "n" may be a, t, c, g, other or unknown
  misc_feature (495)..(495): "n" may be a, t, c, g, other or unknown
agtagagacggagttttaccatgttgtccaggctggtctcaaactcctgacctcaggtgatccgcccacctcagcatcccaaagtgtgggattacaggcacgaggcactgtgctggccaactctctttctctctctcttttaatctctttattatggaaattcagaaactatacacaacccagaatagtctatgaactccctaaagactcatcaaccagcttcaacaatgatcatctttctgcccatctcattcctctcctttttttttttttttttttttgagatggagtctcgctttgtcacccaggctggagtgcaatggcacaatctcagctcactgcaacctctgcctcctgggtacaagcgattctcctgcctcagcctcccgagtagctgggattacaggcgcatgcccccgtgcccagctaattttttggattttttttaagtagaaacggggtttcaccatgcgggccaagctggncttgactccnggcctttgactggcagcttggctctaaaggggctgggatacag

SEQ ID NO: 6573 - DNA, 541 bp, Homo sapiens
  misc_feature (410)..(410): "n" may be a, t, c, g, other or unknown
  misc_feature (462)..(462): "n" may be a, t, c, g, other or unknown
  misc_feature (468)..(468): "n" may be a, t, c, g, other or unknown
  misc_feature (470)..(470): "n" may be a, t, c, g, other or unknown
  misc_feature (480)..(480): "n" may be a, t, c, g, other or unknown
  misc_feature (493)..(493): "n" may be a, t, c, g, other or unknown
  misc_feature (504)..(504): "n" may be a, t, c, g, other or unknown
  misc_feature (522)..(522): "n" may be a, t, c, g, other or unknown
gcagaaaccccccgcagcctcaggaggcagcatcagatttatttattcctactcaacatgacccgggaacacaggagcaactctgtacacttctagaaactcacagctagctccaaaacaatagaaattttaaactacaaaagatgagttgtattcagcaaatataaagggtaattttagactgtgtgaacgtttatcagactatttacagcacccgggagacgggttcagatctcgccggcctccttctcttctgacctccgtgaagccatcttcccgttggagctctcaagcctccagtccgggggccctcgctcgctccgcccgctctcccaggactcctctctggatgcccgctctctggagaacccctggttgcagctaccgaaggagtcagagtagttacttgnatttcgcacttcggtcccgggaagcccgacgatgtccccggctgtggcttcnggaacngntgcggtggcnccgatgctatctngggaccggganccgggcaaatttcggcgnttttcgggaggaaaacttg

SEQ ID NO: 6574 - DNA, 545 bp, Homo sapiens
ccgtgggatgtattttttaatgagaacacattgttatactctgagtacgtggcattcttgcttgatagaaacatttacaaggacacatacacatttatatccaaacatcaaatgaagtagatattttaaatgaccagttcgcacaagaaataaaatatattatacaaaacatgggttatatccacagtcattagttctccttttctacacaaaacagcaataaattaaatcacattatatgcaaatagttagttgtacattagaacaataaacagtatgtaacgtgtgcagcttttacttttacttttctaccagactcatgatagatttgtactgtttggtagtcctgtatttaaatcaacaatgaataatgtgacccagaagacaggggtcacagaattggtctgtcacaaggtctatcccatgtcctcttggtttcaattatccaccatgcacagggaacaaagctcagattcccaggacccaacacaaaggtctgcaacgaacaaactccaggaactcctgctggtcaagggctactttat

SEQ ID NO: 6575 - DNA, 550 bp, Homo sapiens
  misc_feature (499)..(499): "n" may be a, t, c, g, other or unknown
  misc_feature (519)..(519): "n" may be a, t, c, g, other or unknown
  misc_feature (535)..(535): "n" may be a, t, c, g, other or unknown
  misc_feature (538)..(538): "n" may be a, t, c, g, other or unknown
  misc_feature (549)..(549): "n" may be a, t, c, g, other or unknown
gaggtaaggggtctcactatgtttcctgggctcaaatgatcctcctgcctcagcctcctaagtagctgggaggctgaggcgggtggatcacctgaggtcaggagttcgggaccagcctggacaacacggtgaaacatgaaaccccacctctactaaaaatacaaaaattagccagatgtggtggcgggcacctgtaatcccagctacttgtgaggctgaggcaggagaatctcttgaacccgggaggcggaggttgcagtgagccaagatcgcgccatcgcactccagcctgggtgacagagcaagactgtctcaaaaaaaaaaaaaaaaaaaaaaaccaaaaaccaaaaaacattccactggctcatgacaaacgaagattcccagtgagcccttccagaaccacagactccgcaggacagggtttctttttgtgaggggctgtcctgcgcactgtgggatgttcaacagcaccctgccagtacacaagccccaggtntgacaacccgaaaatgtctncagaaatcgccaaatnaancctgggtgggna

SEQ ID NO: 6576 - DNA, 544 bp, Homo sapiens
  misc_feature (384)..(384): "n" may be a, t, c, g, other or unknown
  misc_feature (469)..(469): "n" may be a, t, c, g, other or unknown
  misc_feature (493)..(493): "n" may be a, t, c, g, other or unknown
  misc_feature (498)..(498): "n" may be a, t, c, g, other or unknown
  misc_feature (518)..(518): "n" may be a, t, c, g, other or unknown
  misc_feature (532)..(532): "n" may be a, t, c, g, other or unknown
aaagacccacgcgaagagctgagggaaaactgtcagggcaaaaggaacatactggtgaattaaaggaacagaatgaagacatgtatggctggaagaaaaggagaaagagtgaagcgtgatgggtgggaagggaaacaagagtcaaattgtgtaaggtttgtaggccacataatgactttacattttatactggtatgagaatgggaagctgggtttggagcaagggtggaacttggtatgatttatatttttatcagatcactctggctgtgctgtagagaactgattgtaggagaccaatagtgaaaggagggagactagtttagaggcttattacagttagcaggtagaggttgcagtggcttggtctagactattaaatantggaagtagaagaaaaggtcacatttaggacattttagaagtacagctgacaggacttcttgatgaactaggtgtaaagtatganggaaagagaagtccagaatgactncaagnggctggctgtactgtggaanggagatgaatattntagccccttgaa

SEQ ID NO: 6577 - DNA, 532 bp, Homo sapiens
  misc_feature (206)..(206): "n" may be a, t, c, g, other or unknown
  misc_feature (428)..(428): "n" may be a, t, c, g, other or unknown
  misc_feature (435)..(435): "n" may be a, t, c, g, other or unknown
  misc_feature (466)..(466): "n" may be a, t, c, g, other or unknown
  misc_feature (481)..(481): "n" may be a, t, c, g, other or unknown
  misc_feature (502)..(502): "n" may be a, t, c, g, other or unknown
  misc_feature (520)..(521): "n" may be a, t, c, g, other or unknown
  misc_feature (530)..(530): "n" may be a, t, c, g, other or unknown
agcttctgtgaacaacactgctataaacattctcataaacatcttttggtgaacatatatatgattacctgctgggcatattcttagaaatgtaattgctggcaaatcagctcttgtagatgcagccagctttccaatttaccctatttacccttagggtatgaaagtctgagttactccacatccttgctatcacttgatattgngtatctttttcatttttgctattttgctctatgtgtagtagtattctatggtggttttgaagttccctaatgactaatgaagttgagcaccttttcttatgtttactgattatttaggtatcctctattgtgaatgtctgttcaagtctttctcccattttcctactgggaaatctgattttttggtttttttggtttttttgagacggcgtcttgctctgncactcantcaggctggagtgcaatgggccgatctcggntcggtgcaactctgncttccgggtcacgccatctgntggctaaacctcccgganntgggctatngg

SEQ ID NO: 6578 - DNA, 563 bp, Homo sapiens
  misc_feature (387)..(387): "n" may be a, t, c, g, other or unknown
  misc_feature (436)..(436): "n" may be a, t, c, g, other or unknown
  misc_feature (450)..(450): "n" may be a, t, c, g, other or unknown
  misc_feature (458)..(458): "n" may be a, t, c, g, other or unknown
  misc_feature (507)..(507): "n" may be a, t, c, g, other or unknown
  misc_feature (527)..(527): "n" may be a, t, c, g, other or unknown
  misc_feature (545)..(545): "n" may be a, t, c, g, other or unknown
gtaaaattctgtatgtatgtcaccattttttttcacatgatacacagaaaactcaaggacccagaggggaaccaagttatgttataccatttacaaaataccaaggagtccacagctacctaacacatttactacagcacaggaaccaatgaaggtacagtgtacaaaaaactgtaaacacggcacaataaatagataaaacagcaggttccgcaccatgcacatgatgtgatgacacttcatctgctgtattcttaatttacagatgttgattttttttcctattaacagtaagaaaagaaaaattgaagcatgagagatgagcattgctgtcaagtccccacagctgccacagaaacgcatgtgctgctttccatcatcccttgnattcaaaatgctactgatgcatagcacctaatcaaggtccccaggcttnagtttcactcgganggaagctnccgtaccttcattggttctggggtggctggtattgtggtcaatgcttgnttttctggatcaaggatttnccttggactggatttccnaggatgaaaatgggcctt

SEQ ID NO: 6579 - DNA, 559 bp, Homo sapiens
  misc_feature (83)..(83): "n" may be a, t, c, g, other or unknown
  misc_feature (85)..(85): "n" may be a, t, c, g, other or unknown
  misc_feature (94)..(94): "n" may be a, t, c, g, other or unknown
  misc_feature (203)..(203): "n" may be a, t, c, g, other or unknown
  misc_feature (243)..(243): "n" may be a, t, c, g, other or unknown
  misc_feature (249)..(249): "n" may be a, t, c, g, other or unknown
  misc_feature (252)..(252): "n" may be a, t, c, g, other or unknown
  misc_feature (405)..(405): "n" may be a, t, c, g, other or unknown
  misc_feature (410)..(410): "n" may be a, t, c, g, other or unknown
  misc_feature (439)..(439): "n" may be a, t, c, g, other or unknown
  misc_feature (473)..(473): "n" may be a, t, c, g, other or unknown
  misc_feature (481)..(481): "n" may be a, t, c, g, other or unknown
  misc_feature (519)..(519): "n" may be a, t, c, g, other or unknown
  misc_feature (530)..(530): "n" may be a, t, c, g, other or unknown
cataaaaatgaatttttaatttcatgagcataaaaaaaaaaaacccaaacctgtcccatacccctcccactcatgcaaacagntntcaaatganattcttcaaattttacgttttttccattctggctcattctttgcttcctcatcatcagattcaacttgggcaaacatggttttgggctgagtcttggaatatgctgganaaacccaatatgggctgtcttctgctgctttggcatgacncaaaanggnttcccgaggattactgtcatcggtcttgtccaaagcaatgttcttcacaatataggaagagagagtgcccccgtgggttccaactcggccaccacgacctgggcctgctacaggaggttcaggtttatgcgacttcaggggaacccagtctgnccttnttcagctggttccttggactccgttggcnggggcttacggacatagcaaggcttgagggtgangaatgaanccctggagttaaagcctaacttggtttggccttccgtnggttttaaccncccataaatttggctcccctttggacttt

SEQ ID NO: 6580 - DNA, 491 bp, Homo sapiens
  misc_feature (406)..(406): "n" may be a, t, c, g, other or unknown
  misc_feature (413)..(413): "n" may be a, t, c, g, other or unknown
  misc_feature (417)..(417): "n" may be a, t, c, g, other or unknown
  misc_feature (421)..(421): "n" may be a, t, c, g, other or unknown
  misc_feature (424)..(424): "n" may be a, t, c, g, other or unknown
  misc_feature (449)..(449): "n" may be a, t, c, g, other or unknown
  misc_feature (470)..(470): "n" may be a, t, c, g, other or unknown
atcttcacttaattgcatcacaagtaacaagaatgaaaaaggccacagttcatatattttcaccattacatatgtctataatacttgaaatgagtatggcaaaaccagcactgcacaaagatgagtccacttcaagtcccatgagaaagagcatgtctctaaagaaaaacaaacaaaaccaaagcaaaataaaaagagaggcctaaaggccttggtgccccattgtgttggaattcatcatattccatcttgacttttttgcttccagtcagccagcagactaaatttttgtgcttgtttatgctgaaattgattcaatcctgactcaagttcacttttggacacagatcatattctgcctgttggatgcaaaagatgaaaatcctcttaacttccaagtcttggntcgactncctnccanttncccacccttatcaaaatcaggatcnccaattaaaaaaaaaaaattngaaattgggaaaaggggaaaa

SEQ ID NO: 6581 - DNA, 558 bp, Homo sapiens
  misc_feature (410)..(410): "n" may be a, t, c, g, other or unknown
  misc_feature (500)..(500): "n" may be a, t, c, g, other or unknown
  misc_feature (521)..(521): "n" may be a, t, c, g, other or unknown
  misc_feature (535)..(535): "n" may be a, t, c, g, other or unknown
  misc_feature (541)..(541): "n" may be a, t, c, g, other or unknown
aagagataaggtcttagggtcttgctctgtcacctggagtgtagcggcaacatcacagctcactgcagccttgaactcctgggctcaatggatcctcccaccttaggcttgcaagtagctaggactacaggcatgtggcatcacacctggctaatttttttttaattttatttttgtagagacaggctcttgttatgttgtccaggctctctcactttttctctttttttttccccccaccccgagatggagtctctctctgtctccaaggctggagtgcagtggcacgatcctgagatcctggcttactgcaatctctgcctccagggctcaagtgatcctcccaccttggcctcctgaatagctgatacaggtgcagcgggtgccaccacgcctggctaattttttgnatttttggtagagatgggatttcgccatgttgatccacctgcctcagcttccaaagtgctaggattacaagcataagccacacaccctgnctctttcatggatcttctaantacccctaacagtnccaatnttaaagagggtttttgg

SEQ ID NO: 6582 - DNA, 572 bp, Homo sapiens
  misc_feature (427)..(427): "n" may be a, t, c, g, other or unknown
  misc_feature (473)..(473): "n" may be a, t, c, g, other or unknown
  misc_feature (505)..(505): "n" may be a, t, c, g, other or unknown
gctctttatgtaaagtctgaggtcaaggcaaggtcacagatatacagtaattgaacttatagttttgctttctccagctagtactgaaaatttataaacatcttattaaggcacttaagttactttaagttccttaataagatagttttgtacaattatttttgtagcctctccaaaagtgacaagtcactgacatgtaaaaaagtagttaatatacgctctccagagtcatacgcatgagattctcttaagatccgtttgttctgcataatattaaaaattacgtatcaaatccagaaaatgaagaggacatattagattctgaaatagtaaattccttttagttcccaactcagatcaaatctgagcaggacataaaaaatacaatgaaaagtttaataaggctctattaatgattaaaagggtncatagtcccagtatgaattctaagttggtaaatctggccactttanggaagggaaatagttcctaaaaacccaacccnttaaccgaccagggccaggttttcaaaccaaaatgctacttcataccatttaaggatctcaatatcc

SEQ ID NO: 6583 - DNA, 523 bp, Homo sapiens
  misc_feature (311)..(311): "n" may be a, t, c, g, other or unknown
  misc_feature (366)..(366): "n" may be a, t, c, g, other or unknown
  misc_feature (380)..(380): "n" may be a, t, c, g, other or unknown
  misc_feature (441)..(441): "n" may be a, t, c, g, other or unknown
  misc_feature (445)..(445): "n" may be a, t, c, g, other or unknown
  misc_feature (462)..(462): "n" may be a, t, c, g, other or unknown
  misc_feature (469)..(469): "n" may be a, t, c, g, other or unknown
  misc_feature (477)..(477): "n" may be a, t, c, g, other or unknown
  misc_feature (480)..(480): "n" may be a, t, c, g, other or unknown
  misc_feature (513)..(513): "n" may be a, t, c, g, other or unknown
gagacaagagtctcgctcttttttacccaggctggaatgcagtggtgcaatccccactcactgcaacctccgcctcccaagttcaatcgattcttctgcttcagcctcccaagtagctgggattacaggcatgcgccaccacacctggctaatttttgtatttttagtagagatggggtttcaccatgttggctaggctggtctcgaacttctgacctcaagtgatccagctgccttggtctccaaagtgctgggattacaggtgtcagccaccacacccagccccatccatactttctaacagaacctgngttttattgaaagtatctcttctcatcaacatccacacctcgaaaacctggctgntggctgggataaantttataagggtaggctcaagcttcttgaaaggaactgggttaaagggcatgaaggcacttntggngaatgaacccagaaaanggattanaagacctnggnaaaggtttccatactccttacagaacttgaccngaccgagaac

SEQ ID NO: 6584 - DNA, 480 bp, Homo sapiens
  misc_feature (101)..(101): "n" may be a, t, c, g, other or unknown
  misc_feature (236)..(236): "n" may be a, t, c, g, other or unknown
  misc_feature (421)..(421): "n" may be a, t, c, g, other or unknown
  misc_feature (431)..(431): "n" may be a, t, c, g, other or unknown
  misc_feature (447)..(447): "n" may be a, t, c, g, other or unknown
  misc_feature (456)..(456): "n" may be a, t, c, g, other or unknown
  misc_feature (459)..(459): "n" may be a, t, c, g, other or unknown
  misc_feature (477)..(478): "n" may be a, t, c, g, other or unknown
gagacagagtcttgcctaagctggtcttgaactcctggcctcaagcgatccttccacccagagtgctgggattacaggcatgggccactgcacctagcctntagcaagtcatttaatcactctgtacatcagtttccttatccataaaatgggaataataatatctcatagagttgttttgaggatttaaataaaaatatttaataactataaatatcattgtccagacacaatgncatttagcttttctcctatgttttcttccagtagtttaacagtttcaggtcttatgctgaagatgttaatccaatttgatttgattttgtaggtggtgtgagggtaagggttcgatttccctcttttgcatatggatatccaattttccaaacaccatttattgaagacactggcctttcctacnggatattctngaaccattggtggaanatcaattgnccncagtgcatgggtctcttnngg

SEQ ID NO: 6585 - DNA, 560 bp, Homo sapiens
  misc_feature (423)..(423): "n" may be a, t, c, g, other or unknown
  misc_feature (471)..(471): "n" may be a, t, c, g, other or unknown
  misc_feature (481)..(481): "n" may be a, t, c, g, other or unknown
  misc_feature (495)..(495): "n" may be a, t, c, g, other or unknown
  misc_feature (517)..(517): "n" may be a, t, c, g, other or unknown
  misc_feature (523)..(523): "n" may be a, t, c, g, other or unknown
  misc_feature (538)..(538): "n" may be a, t, c, g, other or unknown
  misc_feature (555)..(555): "n" may be a, t, c, g, other or unknown
atgaaaaaaagttgtgaaaatttatttaggctgattttagtgtaacattgttttttataaaataattttataaaagagtccatcaagatattatatagaaaatgcacactaaggtaatatatatacacttcataaaaatagaatacatcttggcaattgcttagagtctattaccaccatgtacagtgtattgacgtgtaatatttatgttaatttgaacacatgagatttttaaaaaaccaaacctgtcccactggtatctttaaaaattgctttcattgacaggaaaataaacaaaattctggaaccgtaaaagttatgaagctaactggatgaaagtttatattaaaatttttaaagttccatgccatgtacaactgacgtgagggcaaagcagtcttttttattattattatcataagnggtcagctgatctcacaaaatcactgaaaataatatcctggtctgaangtccaatcangataagccccattngggatcaaacaagccttttagnactggnccatatttggaaaangaggggggtttctcttnaaaag

SEQ ID NO: 6586 - DNA, 509 bp, Homo sapiens
  misc_feature (417)..(417): "n" may be a, t, c, g, other or unknown
  misc_feature (463)..(463): "n" may be a, t, c, g, other or unknown
  misc_feature (474)..(475): "n" may be a, t, c, g, other or unknown
  misc_feature (493)..(493): "n" may be a, t, c, g, other or unknown
  misc_feature (495)..(495): "n" may be a, t, c, g, other or unknown
  misc_feature (506)..(506): "n" may be a, t, c, g, other or unknown
gctttaagttatgggatacatgtgcacaatgtgcaggtttgttacacaggtatacatgtgtcatggtagtttgctacacccatcaccctgagttctgttataatattatgggactcccaaaatacatgtggtcttatctttggccaaaatgttgtcatgcagtataccattttagatacatcaagaatcttttgcctgggtgtgtggctcatgcctgtaaccccagcactttgggaggccgaggtgggtggatcacctgaggtaaggagttcaagatcagcctggccaacatggtgaaaacctacctctactaataatacaaaaaattagccagatgtgatggctcatgcctgtaatctcagctactcggaaggctgaggcacaagaatcgctgaacccaggaggtggaggttgcantaagccaagatcacacccactggactccaatctggggcaacagaancgagactccgnntaaaaaaaggaaaaaacntntgccatacttnaaa

SEQ ID NO: 6587 - DNA, 575 bp, Homo sapiens
  misc_feature (423)..(423): "n" may be a, t, c, g, other or unknown
  misc_feature (451)..(451): "n" may be a, t, c, g, other or unknown
  misc_feature (502)..(502): "n" may be a, t, c, g, other or unknown
  misc_feature (514)..(514): "n" may be a, t, c, g, other or unknown
  misc_feature (556)..(556): "n" may be a, t, c, g, other or unknown
  misc_feature (562)..(562): "n" may be a, t, c, g, other or unknown
  misc_feature (565)..(565): "n" may be a, t, c, g, other or unknown
  misc_feature (575)..(575): "n" may be a, t, c, g, other or unknown
agctcatcagctatcattcgtgttagcgtattttacgtgtggcccaagacaattcttcttcttccaatgtggcccagggaagccaaaagattggatagcactgccctagactatcagccacgccgctctggctctcacttcccacttccccagggcctggctcaatatttttttaaaagtatggtataaatgaataactgatctcttgttctgtctgctttaatcatgtgactgagtgcaaaaaaacaattacccacttaaaaacacagagatgcaagtgaatcctttgccataacaatgagcccactctttatcaataccctgttgtgccaaacaggtagagaggttttaaaaaagagtcaagtatcccaactcatattaaatttccccatattctccatattttaaaagcactgggttaancatgggtgatgccctttaagaattccgnaccaaaaggattttcaaattccaatggcatggactttcatcggtaattttnaatgggccaatnttaaaggtcacattaacccgacaaagcattttaacttctganttgcanggncgcttgggtn

SEQ ID NO: 6588 - DNA, 581 bp, Homo sapiens
  misc_feature (330)..(330): "n" may be a, t, c, g, other or unknown
  misc_feature (380)..(380): "n" may be a, t, c, g, other or unknown
  misc_feature (395)..(395): "n" may be a, t, c, g, other or unknown
  misc_feature (409)..(409): "n" may be a, t, c, g, other or unknown
  misc_feature (467)..(467): "n" may be a, t, c, g, other or unknown
  misc_feature (478)..(478): "n" may be a, t, c, g, other or unknown
  misc_feature (495)..(495): "n" may be a, t, c, g, other or unknown
  misc_feature (511)..(511): "n" may be a, t, c, g, other or unknown
  misc_feature (519)..(519): "n" may be a, t, c, g, other or unknown
  misc_feature (568)..(568): "n" may be a, t, c, g, other or unknown
  misc_feature (578)..(578): "n" may be a, t, c, g, other or unknown
ggtagagatgtgagtctctctatattgcccaggctggtcttgaactcctgggatcaagtgatcctcccaccttgtgtttttaacgggtttggcacatgcatcccggtgcactgtaagagcctagcaaatagaaagtgttactggaatcatttagtgtgaaatcttacagcacccactctaataccagctccaagaagagggggatgtgcacctactttgtgctgtggggtatcccaagtgtccagaacaatgcctggcacatgtagacgtttaataaatacttgcatacatgaatgaatcctctatgtggcagatttttaaacaccgcangaaagacagctcagactcctccccgacccagcagaaagtttacctttcanggtagctacagcctnttccacttgaccangaaggaaagccccgctttcacgtcttttaaaagtaacccaatcggcttggcttgccgnggaagtccttnttaaggctttaacaaanctttcaacttgcttgnggaaccanggcccccagcccataagcttgacaccaaggccttacaaaggaaaaggangggcccattncct

SEQ ID NO: 6589 - DNA, 394 bp, Homo sapiens
  misc_feature (354)..(354): "n" may be a, t, c, g, other or unknown
  misc_feature (374)..(374): "n" may be a, t, c, g, other or unknown
  misc_feature (377)..(377): "n" may be a, t, c, g, other or unknown
  misc_feature (383)..(383): "n" may be a, t, c, g, other or unknown
  misc_feature (385)..(386): "n" may be a, t, c, g, other or unknown
  misc_feature (390)..(390): "n" may be a, t, c, g, other or unknown
aacctaaatccatccatttattccttcagccaacattttctgggattccttgtgtgctaggcctcgtgccaccatctggagatgcagagaggcgggagacccatgtggcctttgaggggctttcaggctcgtgggggttcaggcacagacaccaccaatctgaaccaggggactgcaggatgctgggttaggggagagaggggtaggctggctggcctagggggtcctcaggaagtctttgggggtaaggagagaactcctgaaaggtaaggagaagccgagggctaagttacatttcgagtggatgggaaggggtgtggactgactgggctcctactcactattggggactgngtatgctggcctggccttanagncctcananncagntaca

SEQ ID NO: 6590 - DNA, 559 bp, Homo sapiens
  misc_feature (174)..(174): "n" may be a, t, c, g, other or unknown
  misc_feature (415)..(415): "n" may be a, t, c, g, other or unknown
  misc_feature (488)..(488): "n" may be a, t, c, g, other or unknown
  misc_feature (498)..(498): "n" may be a, t, c, g, other or unknown
  misc_feature (516)..(516): "n" may be a, t, c, g, other or unknown
  misc_feature (534)..(534): "n" may be a, t, c, g, other or unknown
  misc_feature (551)..(551): "n" may be a, t, c, g, other or unknown
gagacggagtctcattctgtcgcccaggctggagtgcagtggcacggtctcagctcactgcaacctccgcctcctgggcttaagcgattctcatgcctcagcttctggagtagctgggattacaggcacccaccagcacgcccagctactttttgtatttttagtacagatggngtttcactatattgtccaggctggtctcgaactcctggcctcaaatgatccacccacctcggcctccgaaagtgcgtgagccactgcgcccagccaccaacacttcttccaatcatctcaccacaatcctaatgctcattaaattggaaggacggagagaataaagttcatccccagccttctagaacagagttccaaattgctggcctagggccaaatgtaacccacagatatgctttgnctgcctacactggtttagaagattttgagttcatgaccgatttttaaaattgggaacatttaacataaaaatncatatggttnaagtttaccaaaactcanaggattggcccaagtggncccaggggactggactnaaaaatgg

SEQ ID NO: 6591 - DNA, 565 bp, Homo sapiens
  misc_feature (457)..(457): "n" may be a, t, c, g, other or unknown
  misc_feature (462)..(462): "n" may be a, t, c, g, other or unknown
  misc_feature (470)..(470): "n" may be a, t, c, g, other or unknown
  misc_feature (483)..(483): "n" may be a, t, c, g, other or unknown
  misc_feature (539)..(539): "n" may be a, t, c, g, other or unknown
  misc_feature (549)..(549): "n" may be a, t, c, g, other or unknown
  misc_feature (555)..(555): "n" may be a, t, c, g, other or unknown
  misc_feature (558)..(558): "n" may be a, t, c, g, other or unknown
ctgagtcgttctcgctatgttgaccaagctggtctcaaactcctggactcaaacaatcctccgctttggcctcccaaagtgccaggattacaggcatgagtccctgtgcccagcctgatatggtttggatttgtgttcttgccccaatctcatgttgaattataacccccaatgttggaggacaggcctggtgggaagtgattggatcgtgggggcaaacttcccccttgctgttcttgtgatggtgagttctcatgagatctggttgtttaaaagtgtgtagcacctcccccttctctctcttcctcctgcttcagccatgcaggctgtgtctgcttcccattcaccttctgccatgattgtaagtttcctgaggcctctgcaaccatgcttcctatatgacctgaagatccatcagccaattaagcctattttctttatgaattacccagcttangtagntctttatnccgaaaagagggntaattgacttacaagttctggataatgtgggaggcccaggaaacttaaaacctggnggaaggcaangggaancanggcccct

SEQ ID NO: 6592 - DNA, 575 bp, Homo sapiens
  misc_feature (428)..(428): "n" may be a, t, c, g, other or unknown
  misc_feature (491)..(491): "n" may be a, t, c, g, other or unknown
  misc_feature (507)..(507): "n" may be a, t, c, g, other or unknown
  misc_feature (517)..(517): "n" may be a, t, c, g, other or unknown
  misc_feature (536)..(536): "n" may be a, t, c, g, other or unknown
  misc_feature (552)..(552): "n" may be a, t, c, g, other or unknown
ggatttttagtagagacggggcctctccatgttggccaggctggtcttgaatgcccgaccccaggtgatccgcccacctcggcctcccaaagtgctgggaccacaggcgtgggccactgcgcctggcgtcattatcattttaacattgctgctgtattttcccttgtagggacaaataatatgactattttccacctccttgctccaaatcatcagcataaatagcaaactattcaaggaggacagacttggcaaggaaaattccaggctagctattatggcctgacaggttcatcatccctcttaatgaatgaaagtacgaagtgccaaaacaatgtttaattcaaaaatcatttatcttggctttataaaggaggaaaacactgagtcagacacacatctaagcacgaatttggacacaatttctncctggttttggttgacatgggcttacatgaaccccaaggagccacttttcaggccagaagacngatgatcaagggcttntaaccagganaagcttttttccaagggtnccaaagcacttttcanttacttgaccgggaaaacaattt

SEQ ID NO: 6593 - DNA, 481 bp, Homo sapiens
  misc_feature (3)..(3): "n" may be a, t, c, g, other or unknown
  misc_feature (17)..(17): "n" may be a, t, c, g, other or unknown
  misc_feature (67)..(67): "n" may be a, t, c, g, other or unknown
  misc_feature (99)..(99): "n" may be a, t, c, g, other or unknown
  misc_feature (167)..(167): "n" may be a, t, c, g, other or unknown
  misc_feature (220)..(220): "n" may be a, t, c, g, other or unknown
  misc_feature (237)..(237): "n" may be a, t, c, g, other or unknown
  misc_feature (247)..(247): "n" may be a, t, c, g, other or unknown
  misc_feature (274)..(274): "n" may be a, t, c, g, other or unknown
  misc_feature (299)..(299): "n" may be a, t, c, g, other or unknown
  misc_feature (320)..(320): "n" may be a, t, c, g, other or unknown
  misc_feature (328)..(328): "n" may be a, t, c, g, other or unknown
  misc_feature (376)..(376): "n" may be a, t, c, g, other or unknown
  misc_feature (412)..(412): "n" may be a, t, c, g, other or unknown
  misc_feature (427)..(427): "n" may be a, t, c, g, other or unknown
  misc_feature (429)..(429): "n" may be a, t, c, g, other or unknown
  misc_feature (435)..(435): "n" may be a, t, c, g, other or unknown
  misc_feature (444)..(444): "n" may be a, t, c, g, other or unknown
  misc_feature (468)..(468): "n" may be a, t, c, g, other or unknown
  misc_feature (477)..(477): "n" may be a, t, c, g, other or unknown
ganacggagtctgtctntgtcacccaggctggactgcagcagtacgatatgggctcactgcaacctntgctccccaggttcaagtaattctcctgcctnaccctgccgggtacctgggattacaggcatgtgccaccacgcccagctaatttttgggtttttaatanagggggggtttcaccatgtcgaccaggctggtcttaaactcctgacctcaagngatccacccacctcagnttcccaaagngctgggattacaggcttgagccactgngcctggccagcatagctttcttaangcattcatgaagctgcaatgnataattgncttgagataacattggatgttaatactacagcaaattttgccatgtanaccacacatttattaaaagggatctcattctttagnattctcccggacttntncccatnccaaagttngccttcattttgaattgaaggtanggattaatnggct

SEQ ID NO: 6594 - DNA, 575 bp, Homo sapiens
  misc_feature (333)..(333): "n" may be a, t, c, g, other or unknown
  misc_feature (352)..(352): "n" may be a, t, c, g, other or unknown
  misc_feature (419)..(419): "n" may be a, t, c, g, other or unknown
  misc_feature (455)..(455): "n" may be a, t, c, g, other or unknown
  misc_feature (474)..(474): "n" may be a, t, c, g, other or unknown
  misc_feature (491)..(491): "n" may be a, t, c, g, other or unknown
  misc_feature (501)..(501): "n" may be a, t, c, g, other or unknown
  misc_feature (514)..(514): "n" may be a, t, c, g, other or unknown
  misc_feature (518)..(518): "n" may be a, t, c, g, other or unknown
  misc_feature (545)..(545): "n" may be a, t, c, g, other or unknown
  misc_feature (566)..(566): "n" may be a, t, c, g, other or unknown
  misc_feature (575)..(575): "n" may be a, t, c, g, other or unknown
gaggcagggtcttccctctgctgacaggctggagtgcagtgatgtaatcatggctcactacagccttgacccccagagctccagtgatccagtgatctatctcagtctgccgagtagctgagaccacaggcacattccaccagctgacaaaaattagccgggcgtggtggcgggcacctgtagtcccagctacttggaggctgaggcaggagaatggcgtgaacccaggaggcggagcttgcagtgagccaagattgccctactgcactccagcctgcgtaacagagcgacactctgtctaaaaaaaaaaaaaaaaaaaaaaaaaaaaaaaangaagaagaggaagactgtncagactactagagattatggcaacctctttctcaatcttggtttcttggtttttggttggtatttgnggagatgggatctcactttggtgcccacctgggctnaaactcctgggcttcaagngggccttccaccttaancttcccatanggctggaaatacnggcntgaaccccccatggcctgggctggaanccttttttttttttttttggnaaaggagtn

SEQ ID NO: 6595 - DNA, 514 bp, Homo sapiens
  misc_feature (363)..(363): "n" may be a, t, c, g, other or unknown
  misc_feature (455)..(455): "n" may be a, t, c, g, other or unknown
  misc_feature (459)..(459): "n" may be a, t, c, g, other or unknown
  misc_feature (463)..(463): "n" may be a, t, c, g, other or unknown
  misc_feature (468)..(468): "n" may be a, t, c, g, other or unknown
  misc_feature (497)..(497): "n" may be a, t, c, g, other or unknown
  misc_feature (504)..(504): "n" may be a, t, c, g, other or unknown
  misc_feature (510)..(510): "n" may be a, t, c, g, other or unknown
gaaatggggccttactgtgtctcccaggctggagtgcagtggcatgatcacggctccctgcagcctcgacctcttgggctcaagtgatcctcccacctcagcctcccgagtagctgggactaaaggtaggtgtcaccacacccagctaatttttttttttaagtagaagcttactttctgaggtgttaaattctaggtttctattattcaaatggcaatgttaagcaggctggtgaatatttccgttttgagttcattggggaaatatgaaaaataacatgtgaagtaatcctttgtaaacagaaaaatctcaattctattagaatttattccttcagcaaatatttattgggcacctactgngtgtcaggcactgtactgggtgctggggtagaatcatgatgaatttggataggaacagttacgaccttcatggagtttcattacaatttaantagntcanccggnttctggagacctttttttgagtactgggnaaatatnttgaanccac

SEQ ID NO: 6596 - DNA, 542 bp, Homo sapiens
  misc_feature (458)..(458): "n" may be a, t, c, g, other or unknown
  misc_feature (475)..(475): "n" may be a, t, c, g, other or unknown
  misc_feature (493)..(493): "n" may be a, t, c, g, other or unknown
  misc_feature (497)..(497): "n" may be a, t, c, g, other or unknown
  misc_feature (503)..(503): "n" may be a, t, c, g, other or unknown
  misc_feature (519)..(519): "n" may be a, t, c, g, other or unknown
  misc_feature (542)..(542): "n" may be a, t, c, g, other or unknown
gggattttgttgttttattttattttattttatttttgagacagagtgtagctgttgcccaggctggactgcaggggcatgatatcagctcactgcatcctccacctcccggattcgggtgatcatcctgtctcagcctcctgagcagctgcaatgacaggtgcacgccaccgcatctggctaatctttttgtatttttagtagagacaaggtttcaccaggttggccaggctggtcatgaacttccaacctccagtaatccacccgcctcagcctcccaaagtgctggaattacaggcgtaagccaccgcacccggcctagatgttgttgtttagaaatgcccccccagaccgggcgcggtggctcacaaggtcaggagattgagaccattctggccaacatgggcgaaaccccatctctactaaaaatgcaaaaattagctgggcgcggtggcacntgcctgtaatcccaagntactcggaagcttaggcngganaatcgntcgaccagggagtcanaagttgcaatgaacctgaaatgn

SEQ ID NO: 6597 - DNA, 568 bp, Homo sapiens
  misc_feature (506)..(506): "n" may be a, t, c, g, other or unknown
  misc_feature (528)..(528): "n" may be a, t, c, g, other or unknown
  misc_feature (549)..(549): "n" may be a, t, c, g, other or unknown
gtgagacagagtctcgctctgttgcccaggctggagtgcagtggtacgatcttggctcactgcaagctccacctcccgggttcaccccattctcctgcctcagcctcccgagtagctgggactacaggcgtctaccaccacgcctggctacttttttatatttttagtagagacaaggtttcaccatgttgaccaggatggtctcgatctcctgacctcatgatctgcccgcctcggcctcccaaagtgctgggattacaggtgtgagtcaccgtgcccggccctgtttatgttttaagaataaagttcacataataattaagtgcttaggtaaaataattagcaagtcttttgggttgatccaaattaaagctggtgtagcctaacattcttttcagtttctttgacttcaaaatgctgaaccacatcaacatgtttgaaaccatgcactattattttttggataaaatggtcagacaatgcttacaacagctagaatctatatngggacattttaaaggggacccnccaagaaccccccccccccgnggaagaaaattccaaattt

SEQ ID NO: 6598 - DNA, 531 bp, Homo sapiens
  misc_feature (86)..(86): "n" may be a, t, c, g, other or unknown
  misc_feature (156)..(156): "n" may be a, t, c, g, other or unknown
  misc_feature (220)..(220): "n" may be a, t, c, g, other or unknown
  misc_feature (389)..(389): "n" may be a, t, c, g, other or unknown
  misc_feature (460)..(460): "n" may be a, t, c, g, other or unknown
  misc_feature (499)..(499): "n" may be a, t, c, g, other or unknown
  misc_feature (503)..(503): "n" may be a, t, c, g, other or unknown
  misc_feature (510)..(510): "n" may be a, t, c, g, other or unknown
  misc_feature (515)..(516): "n" may be a, t, c, g, other or unknown
  misc_feature (523)..(523): "n" may be a, t, c, g, other or unknown
gagacagagtttcgctcttgttgcccaggctggagtgcaatggtgtgatctcagctcactgcaacctccgcctcctgggttcaagngattctcctgcctcagcctcccgagtagctgggattacaggcatgcgccaccatgcccagctaattttgnattttttagtagagacgggtttctccatgttggtcaggctggtctcaaactcccgacctcaggngatccgcccgcctcggcctcccaaaatgttgggattgcaggcgtgagccaccgcgcctggcctattatactctttaacagccctacactaagcctttcaggcaggctaaatccacagcgttcccatcaccaaagctgtcaaagaagcaaagtagccatgatgcacctgngcttcaaagccattcattcattcattcattcattcattcattcattcattcatttaacacaaggggttcanttccctggcctttttttcttcccaaacccttgggtaatnccangcctttntagannactggcncttaacaa

SEQ ID NO: 6599 - DNA, 530 bp, Homo sapiens
  misc_feature (411)..(411): "n" may be a, t, c, g, other or unknown
  misc_feature (477)..(477): "n" may be a, t, c, g, other or unknown
  misc_feature (482)..(482): "n" may be a, t, c, g, other or unknown
  misc_feature (484)..(484): "n" may be a, t, c, g, other or unknown
  misc_feature (491)..(491): "n" may be a, t, c, g, other or unknown
  misc_feature (522)..(522): "n" may be a, t, c, g, other or unknown
  misc_feature (526)..(526): "n" may be a, t, c, g, other or unknown
  misc_feature (529)..(529): "n" may be a, t, c, g, other or unknown
aaattcaacattttaattgtgatataacttatgtaaatactttccaaaaagtatctaagatattccactgtacaacacatcaaaactatctgagaagcgggagacaataaagtgtaaataaggcacacagtttacactcgtaattgcatcctaaactgttgaatagttgatatttacaaccccccaataacgtttttgcatcctgaattagtccttcacatcttgatatttggcataatgttcaaacacactttatacacactgaccgctccttaaaccactcacagatttaataaataccgaaaaaattaagagatttgaaggcttgatcttctatttacttcaagatgacagaagagtaggtttcttgtgatgaaatactacaagaatgaagaattaacaaactggtgngtaattcatcagaaaagcatattaacttgctgaagtccactgaatgaaaccaaaatgaagctgggnagtancnatctgantagcaggctggcttctatggtcccatacttntcgnagnc

SEQ ID NO: 6600 - DNA, 529 bp, Homo sapiens
  misc_feature (458)..(458): "n" may be a, t, c, g, other or unknown
  misc_feature (474)..(474): "n" may be a, t, c, g, other or unknown
  misc_feature (482)..(482): "n" may be a, t, c, g, other or unknown
  misc_feature (507)..(507): "n" may be a, t, c, g, other or unknown
gagacagtatctcaccctgtggcctaggttgcagtgcagtggtatgaccataactcactgtaacctcaaactcctgggtgcaagcaatccttctgcttcagcctcctaaaagccaggacaacaggcatatgccaccatgctgggctaatttttaaaaacatttttgttgagacagggtcttgctatgttacccaggctggtcttgaactcctagcctcaaagtgatcctcttgccttggccacgcaaagttctgagattacaggcatgaattaccatgcccggccaggaccagcactttgaattaactttgaattattgcttttctgttttctgcctcattaatttcctttatcttttttttcttcttgctttgtaattctttttctagctctttgagttgggaatttaaatcccaattttcatcctttcatttttactgatggtaaatatttaaggntatacattttcttctnaagactgntttaaatatatctcaaaaatctgangggatgaaggttaatatcaacg

SEQ ID NO: 6601 - DNA, 528 bp, Homo sapiens
  misc_feature (427)..(427): "n" may be a, t, c, g, other or unknown
  misc_feature (470)..(470): "n" may be a, t, c, g, other or unknown
  misc_feature (478)..(478): "n" may be a, t, c, g, other or unknown
  misc_feature (485)..(485): "n" may be a, t, c, g, other or unknown
aaccaaataagggatgttttctgccactgtcttcaaataattttcgacccctttatctctcatttcctatgggactccaattaaggcagaaagacttcagtttttcccacacaagctaagcacaggcagaaaatttcctcagtttttctaaaaagcagcaaacttgcatagctcagctattatagttatgtctttcaaggattatctcttatttgatttccactttttttttttttttttaatacggttcctggggtcttccctgcatactcacagcagtcgccagggatatgggcagagttcatactttaatttgggttttagccctttagcagctctctcagtcccaggattttcctcctaaaccccaagctgctctgaaagtcttctaacataataagccagtatggtggtggtggtggggggntttctatctctgaaactatgcaagttaggaaaccccttggatnaaaagctnccaatcncaattcttacccactggtttactaccctttaaagaataaactt

SEQ ID NO: 6602 - DNA, 528 bp, Homo sapiens
  misc_feature (422)..(422): "n" may be a, t, c, g, other or unknown
  misc_feature (464)..(464): "n" may be a, t, c, g, other or unknown
  misc_feature (486)..(486): "n" may be a, t, c, g, other or unknown
  misc_feature (493)..(493): "n" may be a, t, c, g, other or unknown
gtccagacagggtctcaccctgtcgcccaggctggagtgcagtgaagcgatcatagctcactgcagcctccacctcctgggctcaagtaatcctcccactttagcctcccaaggagccagaactacaggtgtgcgccaccgcaaccagctaattttaaaaaaaaattttttttgtggagacacagggtctcactgtattgcccaggctggtcttgaactcctggcctcaagcaatccacccgccttggcatcccaaagtgcggggattacaggcatgagcgattgtgccctgaaatttttctgattttactaagcacttcctacccgcaatttgcagtttctcttcctccacctcctgcttctagacccttctctcccacctcttctgagctctgcttggcctcccagcctgttgccttcanggtcttcaccatggtgtggctgccctggggagacactgcttnaaagccctggcttggggggganccttagncctatcttcatttctcttccatctggtacacaagg

SEQ ID NO: 6603 - DNA, 527 bp, Homo sapiens
  misc_feature (527)..(527): "n" may be a, t, c, g, other or unknown
aatgttttatttttttgagacggagtctcactctgtcactcaggctgcaatgccgtggcgtgatctcggctcactgcaagctccgcctccgggtttcatgccattctcctgcctcagcctcccaggtagctgggactacaggtgcccaccaccacccccggctaattttttgtatttttagtagaaacggggtttcactgcattagccaggatggtctcaatctcctgacctcgtgatccaccctcctgggcctcccaaagtgctgggattacaggcgtgagccaccgtgcccggcctgaaatagacaggtacttttatctctatttcacagtccaagcagctgacagagaactgttaaaggacttgtccaagatctctaagctagttagaggcagacagaggcaaattagagagaaaatctcaagtagttttctcttaactttttgcttttcctaacaaccaatgctcaataagaggaattgggctggtatatattaaggggataatttccgggaatgggatcaan

SEQ ID NO: 6604 - DNA, 525 bp, Homo sapiens
  misc_feature (462)..(462): "n" may be a, t, c, g, other or unknown
  misc_feature (484)..(484): "n" may be a, t, c, g, other or unknown
  misc_feature (499)..(499): "n" may be a, t, c, g, other or unknown
  misc_feature (505)..(505): "n" may be a, t, c, g, other or unknown
  misc_feature (512)..(513): "n" may be a, t, c, g, other or unknown
  misc_feature (522)..(522): "n" may be a, t, c, g, other or unknown
ggtaactgcaagacacaacccagggtaaccagaagttactgtgaaattctcaaacttgcaaaagaagcaaatatctgcatataaaaattttgtttcaggagaatactagggggaatttagactggagaaacatttccacttgtgtattgaaaagaataaaatcattatttaaacactctaagcttcaaactttccattaatccaaactgacctacttattaactcaaaatgctagtgttttctcctatcatatacgtcaatacgcatattacaatggttgggcacatgagtatagggtctctatatctaaaactttgacttaaagttaaccaactatttctcaaatccttaaaataattttcgtggataatttttcaatagccttataaggcatacaagcataactggctacaaaaaagtgtatatgtaaagggagttaatggccttgcttaattaaaatgnaaaactttagcatcttaaaatncatttatgggatttnaagggngcttcannaagtccctnttt

SEQ ID NO: 6605 - DNA, 499 bp, Homo sapiens
  misc_feature (411)..(411): "n" may be a, t, c, g, other or unknown
  misc_feature (421)..(421): "n" may be a, t, c, g, other or unknown
  misc_feature (424)..(424): "n" may be a, t, c, g, other or unknown
  misc_feature (462)..(462): "n" may be a, t, c, g, other or unknown
  misc_feature (467)..(467): "n" may be a, t, c, g, other or unknown
  misc_feature (479)..(479): "n" may be a, t, c, g, other or unknown
  misc_feature (485)..(485): "n" may be a, t, c, g, other or unknown
agacggagtctcgctcggtcgcccaggctggagtacagtggtccaatctcggctcactgcaagctccgcttcccaggttcacaccattctcctgcctcagcctccggagcagctgggactacaggcgacctccaccacacctggctaattttttgtatttttagtacagacagagtttcaccgtgttagtcagtattgtctcaatctcctgaccatgtgatccgcccgcctcagcctcccaaagtgctggaattacaggcgtgagccaccacgcccagccaggtagttctttatagcagtgtgagaacaggctcatgcaggtctggtggaaggtgattggatcatggtggctgtttctcatggtttaagagcatcccccttgatactgtcatcatgatagtgaattcttgngagatcttgntgnctaaaagtgtgtggtaccttccccatcttttttatggncctgnttctaccatggnaaaagnatgcttccactttg

SEQ ID NO: 6606 - DNA, 549 bp, Homo sapiens
  misc_feature (430)..(430): "n" may be a, t, c, g, other or unknown
  misc_feature (443)..(443): "n" may be a, t, c, g, other or unknown
  misc_feature (466)..(466): "n" may be a, t, c, g, other or unknown
  misc_feature (488)..(488): "n" may be a, t, c, g, other or unknown
  misc_feature (494)..(494): "n" may be a, t, c, g, other or unknown
  misc_feature (536)..(536): "n" may be a, t, c, g, other or unknown
  misc_feature (538)..(538): "n" may be a, t, c, g, other or unknown
catgtttcgggattatatatatgcacaaactttatttccctaaaaagagattagatattgttcggtagtatatccaactacataattttaccaactacctcacacttataattcttttactatgtgcaggcagtgttctatgtactttaggtatattaactaatttaatcattcaacaaccccatgaggctggcattgttcattgattttaatgagaaagctaagagaggaaataagtagcctttcaaaggtcacacagaagtaagtgacagatccaggattcatatccaagcattctggctctagtgtccatgcttctcaaccattatgacccaatattcaaccaaatcaatactgaaggacacgtgaaatgtatccggtattttactattacaaacaaaaatccaatgaacattcttgaagacatacncaaaaataatggntcaatagaagttactggaattgnaattttgggtcaacctatattnaaatgnaaggcttttggaatagctaaatagaattttgaaatggacagncntaacggttgga

SEQ ID NO: 6607 - DNA, 543 bp, Homo sapiens
  misc_feature (498)..(498): "n" may be a, t, c, g, other or unknown
  misc_feature (522)..(522): "n" may be a, t, c, g, other or unknown
  misc_feature (539)..(539): "n" may be a, t, c, g, other or unknown
  misc_feature (542)..(542): "n" may be a, t, c, g, other or unknown
ggtagagaaggggtttcaccatcttgcccaggctggtttctctgggctcaagagctccacccaccctggtctcccaaagtgctggaattacaagcatgagcagctgcacctggctccttttctataaattgggtgtgcagcaaggacacagcaaaaacaaaacagatatcctttactccctaaaaacaacaaaattatgatgtaccaaaaatagaaaaatctcactctatacactgattcttttcaaactataacaagtatacaaatactagtatttcccgtctttcatgagatatttgtaaagtctgccgattagttatctatcaagaacttaaggaaaaaatgccccaattgccaaacatgaataactaatttggattcaacatggacactttacataaacttttatccttggtattagagattttttttcttgggctccatacagattctaaatgctgacttccacattaccaaaagcagcagacattatttttncctggagaaaagggctcaatatantggccagcttggctcantcng

SEQ ID NO: 6608 - DNA, 545 bp, Homo sapiens
  misc_feature (455)..(455): "n" may be a, t, c, g, other or unknown
  misc_feature (482)..(482): "n" may be a, t, c, g, other or unknown
  misc_feature (501)..(501): "n" may be a, t, c, g, other or unknown
  misc_feature (509)..(509): "n" may be a, t, c, g, other or unknown
  misc_feature (521)..(521): "n" may be a, t, c, g, other or unknown
  misc_feature (536)..(536): "n" may be a, t, c, g, other or unknown
  misc_feature (539)..(539): "n" may be a, t, c, g, other or unknown
gagacaggttcctactgtctcacccaggctggagtgcaggagcaggatcatagctcaccatacgctcgaactcctgggctcaagcgatcttcccacttcagcttttcgagtagttgggaccaaacacaagcatgtgccaccatgcccagctaattttttttaaaattttttgttgagatgaagtctccctatgttgcccaggctggtcttaaattcctgagctcaggtgatcctcctacctcagcctcccggagtgctgggatttcaggtgtgagccactgcatgcatccctttagtggtatcttttgcaacttttagttcttcaaacttaatttttaattacagttattaatacccttttctaagtgagaaatgtgtacctttttcacaagattttagattgatttgaaattgaggattttatcttataatttcctcttaacagcccttggganaagcaggttttgcttggtgaagccaanggagagagaaccgaacccngacacttnaggtcatccttnatttggggattaccnggnccgatt

SEQ ID NO: 6609 - DNA, 547 bp, Homo sapiens
  misc_feature (479)..(479): "n" may be a, t, c, g, other or unknown
  misc_feature (499)..(499): "n" may be a, t, c, g, other or unknown
  misc_feature (527)..(527): "n" may be a, t, c, g, other or unknown
  misc_feature (544)..(544): "n" may be a, t, c, g, other or unknown
gagacggaatctcactctattgcccaggctggagtgcagcagcatgatctcggctcactgcaagctccgcctcccgggttcatgccattctcctgcctcagcctcccgagtagctgggactacaggcacccaccaccatgcctggctaattttttgtatttttagtagagacagggtttcaccgtgttagccaggatggtctcgatctcctgacctcatgatccgcccgcctcagcctcccaaagtgctgggattacaggcgtgagccatcgtgcccacccaggatctacattttaacaagatctcgatgatttgtgcatgcattaaaggttgagaaagcactagtctacatgcccatctatctggacaccccacagccactccagcccagcatggccatgctgaatgcagaccccttccctagaccacaaaatttctggttggggtttcctttctgatgaacaggttctatcctatgnatggagaatgggaatgtggnctggaatggggtcaatgtccccgcctgngggtggcttactttttnaag

SEQ ID NO: 6610 - DNA, 539 bp, Homo sapiens
  misc_feature (461)..(461): "n" may be a, t, c, g, other or unknown
  misc_feature (468)..(468): "n" may be a, t, c, g, other or unknown
  misc_feature (509)..(509): "n" may be a, t, c, g, other or unknown
  misc_feature (530)..(530): "n" may be a, t, c, g, other or unknown
ctgaaagatttaggtctttaacatccttgagttaaagtgcacaaagggtgtctaatgccatctgactgaggtgtaaaagtctaattaactaatgctttttgcagtgatagtaaatcagttaacattattaatcttcctgactaggcgtaagtgagtgaggagggctattgaaaaggagctaaacagttagactgggtacccttgaaaaagaaaaggaactctgaaagtgatgactgatgatactgaaaataactgagatacttaaaatccaaccgctcgccgggcctaccaccaggcaagagactctgaaagctgaggctgcagctccagggcagggagaggaagaggaggagctaggcggccgtgaaatgactctcatctcccatccttccctcccagcatcacccgagagagacacgactctcacgtgctggaggcttcctgccttaaattaacgctgnacctttncactaatggtttcagtagacccaaccaaaagtttggagaanttgagccaatgactccaccgnggggcccgt

SEQ ID NO: 6611 - DNA, 540 bp, Homo sapiens
  misc_feature (494)..(494): "n" may be a, t, c, g, other or unknown
  misc_feature (498)..(498): "n" may be a, t, c, g, other or unknown
  misc_feature (504)..(504): "n" may be a, t, c, g, other or unknown
  misc_feature (519)..(519): "n" may be a, t, c, g, other or unknown
  misc_feature (524)..(524): "n" may be a, t, c, g, other or unknown
  misc_feature (528)..(528): "n" may be a, t, c, g, other or unknown
  misc_feature (535)..(535): "n" may be a, t, c, g, other or unknown
gagacagagttccgctcttgttgcccaggctggagtgcaatggcacgatcttagctcactgcaacctccgcctcccaggttcaagtgatcctcccgcctcagcctcctgagtagctgggactacagatggacaccaccacatccagctaattttttttttttttagagatggggtctcgctatgttgcccagggtagtctcaaactcctggcctcaagtgatcctcccacctcaacctcctgaagcactgggattacaggtgtgagccaccatgtcagccacgagcattttttaaatggctgggggagggggaacaatatttcctaacacagaaaattcaaattccagtttgtaaagctgaattggcacacagccatgcccctcatttacatattgtccgaggctgcttttgcactgcagtggcagaattgagtcgttgcatcggagaccacgtggccacacaggctaaaatatttaccaactgggcctttacngagnaaagtncccaacttttcctangcttnaaangaagggnaaatt

SEQ ID NO: 6612 - DNA, 535 bp, Homo sapiens
  misc_feature (305)..(305): "n" may be a, t, c, g, other or unknown
  misc_feature (378)..(378): "n" may be a, t, c, g, other or unknown
  misc_feature (436)..(436): "n" may be a, t, c, g, other or unknown
  misc_feature (488)..(488): "n" may be a, t, c, g, other or unknown
  misc_feature (496)..(496): "n" may be a, t, c, g, other or unknown
  misc_feature (498)..(498): "n" may be a, t, c, g, other or unknown
  misc_feature (511)..(511): "n" may be a, t, c, g, other or unknown
agacagcatctcactgtcacccaggctggagtgcaagggtgtagtaatcatagctcactgcagcctcaacctcccaggctcaagtgatccccctggctcagcctcccaagtagctgggactacaggtgcatgccaccacacctagctaattttttttttttttttttagtagaaacagggcctcattatgttgcccaggctggtctgaaacttctgagctcaagcagtcctcctcccttagcctcctaaagtgctgggattacaggtgtgaactgctgcacccagcctactatactttttcttgngtattttcctcgtggtttccatgagataaacaactttttatttgctcaatttttttttttttttttttttaanatagagtcttgctctgtcacccaggctagaatgcaatggtgtgatcttggcttactgnaatctccgccttctgggttcaagcgcttttctggctaaccttctgagtactngattacangngcccccattgggnccaagttaatttgggcctttaaaa

SEQ ID NO: 6613 - DNA, 541 bp, Homo sapiens
  misc_feature (412)..(412): "n" may be a, t, c, g, other or unknown
  misc_feature (469)..(469): "n" may be a, t, c, g, other or unknown
  misc_feature (477)..(477): "n" may be a, t, c, g, other or unknown
  misc_feature (499)..(499): "n" may be a, t, c, g, other or unknown
  misc_feature (516)..(516): "n" may be a, t, c, g, other or unknown
  misc_feature (537)..(537): "n" may be a, t, c, g, other or unknown
aagatagaggcaaggtctcactatgttgcccatgctggtctcaaactcctgggttcaagtgatcctcctgcctcagcctcccaaaatgctgggattccaggtgtgagccactgcacctggcctgtgttttaaatatttttaaaggactcttttcatcagagtattcttccttgagggaaggaaaagaatttacttagaacctttcatccagtgcattcaaggtcatgcacaaagcttccaaattccaacaagcaaacgcgtggcggtgggggcaggggcaggaaggcccagggaaggaaaatgtccgatctgaaccaattaccatctcctggtcccctcggaggcatctgtggcttgacttctcccacgccccatagacccggcaccgtgtaataactgggcccgtgccctnacctgaaaactgggggtcacacggcctgtctgaaaaaccctgatgtgataaacaccncagagcancattacattttcctattgcccnactgggttaaagaaacnctttgggaaaaaatggggaancctt

SEQ ID NO: 6614 - DNA, 541 bp, Homo sapiens
  misc_feature (441)..(441): "n" may be a, t, c, g, other or unknown
  misc_feature (510)..(510): "n" may be a, t, c, g, other or unknown
  misc_feature (513)..(513): "n" may be a, t, c, g, other or unknown
  misc_feature (520)..(520): "n" may be a, t, c, g, other or unknown
  misc_feature (541)..(541): "n" may be a, t, c, g, other or unknown
ggtggctcacatctgtagatgcagctactcaggaggctgaggtgggaggatcaattgagctccggaggtcgaggctgcagtgggctgtgattgcaccactgcactgtagcctgggcgacagagcaagatcctgtctccaaaaaaaaaaaaaggaaaaactattgtttttgccatcgccacccagtaaacatagttactgatatttttacttgcagtgtaactttctggccccttcccataatcacatgtatttggtaagcttttgttttcaaaataagccaataacatttaataagaaacaacagtatatttgtctgttttcatgctgctgataaagccatacccgagactgggtaatttacaaagaaaaagaagttgaatggactcacagttccatgtggctggggaggcctcccaatcatggcagaaggcgaaaggcangtcttgcatggtggcagccaagagagagaatgagaaccaaccaaaaggggtacttaagacctttggcanganaatggcntgaacccggagggggaccttn

SEQ ID NO: 6615 - DNA, 557 bp, Homo sapiens
  misc_feature (185)..(185): "n" may be a, t, c, g, other or unknown
  misc_feature (239)..(239): "n" may be a, t, c, g, other or unknown
  misc_feature (468)..(468): "n" may be a, t, c, g, other or unknown
  misc_feature (489)..(489): "n" may be a, t, c, g, other or unknown
  misc_feature (520)..(520): "n" may be a, t, c, g, other or unknown
  misc_feature (524)..(524): "n" may be a, t, c, g, other or unknown
  misc_feature (528)..(528): "n" may be a, t, c, g, other or unknown
  misc_feature (546)..(546): "n" may be a, t, c, g, other or unknown
  misc_feature (550)..(550): "n" may be a, t, c, g, other or unknown
gagacagagtctcgctctgtcacccaggctggagtgcagtgatgcggtctcggctcactgcaacctccgcctcccaggttcacgccattctcctgcctcagcctcccaagtagctgggactacaggcgcccgccaccacgcccagctaattttttgtatttttagtagagacagggtttcactgngttagccaggatggtctggatctcctgacctcgtgatccgcccacctccgcctnccaaagtgctgggattacaggcatgagccaccatgcccagctgtaaaagccttttggcttctgatccagtgcttttttcacacctcaacatatatcatcccaaattcaatctattggtagtgtctttctcaggcttaatttccaactatttcatcaaaaagatatttattagcccgacctgtactaagctggatgctacatatgaaacaagggccaattttagacaggnatttttggccaaagttatacncagggttccattaaggaattttttgtgcaancccntttnttggacaaggaacagggnttcncgtttta

SEQ ID NO: 6616 - DNA, 501 bp, Homo sapiens
  misc_feature (310)..(310): "n" may be a, t, c, g, other or unknown
  misc_feature (374)..(374): "n" may be a, t, c, g, other or unknown
  misc_feature (380)..(380): "n" may be a, t, c, g, other or unknown
  misc_feature (408)..(408): "n" may be a, t, c, g, other or unknown
  misc_feature (411)..(411): "n" may be a, t, c, g, other or unknown
  misc_feature (438)..(438): "n" may be a, t, c, g, other or unknown
  misc_feature (458)..(458): "n" may be a, t, c, g, other or unknown
  misc_feature (475)..(476): "n" may be a, t, c, g, other or unknown
  misc_feature (497)..(497): "n" may be a, t, c, g, other or unknown
gagatagagtcttgctctgttacccaggctggagtgcagggcatgatcttggctcactgcaacctctgcttcctagcttcaagtgattctcattcctcagcctaccaagtagctggcattacaggcacacaccaccaggcccggctaatttttgtgtttttagtagagatgggctttcaccatgttgtcccaggctggtctcggaatcctgacctcaggtgatccacccaccttggcctcccaaagtcttgggattacaggcgtgagccacagtgcctggccacactgagtaattttttttttttttcanacggagtctcactctgtcgcccgggctgtagtgcagtggcgtgatcttggctcaccacaacctntgcctncaccttccggattcaagtgattctctgnctnaccttccaagtagctgagattacaggngccaccaccatgcctgggtnaattttggggtttaagnnaaaccaaggttcactataccnttgg

SEQ ID NO: 6617 - DNA, 507 bp, Homo sapiens
  misc_feature (433)..(433): "n" may be a, t, c, g, other or unknown
  misc_feature (435)..(435): "n" may be a, t, c, g, other or unknown
  misc_feature (441)..(441): "n" may be a, t, c, g, other or unknown
  misc_feature (451)..(451): "n" may be a, t, c, g, other or unknown
  misc_feature (465)..(465): "n" may be a, t, c, g, other or unknown
  misc_feature (471)..(471): "n" may be a, t, c, g, other or unknown
  misc_feature (502)..(502): "n" may be a, t, c, g, other or unknown
acacaattttactttaaattctgggatacacgtgctgaagatgcaggttttttacataggtatacgtgtgccatggtggtttactgcacctatcaacctgtcatctaggttttaagccctgcatgcattaggtatttgtcttaatgctctccctcccttgccccccacccccgacaggcccccgtgtgtgatgttcccctccctgtgtccatgtgttctcattgttcagctcccacttatgagtgagaacatgtggtgtttagttttctgttcctgtgttagtttgctgaggatgatggtttccagcttcatccatttccctgcaaaggacatgaactcattcttttttatggctgcatagtattccatggcttatatgtgccacattttctttatccagtctggcatcgatggacatttgggtatgattaanangctgangagtttctgnaataagattctttncctggnccctttcttacagacttaaatgctagaagtncatat

SEQ ID NO: 6618 - DNA, 544 bp, Homo sapiens
  misc_feature (357)..(357): "n" may be a, t, c, g, other or unknown
  misc_feature (367)..(367): "n" may be a, t, c, g, other or unknown
  misc_feature (371)..(371): "n" may be a, t, c, g, other or unknown
  misc_feature (375)..(375): "n" may be a, t, c, g, other or unknown
  misc_feature (428)..(428): "n" may be a, t, c, g, other or unknown
  misc_feature (460)..(460): "n" may be a, t, c, g, other or unknown
  misc_feature (477)..(477): "n" may be a, t, c, g, other or unknown
  misc_feature (500)..(500): "n" may be a, t, c, g, other or unknown
  misc_feature (502)..(502): "n" may be a, t, c, g, other or unknown
  misc_feature (507)..(508): "n" may be a, t, c, g, other or unknown
  misc_feature (537)..(537): "n" may be a, t, c, g, other or unknown
gtttgtttttatttgtcgttgttgtttttgagacagggtctcactaaatcaccccaactggaatgcagtggtgtgatcacatctcactgcagccttgacctcctgggctccagtttttgttttttgttttttcctatgctggtgtttcacttaaaagcacagaataactatgctctgtatgctacaaaatgaaatatattcccttttatttctattgtttttgagggatctggtgaggaatgttgacgttaactattattgatcatgttattattactattaataccacctttaagctagttcttacatccatatattttcacctgccaaacagtaaaggcaaacagtcattcctgngtttttttgnttgnttgnttcttgctttgccctcaacccaggctagttccaaacaagtttccactcaactnctaacccatagcctggaactttcatttgctgnttcattcctatcctttncagcttggaaattggaaaatacntntaagnntcttaccgatgcaaaaaaaagttttaagncccattc

SEQ ID NO: 6619 - DNA, 322 bp, Homo sapiens
  misc_feature (295)..(295): "n" may be a, t, c, g, other or unknown
  misc_feature (304)..(304): "n" may be a, t, c, g, other or unknown
  misc_feature (306)..(306): "n" may be a, t, c, g, other or unknown
  misc_feature (309)..(309): "n" may be a, t, c, g, other or unknown
  misc_feature (313)..(313): "n" may be a, t, c, g, other or unknown
  misc_feature (316)..(316): "n" may be a, t, c, g, other or unknown
  misc_feature (322)..(322): "n" may be a, t, c, g, other or unknown
gagtcagggtctcactctgtcactcagtctggagtgcagtgacatgatcatggctcactgcagcctcaacctcaggtgttttttttttttttttttttttttttttttagttgggtgaatactgtaaaattgtatttatgctgtgtttttttttttttttttttttgagtcagggtctcactctgtcactcagtctggagtgcagtgacatgatcatggctcactgcagcctcaacctcaggtgttttttttttttttttggagtgttgcactgtcacctgggctaaagtgcaanggctccatntnagntcantgnaacctn

SEQ ID NO: 6620 - DNA, 546 bp, Homo sapiens
  misc_feature (352)..(352): "n" may be a, t, c, g, other or unknown
  misc_feature (367)..(367): "n" may be a, t, c, g, other or unknown
  misc_feature (370)..(370): "n" may be a, t, c, g, other or unknown
  misc_feature (386)..(386): "n" may be a, t, c, g, other or unknown
  misc_feature (408)..(408): "n" may be a, t, c, g, other or unknown
  misc_feature (415)..(415): "n" may be a, t, c, g, other or unknown
  misc_feature (452)..(452): "n" may be a, t, c, g, other or unknown
  misc_feature (467)..(467): "n" may be a, t, c, g, other or unknown
  misc_feature (498)..(498): "n" may be a, t, c, g, other or unknown
  misc_feature (505)..(505): "n" may be a, t, c, g, other or unknown
  misc_feature (510)..(510): "n" may be a, t, c, g, other or unknown
  misc_feature (528)..(528): "n" may be a, t, c, g, other or unknown
  misc_feature (539)..(539): "n" may be a, t, c, g, other or unknown
gtggcacgaaacattttaattgtaaacagcaaggctctctgccaggcagcccagatgaacaggggtggcactgtgctggggtgaggtgctttctttgtgggaacgaaagcagacggcccaccctcgtctagccctgggcccctgtccccaaggccagctcgctgagcctgcgctcctcctggaagcggatgagggcatctctctggttgaccaaatccaccagcttcctcaggacctggtcctcagcctgccgatcagcagctgtctttaggttttcttcccggttcatgtagcctcgtagctcctggtccagctgccactgtttctcctccagattcaattcctgcaccgngatcatgaactcggnctnctcagcaccaagctgntggtcttgtcaacgagctgtancaactgnctacccataagttctttttgctggtctggggaactgnttttggcgccttaanggcagttcaagtttaacgcccttgggcttancttcctnaaggnagcctcaatctaattaancccccttgganggctggg

SEQ ID NO: 6621 - DNA, 487 bp, Homo sapiens
  misc_feature (420)..(420): "n" may be a, t, c, g, other or unknown
  misc_feature (426)..(426): "n" may be a, t, c, g, other or unknown
  misc_feature (441)..(441): "n" may be a, t, c, g, other or unknown
  misc_feature (456)..(456): "n" may be a, t, c, g, other or unknown
  misc_feature (481)..(481): "n" may be a, t, c, g, other or unknown
  misc_feature (483)..(483): "n" may be a, t, c, g, other or unknown
  misc_feature (485)..(485): "n" may be a, t, c, g, other or unknown
agttgagacggggtttcaccatgttggtcaggctggtctcaaactcctgaccttaggtgatccacccgcctcggcctctcaaagtgctgggattacaggcatgagccaccacacctggcctcaagacttactttaaattaaaataacaggagagaattatagaatgacaatcaccaaggattctaaaagtctacataaccataagcacaattgttcacagagcatctagacccgatctcagtaagaaacaatgaaagcactgacttggcaccaacacgagactgaaaaaccagaccacaggcttctcttaaacatcaacatggccttgggagtgggcagtggagggacgcggaaaatttatagcctcctaaaaagatcccgtctgctttcttaaattcttcacctcgcttatttccttantgctgngctcatcaaaaagcncaaattaaatcctantcagggcatccaggtttagaaaaantntntg

SEQ ID NO: 6622 - DNA, 494 bp, Homo sapiens
  misc_feature (5)..(5): "n" may be a, t, c, g, other or unknown
  misc_feature (22)..(22): "n" may be a, t, c, g, other or unknown
  misc_feature (31)..(31): "n" may be a, t, c, g, other or unknown
  misc_feature (58)..(58): "n" may be a, t, c, g, other or unknown
  misc_feature (69)..(69): "n" may be a, t, c, g, other or unknown
  misc_feature (82)..(82): "n" may be a, t, c, g, other or unknown
  misc_feature (90)..(90): "n" may be a, t, c, g, other or unknown
  misc_feature (106)..(106): "n" may be a, t, c, g, other or unknown
  misc_feature (124)..(124): "n" may be a, t, c, g, other or unknown
  misc_feature (150)..(150): "n" may be a, t, c, g, other or unknown
  misc_feature (198)..(198): "n" may be a, t, c, g, other or unknown
  misc_feature (214)..(214): "n" may be a, t, c, g, other or unknown
  misc_feature (271)..(271): "n" may be a, t, c, g, other or unknown
  misc_feature (289)..(289): "n" may be a, t, c, g, other or unknown
  misc_feature (401)..(401): "n" may be a, t, c, g, other or unknown
  misc_feature (418)..(418): "n" may be a, t, c, g, other or unknown
  misc_feature (424)..(424): "n" may be a, t, c, g, other or unknown
  misc_feature (455)..(455): "n" may be a, t, c, g, other or unknown
  misc_feature (465)..(465): "n" may be a, t, c, g, other or unknown
  misc_feature (473)..(473): "n" may be a, t, c, g, other or unknown
  misc_feature (483)..(483): "n" may be a, t, c, g, other or unknown
gctgntgttactggggaacttnttgcatganaatatttgcatatatgaatctccagtnccaagcatacnccaaaaatgggtncatttcanatgaaggacataacanagccctaataaaatacanaattgagcttaatttaatttaactgncttgggcaaccatcatgcctggctaatatgccatattatttccgttgnacacagtacatgtttnggtttactaaacattgatcaaaattgatcgaaatctctaagttttggttaccatgtncagagaacaattgctcancatggcatttaaataaaacagtaatattttaaaaattcacaaatccaatgcacaatttattttaaaaaaataaaatttaaaaaccttgagggatgggatgaaggctttgggnaattaacctgaaaaacnaaactnaccaaaaacttccagaaccaggttggttccnggattatacntttaaacncttttaaagnggactcctggc

SEQ ID NO: 6623 - DNA, 546 bp, Homo sapiens
  misc_feature (333)..(333): "n" may be a, t, c, g, other or unknown
  misc_feature (475)..(476): "n" may be a, t, c, g, other or unknown
  misc_feature (508)..(508): "n" may be a, t, c, g, other or unknown
  misc_feature (519)..(519): "n" may be a, t, c, g, other or unknown
  misc_feature (525)..(525): "n" may be a, t, c, g, other or unknown
  misc_feature (533)..(534): "n" may be a, t, c, g, other or unknown
gagatggagtctcgctctgtcatccaggctggagtgctaatttttgtatttttactagagatggggtttcaccatattggccaggctggtctcaaactcctgactttgtgatctgcccacctcagcctcccaaagtgctgggattacaagtgttggtgccgtgagctgcgcccagccaactactgtgacttctaaaaggtgaatattataaaattctagcttaaccaatttccctccgcttcatcgaattttggacatttgaacttcataacaattcatttttgttttgtttcgttttgttttgagacggagtctggctctgtctccaggggnggagtgcagtggcgcaatctcagctcactacaaccaccgctccgggttaatgagattcccctgcttcagcctccaagtagcccgggattacagacatgtgccaccacgcccaagttattttttggattttaagtaaaagacnngggtttaaccatgtcggccaagggtgggcttnaacttctgganccttgnaatccccnnccttttggaagg

SEQ ID NO: 6624 - DNA, 505 bp, Homo sapiens
  misc_feature (423)..(423): "n" may be a, t, c, g, other or unknown
  misc_feature (441)..(441): "n" may be a, t, c, g, other or unknown
  misc_feature (466)..(466): "n" may be a, t, c, g, other or unknown
  misc_feature (470)..(470): "n" may be a, t, c, g, other or unknown
  misc_feature (480)..(480): "n" may be a, t, c, g, other or unknown
  misc_feature (483)..(483): "n" may be a, t, c, g, other or unknown
  misc_feature (489)..(489): "n" may be a, t, c, g, other or unknown
gagatggagtttcactcttgttgcccaggctggagtgtagtggcatgatctcagcttactgcaagctccaccttctggtttcaagcggttctcctgcctgagcttcctgagtaactgggattacaggtgcctgccaccacacccagctaatttatgtgtttttagtagagatggagtttcaccatattgaccaggctggtcttgaactccggacctcgtgatctgccagtctcagcctccctcccaaagtgctgggattacaggcatgagccaccacaccctttttttttttttttttttttaaaggagctaagtttctcctgtatcttaaacagagaggcttcatagtgtagtcaatgctcatcattgactcaattctagggtaccaatggtgctggaaacaaaggagatacatcaaaaatnctacctagcagaaaactnttccctatggatgggctttaaaacntttnaaaatacctnggnaaggcnaatttgaaaaagggca

SEQ ID NO: 6625 - DNA, 552 bp, Homo sapiens
  misc_feature (518)..(518): "n" may be a, t, c, g, other or unknown
  misc_feature (520)..(520): "n" may be a, t, c, g, other or unknown
  misc_feature (522)..(522): "n" may be a, t, c, g, other or unknown
aatagcagttgtccagtggaattatgtgtttatttgtgtgattaggattctctctctctctttcattcttattctctgatggtgggggccatgttttcagtcacccctatatatccatagtacaacaacatgtcccccacaaaagactaattaaaagaaaaagaaactcaactatgtatgtgtgttcctctacgtatatgcatagggaaaatgtaaaaactagaataagtatccatttggtaagattaacagggatgctttattttcttctttttgcttctgggttttcaaaactttataaacggttattctgtaatcatgcaaaaattcaattaaaaatagatacacgttataacggattgaattgtgttccccaaaacggtgtgtcgaagtcctacctccagtaacctgtgaatgtggccctcttaagaaaaagagtctttgcagatgtaattaagatgtaagttatacagattagggtggccctaaatccaatcactagtatccttaaggaaaancntngagaccggcacaccccggaaggacccagcc

SEQ ID NO: 6626 - DNA, 548 bp, Homo sapiens
  misc_feature (503)..(503): "n" may be a, t, c, g, other or unknown
  misc_feature (505)..(505): "n" may be a, t, c, g, other or unknown
  misc_feature (519)..(519): "n" may be a, t, c, g, other or unknown
  misc_feature (521)..(521): "n" may be a, t, c, g, other or unknown
  misc_feature (548)..(548): "n" may be a, t, c, g, other or unknown
gagacagagtctcaatctgttgcccaggctggagtgcagtggagcgatctcagctcactgtaacctccacctcctgggttcaagtgattctcctacctcagcctcctgagtagctgggattacaggcgtgcaccaccacacccggctaatttttgtatttttagtagagacggggtttcaccatgttggccaggctggtcttgaactcttgacctcgtgatccacctgccttggactcccaaagtggagaaatattttataaagtgaagacaagactcatgcaaatatcagatggaaatgtaccaaagattttatttaactcaagaaatagtcatatgttacatttgattcaaaggaaaaatcccatagataaatagacaatagacagataaatgatagacagattaagatggatggatggatggatggatggatggacggatggatggatggatgaatagggtcaataagggaatgctggtgctgaaatggattaccaaatntngccaaatggtggantnctggatgaagcttcaaggcattccctn

SEQ ID NO: 6627 - DNA, 546 bp, Homo sapiens
  misc_feature (456)..(456): "n" may be a, t, c, g, other or unknown
  misc_feature (523)..(523): "n" may be a, t, c, g, other or unknown
  misc_feature (546)..(546): "n" may be a, t, c, g, other or unknown
ccaagaaatcttaatttctttattgtttgactttttgactcaacaatttttttaaaactttttgtttttttctgaaacgttcttgttgttatgagccttttgttttgttctcgttaaatgcactcgacccaaaattggtttggcatatcgaaaaggagaccaaggagggaggggctggggcgtgggaggtggggaggaggcccgaatggacagaaagttgaggataagagaagaggaacatagagacagccagaaagacatggggaaagagtgttggagacagagaaaggggaaggcaagggaaagccaaaagaaaccaaaatccagagaaaaagaattaacaagatttaggagcaaacgagttcaggagcctaaggaagggagtaggagaggaaaccaagacccttctctgtaccgtcccagctggggtggggccgtcaaggcaccaggtctggntaggttggggggacacctgggctctggggccggtttgcactggacttgcatgatgtccagcccacangggggccctgcacacagtttttn

SEQ ID NO: 6628 - DNA, 544 bp, Homo sapiens
  misc_feature (514)..(514): "n" may be a, t, c, g, other or unknown
  misc_feature (535)..(535): "n" may be a, t, c, g, other or unknown
gagatggagtcttgctctgtcacccaggctggagtgcagtggcgtgatctcagctcaccacaacctccgcctcctgggttcaagcgattctcctgcctcagcctcctgagtagctgggattacaggtgtgtgccaccacacccaactaatttttgtatttttagtggagacggggtttcaccatgttggtcaggctggtcttgaactcctgacctcatgatctgcccgcctcggcctctcaaaatgctggaattacaggcgtgagccactgcgccaggccgtatttaccattttcaaaaacttgcagcatatcctactctactcaaaacagtaagcccataaactgtttattgagttttaaaatgtttggaaagtatctatacttattttttacggagtaatgctatctattcatagtattactggctcagggaagattctgcctagaatcaatatatcacaaagcaacccaggagcaggatgaacctaagggagaaatatggctggggttctnctggggaggaaatgactgganaattttaaa

SEQ ID NO: 6629 - DNA, 546 bp, Homo sapiens
  misc_feature (456)..(456): "n" may be a, t, c, g, other or unknown
  misc_feature (473)..(473): "n" may be a, t, c, g, other or unknown
  misc_feature (504)..(504): "n" may be a, t, c, g, other or unknown
  misc_feature (526)..(526): "n" may be a, t, c, g, other or unknown
  misc_feature (540)..(540): "n" may be a, t, c, g, other or unknown
  misc_feature (546)..(546): "n" may be a, t, c, g, other or unknown
aacttgaacagggaaagtttaatatagagaattactggctttaacagtgaactggaataatgagggcttcactggtaaaatgcttctgaattgactggaaatccatttggggtgctggggaacgttattcccagagaggtgcctcagtggaggcgctgtgtctcctacgcaacttctgagggctggagggtgccaagggcagctgctgaccgcctggtgcttcaggagctgggtgctggggaagccacatgcactgcggcgtccagaggcagaagcacaaccaacaagaaccacgaaggaggcgcctttcctcctataatgcctgtttggtgccctctactgacaaagcttatcccctttcaaaaaactgccaactgaaaaagctgaatttggaacataaagtcaataaatccataaccagcaatactatggggcctggggtgcgctggcctttantgagtggagtggggccnaaggatgcttgcatgtcctgcaatggcacancgggccttcaccgggggaaaancattcctggaaagngtcatn

SEQ ID NO: 6630 - DNA, 558 bp, Homo sapiens
  misc_feature (472)..(472): "n" may be a, t, c, g, other or unknown
  misc_feature (502)..(502): "n" may be a, t, c, g, other or unknown
  misc_feature (510)..(510): "n" may be a, t, c, g, other or unknown
  misc_feature (558)..(558): "n" may be a, t, c, g, other or unknown
gttttttttttttttcacctttaaataaaaatactttattcattcctgataggttatcaaaatgtacactgttaaccaagtaaaaatggtatgctgaaatagttaactagggcatatttgaagaattttgtttacttttaaaagaggaaaaatcacttccaatcttcccttccacacattcctaacaagcctgcactatacctgcttaaaactgaaaatataaacaattacatgggccccacttcattacagaatgcattttcctgtactcttaaaggaagctattacattgaagttaccttcctttgccaaaaactttcagacaagtttactgctctttatattttgtgtaactttgtaaattatacaagaaatatagcacacaacttgaattaatctaaaaacacatacacataaacacaggataaagtgcaacacaacaggaacatggtctggcaacattcactttctnaaacccccccgaaaggatttcggagtaaanggaataangtggtctcaaggcttgaccctaaatcaccagaataggtattttccccn

SEQ ID NO: 6631 - DNA, 527 bp, Homo sapiens
  misc_feature (437)..(437): "n" may be a, t, c, g, other or unknown
  misc_feature (451)..(451): "n" may be a, t, c, g, other or unknown
  misc_feature (484)..(484): "n" may be a, t, c, g, other or unknown
  misc_feature (496)..(496): "n" may be a, t, c, g, other or unknown
  misc_feature (506)..(506): "n" may be a, t, c, g, other or unknown
  misc_feature (514)..(514): "n" may be a, t, c, g, other or unknown
  misc_feature (523)..(523): "n" may be a, t, c, g, other or unknown
atttaatattttttatttaatcttttaattttaaaaaaaaacccattaacagtacattttggtctaaaatggtccctctgctgaaatgctaggtgctagccgtaattctggctttaaaaccaaaaccccaaatatttaataaataaaaattagaattagttgccattctactccaaaccagctagcctagctgaagagaagagggaagggggaagaggccagagaaaggaggaggcagtcagatcttagacctgtcgctacagggacagctgaaagaagtagcactaagaaagatcatccgagcagtccccagtacagcccccactttttggcagaggtagggtaagggttatgtgcaccctcctcctaccctcaattcatttgtgtcatagagggagaaagttaaaagctcagctttggtttctggcccaagttangggagcttagaaanggtaacccttggtccagcttttggcagaatganggcccacagatnggacaattanggcacaanccttggctntgga

SEQ ID NO: 6632 - DNA, 545 bp, Homo sapiens
  misc_feature (499)..(499): "n" may be a, t, c, g, other or unknown
  misc_feature (523)..(523): "n" may be a, t, c, g, other or unknown
  misc_feature (545)..(545): "n" may be a, t, c, g, other or unknown
agacggagttttgctctttttgcccaggctggagtgcaatggtgcactctcggctcactgcaacctctgcctcctgtgttcaagtgattctcctgcctcagcctcccaagcagctgggattacaggcatgcaccatgcccggctaattctgtatttttagtacagacagtgtttcactatattggtcaggctggtcttgagctcctgacctcaagtgatccacccgcctcggcctcccaaagtgctggggttacaggcgtgagtcactgtgcccggcctcaaaaatctttaataaagaacttgctataatacagggaagaggataattctgctacattggagaaaggtttcttctcctgagacaagatggaccaagtctctcaatccgcaaaaacaatgaaaaacaaacaacgatgtgtcaatacttagcattaaagaagagtaatttttctattttaaaaagttcattaattttctggctattaaaagacaaattctntaaggattcaatggattgaatatngggggaaaggaagaaatttaan

SEQ ID NO: 6633 - DNA, 400 bp, Homo sapiens
  misc_feature (47)..(47): "n" may be a, t, c, g, other or unknown
  misc_feature (149)..(149): "n" may be a, t, c, g, other or unknown
  misc_feature (330)..(330): "n" may be a, t, c, g, other or unknown
  misc_feature (333)..(333): "n" may be a, t, c, g, other or unknown
  misc_feature (349)..(349): "n" may be a, t, c, g, other or unknown
  misc_feature (371)..(371): "n" may be a, t, c, g, other or unknown
  misc_feature (376)..(376): "n" may be a, t, c, g, other or unknown
  misc_feature (394)..(395): "n" may be a, t, c, g, other or unknown
cagacggagtctctgttgcccaggctggagtgaagtggcgagatctnggctcactgcaacctccacctcctgtgttcaagtgattctcctgcctcagcctcccgagtagctgggattacaggcacgtgccaccacgcccggctaaattntgtattttcagtggagatggggtttcaccatgttggccaggctaatctcgaactcctgacctcaaatgatccacccgcctcggcctcccgaagtgctgggattacaggcatgagtgcaagaccagcctgggaaacatatagagaccccatctttataaaaaatgcaaaattggccaaacgnganggcacacacttgtagncccagctacttgggaggctgangtggnaggatcccttgaacccannagttg

SEQ ID NO: 6634 - DNA, 546 bp, Homo sapiens
  misc_feature (511)..(511): "n" may be a, t, c, g, other or unknown
  misc_feature (516)..(516): "n" may be a, t, c, g, other or unknown
  misc_feature (543)..(543): "n" may be a, t, c, g, other or unknown
ctttgagacagggtcttgctctctcacctaggctggagtgcactggcacaatcacggctcactgcagcctcgaactcctgggctcaagtgatcctcccacatcagcctcctgagtagctgggactataggcacatgccaccatacccagctgatttttgtatttttggtagagacggggttttgccatattgtcctggctggtctcaaactcctgggctcaagcaatcgtctgcctcggcctcccaaattgcaaagattataagcatgagccaccgcgcccagcctagattcgtcattctaaactgcagttagaatcatggtattccctctttaattcagtgtatcctcattgtctgtactagggtaaacgtccttcacacggttcataaggcctttgtaccacggccccagctcacgtctctagccttaccccttaccatttgtattacaaccctgtgcacgatccattctgaacaatttaccaattccttaagtaaaagccaaactttncttancttctgaatctagaaatcctatggccngga

SEQ ID NO: 6635 - DNA, 551 bp, Homo sapiens
  misc_feature (535)..(535): "n" may be a, t, c, g, other or unknown
agaaatgccagacactaattacaagactgaagatttgtgattattaaagtgataagtttccagtgacatatacatgaaatgccagcacatagctaatatcactgaccacatggactgctggggacatggattcctaaatgctatgtatgtgctcactttcactttaatgtaagttttaattaaaagcctcattacttgggctctcctgtgtatatatggcattagtgtgtattttagatcatctcaaaattggcaaaaacaattatggttaaaaataatagtatttataaaaatttatatagaacttctccagtaaattcatcaaaaatactctgatttatctatgcagattgcaggaggaaatagagtgttttgccatcttaggactccacctttgcctggtactgaaacttttaaactaaccacagtaaatagtcatatacaggacaagatcagactggatataagtgacataagtcaaatacttcaaaatcctttctgcatccaatctctcagaaaagattaatttcaaaancctggatctggctatt

SEQ ID NO: 6636 - DNA, 550 bp, Homo sapiens
  misc_feature (479)..(479): "n" may be a, t, c, g, other or unknown
  misc_feature (498)..(498): "n" may be a, t, c, g, other or unknown
  misc_feature (500)..(500): "n" may be a, t, c, g, other or unknown
  misc_feature (526)..(526): "n" may be a, t, c, g, other or unknown
  misc_feature (532)..(532): "n" may be a, t, c, g, other or unknown
  misc_feature (538)..(538): "n" may be a, t, c, g, other or unknown
aaggtgttacttggctggatcaattccagcatctaatttagttaagagactttaaaaagggattatatattggagaaaaaggcagaaattaaaagtgtattttcagtcttaatatctcacataaatgaccttagaattggctatgttagtagttagtttatgtggtacatgttaaacaccagtagagaaacaactatggttgtgattaaatcacttgactttcctgccagagctagaatcttaactcctttaaaagacgactctgggaaatccagtgtttgtatgtaaaaataaaaggtaagttaattctagattgaggggcagaggctatttcttaatctccaatctccttgggaagggaaagtattaggaggcagtaatggagtagaaaggtggggatggcaaataagagaaagatttaatgtaacaaaactgttttgccctcttcttaagtaaataattattggaataattagtgnaaccatcacatagtaatgngnattttgggcttgactaagtgggtaanggatgncttttnattcacctttct

SEQ ID NO: 6637 - DNA, 541 bp, Homo sapiens
  misc_feature (85)..(85): "n" may be a, t, c, g, other or unknown
  misc_feature (462)..(462): "n" may be a, t, c, g, other or unknown
  misc_feature (480)..(480): "n" may be a, t, c, g, other or unknown
  misc_feature (486)..(486): "n" may be a, t, c, g, other or unknown
  misc_feature (507)..(507): "n" may be a, t, c, g, other or unknown
  misc_feature (541)..(541): "n" may be a, t, c, g, other or unknown
ggtagagatgaggtcttgctatgttgcccaggctggtcttgaattcctgtactcaactgatcctcccaccttgacccctcaaggngctgggactacaggcttgagccactgcgcccagacgaggaatcccgctcataggagggttgttgtgctgtgagttgtcaaatgtctcacagggctggcgcctcaggctaccattaaagtgttgcctcagccagtagggataattgagaggtacccagagctatagcttcaagtttggtctttgccagtgaatccaaatgcagggttctccctgtgtgctcagctcgtgctcccacaggtttcatggcttctcgctacacaatgccatgcctatttgaatcacactagggctattttctgggaaatgtgagctttattcaaaacagtgttttttcagagcttattctctattgaaatagtgttataaatgggagctgngttcttagagagaccccnaatggnctcatagatcataaagtaatngagaaaagttaaatacgcttggcatgaacaagtn

SEQ ID NO: 6638 - DNA, 554 bp, Homo sapiens
  misc_feature (444)..(444): "n" may be a, t, c, g, other or unknown
  misc_feature (539)..(539): "n" may be a, t, c, g, other or unknown
gccaatgcattttcagctcttgggatgctcttcatcacattttcccatcgtttctgcgatgcctttgtgccttattgttaatgaaagacaatctataaatacagaaaaggccatattttaaggatttctcattggacaagcaaatatctgtaacataatagagtactcgaaacttaatttactatcctatttctctaataacaagtctcagatctaagagggaaataaggaagacagggaacaatatcaaacatgctcatcaaataactcaaagcaaacaggctaactccagtcatttgttaacaaattttaaggatcgtccatatatacgtgtggcggaaagcatgtgtccaggcaatgcaaacctgcaagaagaggacatgccctctgaggtctgaccctgccttcatttccagcctcagctcacatcacttttaccctcgnggtctttgaacatacattggccttttctggctctaagcttttaaacattacctagcatactcttaacttcagcttttcacttgcctaatccatcntacccttttggttca

SEQ ID NO: 6639 - DNA, 493 bp, Homo sapiens
  misc_feature (61)..(61): "n" may be a, t, c, g, other or unknown
  misc_feature (163)..(163): "n" may be a, t, c, g, other or unknown
  misc_feature (254)..(254): "n" may be a, t, c, g, other or unknown
  misc_feature (274)..(274): "n" may be a, t, c, g, other or unknown
  misc_feature (299)..(299): "n" may be a, t, c, g, other or unknown
  misc_feature (304)..(305): "n" may be a, t, c, g, other or unknown
  misc_feature (350)..(350): "n" may be a, t, c, g, other or unknown
  misc_feature (363)..(363): "n" may be a, t, c, g, other or unknown
  misc_feature (378)..(378): "n" may be a, t, c, g, other or unknown
  misc_feature (405)..(405): "n" may be a, t, c, g, other or unknown
  misc_feature (428)..(428): "n" may be a, t, c, g, other or unknown
  misc_feature (432)..(432): "n" may be a, t, c, g, other or unknown
  misc_feature (460)..(460): "n" may be a, t, c, g, other or unknown
  misc_feature (463)..(463): "n" may be a, t, c, g, other or unknown
  misc_feature (465)..(465): "n" may be a, t, c, g, other or unknown
  misc_feature (484)..(484): "n" may be a, t, c, g, other or unknown
gacataagtcttgctctgatgctctgatgcccaggctggaatgcagtggcgccatctcggntcactgcaacctctgcctcccaggttcaagcaattctcctgcctcagcctcccaagtagctgggattacaggtgcccacgaccatgcccggctaatttttgnatttttagtagagatggggtttcaccatgttggtcaggctggtctcgaactcctgacctcaggtgatccacccaccttggcctaccaaagngctgggattacaggcatganccaccacacctggctgactttagtnctttnntatgtgatgaatcacatttattgatttgccgtatgctgaaccaancttgcatcccagngataaagcctacttngaccatggtggattagctattctgatnttactgctgggatttgggtttgnctcnttatatcttaaaggatttctgcctttanttnanccttatgggataactgggnctaataggt

SEQ ID NO: 6640 - DNA, 551 bp, Homo sapiens
  misc_feature (506)..(506): "n" may be a, t, c, g, other or unknown
  misc_feature (529)..(529): "n" may be a, t, c, g, other or unknown
  misc_feature (540)..(540): "n" may be a, t, c, g, other or unknown
  misc_feature (548)..(548): "n" may be a, t, c, g, other or unknown
cccttgagacagagttttgcccttgttgcccagctaaatgaagtgatggtggatatgtaataattatacatctatcaagactagtttggtaacttaacaaatctcagcaatcccttactcccttcataacagaagtgcgcagaatacaacttttctaagagagtatctaaggaaaatgttaaagtgaacaactgaatctaagtcttctccctgacagaaatgcttagaaaggagtaaaagggagcagcattgtggcattactctagactcagggaatccctgcaactggtggaaaactcctactcaaaaagatgtataaacatgtacaaggatgttttgttcttgatagtaggggctaaaatttctggacaccatggtagagctgctgttacagagaaactaagtgccatggatctgtggtttcaggtgaagtagaaaaagaatgaatttagaaaattggaggttcacgttagaaggttgtgtgttctgaacaaaggaatgaatgnctggtgaagaatttatatggggngaatccagccncaaagctnggc

SEQ ID NO: 6641 - DNA, 541 bp, Homo sapiens
  misc_feature (467)..(467): "n" may be a, t, c, g, other or unknown
  misc_feature (541)..(541): "n" may be a, t, c, g, other or unknown
attgtagagacggttttgccatcttgcccaggctagtctcaaattcctgggctcaagtgatctacccacctcggcctcccaaagtgctgggattacaagcgtgaagtacgcatccagctggtatttgattttaaaaatcatttttccaattgtccactgcatatatatagaaatacaatttaattttgtatgttgaccttgtattcttgtgatcttgctaaattattagttctagtagcttttttgtagattcattaggattttctacatacacaatcatgctatttgcaaataaaataatgcttttatccagtttgggatttactgtgtttccttaatctaaaaatgttatgtctttgattctggaaaatgctgtgctcttatctcttcagttattgcttttgccccattctcttaattatcttttgctagaactctcctctgtaacctcacgcctctcaactttnccttaaatttctacttttccattttctggggtgcctgggaataatttctagattatcttccatttactaatctn

SEQ ID NO: 6642 - DNA, 287 bp, Homo sapiens
  misc_feature (1)..(287): "n" may be a, t, c, g, other or unknown
nnnnnnnnnnnnnnnnnnnnnnnnnnnnnnnnnnnnnnnnnnnnnnnnnnnnnnnnnnnnnnnnnnnnnnnnnnnnnnnnnnnnnnnnnnnnnnnnnnnnnnnnnnnnnnnnnnnnnnnnnnnnnnnnnnnnnnnnnnnnnnnnnnnnnnnnnnnnnnnnnnnnnnnnnnnnnnnnnnnnnnnnnnnnnnnnnnnnnnnnnnnnnnnnnnnnnnnnnnnnnnnnnnnnnnnnnnnnnnnnnnnnnnnnnnnnnnnnnnnnnnnnnnnnnnnnnnnnnnnnnnnnnnn

SEQ ID NO: 6643 - DNA, 540 bp, Homo sapiens
  misc_feature (94)..(94): "n" may be a, t, c, g, other or unknown
  misc_feature (161)..(161): "n" may be a, t, c, g, other or unknown
  misc_feature (278)..(278): "n" may be a, t, c, g, other or unknown
  misc_feature (384)..(384): "n" may be a, t, c, g, other or unknown
  misc_feature (403)..(403): "n" may be a, t, c, g, other or unknown
  misc_feature (420)..(420): "n" may be a, t, c, g, other or unknown
  misc_feature (465)..(465): "n" may be a, t, c, g, other or unknown
  misc_feature (481)..(481): "n" may be a, t, c, g, other or unknown
  misc_feature (511)..(511): "n" may be a, t, c, g, other or unknown
  misc_feature (519)..(519): "n" may be a, t, c, g, other or unknown
  misc_feature (540)..(540): "n" may be a, t, c, g, other or unknown
gagacggagtctcgctctgtcgcccaggctggagtgcagtggcgggactcatgatccatttctttaaggggcatctgtgtttaaaatttttagngataatatttcttacatcatcatgtatattcataattgaacaatgattcacctttatttattcttgnttaattgttctatcatttatctattgatgatgaacctcaatctattaatccaaagtaagaatatgatctttgcacatttctgatatctatccaattatgttttctgttggacctcanagtttcagacacgtagtattcatcgtccatgactcaaacgccaccagtggtcatcattggtccatgtttagtagaggtggggtttcaccattttggccagactggncttgaactcctgacctganggggatccacccacctnggccttccaaaggctgggattacaggcatgagccaccaacccggncagggagacagttctnaataccaccttaaggccctttctggtaaangctacatntggataagtctgggtgggttn

SEQ ID NO: 6644 - DNA, 557 bp, Homo sapiens
  misc_feature (452)..(452): "n" may be a, t, c, g, other or unknown
  misc_feature (463)..(463): "n" may be a, t, c, g, other or unknown
  misc_feature (527)..(527): "n" may be a, t, c, g, other or unknown
  misc_feature (540)..(540): "n" may be a, t, c, g, other or unknown
  misc_feature (555)..(556): "n" may be a, t, c, g, other or unknown
gtatcaagcatattcctctcccaaacttcataaaccaccactatgttactcaagctagaaacctaacttatcatgctggatttcttccttttccttatttctgacatcaagtcatcctaaaattctgtcatttgtatctcaaaaatatatcttgtatccattcccttatccccatttccacacacatcaccctagataagcaagcatcaaatctcacctagagaagtccttcacaatttctagtaagcatacaaattacctggggatcttgttaaagtgtacattctactttagtaggtctgaagaaagaccagagactcatcttttcttacaggcttccagatgacattgatcctgccattccatggatcacccatttaatggaaggtctagattacctcaagagtatctgtattgcagggtccaatttcatcctcctgcattctactctncaccaagtagntagaggtgatttttaagaaaataaaaagccgatttttaaatatctggaaaataagctttatttnacctcaagagaanccaacttttttcagnng

SEQ ID NO: 6645 - DNA, 551 bp, Homo sapiens
  misc_feature (409)..(409): "n" may be a, t, c, g, other or unknown
  misc_feature (483)..(483): "n" may be a, t, c, g, other or unknown
  misc_feature (506)..(506): "n" may be a, t, c, g, other or unknown
  misc_feature (520)..(520): "n" may be a, t, c, g, other or unknown
  misc_feature (532)..(532): "n" may be a, t, c, g, other or unknown
  misc_feature (538)..(538): "n" may be a, t, c, g, other or unknown
  misc_feature (551)..(551): "n" may be a, t, c, g, other or unknown
aatgaaaatacaaggcatggagatgtggaaagacaccttgctttattactggtattattagttctatagtataattcatatatcacaaaaatcaccatttttaagcatatatttcagtgtcttttaccatattccaaaagttctgcaaccatcaccactacctaattccagaatattttcataatgccaaaaagcatgcctgtacctatgggcagtcactctccaattccccacttcttacagtctctgacaaccactaatctactttctctatatatagatgtacttgttctgggcacttaattcaacaaatggtcctgggacaactaaatatccacatgtaaaagaatcaagttagactccctcctcgcacataaaaattaactcaaaatggatcagagacctaaangtaggtggtaaaattataaatcacttagaaatagtaaatctttggaatgggggataagccaaggtttccaaatntgactggaagcccagccaccaangaaaaaataatggnttcatcaaggtnaaacanttgggtggaaagn

SEQ ID NO: 6646 - DNA, 565 bp, Homo sapiens
  misc_feature (438)..(438): "n" may be a, t, c, g, other or unknown
  misc_feature (440)..(440): "n" may be a, t, c, g, other or unknown
  misc_feature (459)..(459): "n" may be a, t, c, g, other or unknown
  misc_feature (462)..(462): "n" may be a, t, c, g, other or unknown
  misc_feature (499)..(499): "n" may be a, t, c, g, other or unknown
  misc_feature (519)..(519): "n" may be a, t, c, g, other or unknown
  misc_feature (556)..(556): "n" may be a, t, c, g, other or unknown
  misc_feature (561)..(561): "n" may be a, t, c, g, other or unknown
acattattaagcaaagtggaatatttattgggtcattttatcatgcagaaagtgaatttcctaaggtcttagctcaatgtatatacaatctagcaaagctaaatgtaagaaaatagcaaggacaatttatttctatataacagggcatatactcccaatttgctgctacttcaaagagcacttttagactcatctaacttttacaggctctttcaagtgaagttcatggagactagttattaatccatataagacaaaagaagaaagaagaaatataaccaaagcaaagcattctgttaaaaaaaaaagtaataaaagctaaccacagaatatgtcagttttggtttgcagacaacccctgagattatataaaccaaagcgttaagacaccaaatagtcagaggtaaattactaaggagaattacattcatacatggngncatagcacttatcttttanaanggactttggttaccattccaaaagcggttactggctnggatttttcaggaaaatagngaattttaagaaggttcttaaaaaatatccttttccntttgnaaag

SEQ ID NO: 6647 - DNA, 555 bp, Homo sapiens
  misc_feature (447)..(447): "n" may be a, t, c, g, other or unknown
  misc_feature (469)..(469): "n" may be a, t, c, g, other or unknown
  misc_feature (499)..(499): "n" may be a, t, c, g, other or unknown
  misc_feature (518)..(518): "n" may be a, t, c, g, other or unknown
  misc_feature (522)..(523): "n" may be a, t, c, g, other or unknown
  misc_feature (549)..(549): "n" may be a, t, c, g, other or unknown
  misc_feature (554)..(554): "n" may be a, t, c, g, other or unknown
gagatggagtcttgctctgtcgcccaagctggagtgcagtggctcaatctcggctcactgcaaactctgcctctcgggttcttgccattctcctgcctcagcctcccgagtaggtgggactataggtgcctgccaccacgcccagctaattttttatatttttagtagagacagggtttcaccgtgttagccaggatggtctcgatctcctgacctagtgatccgcctgcctcggcctcccaaagtgctgggattacaggcatgagccactgtgcccggccaattttaattatttctaaaatacataaacaaaagagcatgagttctatgacatcctcaaaatgtattgctcctcttgcggtttatcacaaccttatttctaaagctatcccttagcagaagaaagccttacatatttcatctgattgatcctgatatatcaggtangaaataaacagtattatggttnaattctagactgtattaagtaagccacatntggaattggaacctggttnaatnnaaagcccaatcactggtcaaaaatcnttttnt

SEQ ID NO: 6648 - DNA, 562 bp, Homo sapiens
  misc_feature (416)..(416): "n" may be a, t, c, g, other or unknown
  misc_feature (477)..(477): "n" may be a, t, c, g, other or unknown
  misc_feature (487)..(487): "n" may be a, t, c, g, other or unknown
  misc_feature (527)..(527): "n" may be a, t, c, g, other or unknown
  misc_feature (531)..(531): "n" may be a, t, c, g, other or unknown
  misc_feature (542)..(542): "n" may be a, t, c, g, other or unknown
  misc_feature (560)..(560): "n" may be a, t, c, g, other or unknown
cagacggagtcttgctctgtcgcccaggctggagtgcagtggcgcgatctcggctcactgcaagctccgcctcctgggttcacgccattctcctgcttcagcctcctgagtagctgggactacaggcgcctgccgccacgcctggctaatttttttgtatttttagtagagacggggttttaccgtattagccaggatggtctgggtctcctgacctcgtgatccacccgcctcggcctcccaaagtgctgggattacagtagtgagccaccgcgcccagcctacatgctgttctttctaaccaaaatatactcccccggttcttcacgcagatagcaacttattatccttctgaataccacagccaagtctatctcatctccttgcccaattgccaccatcaagttttctatctnaggctggttttaatccctttcgggacacttatcaaaaactggaatgtgggtacctaacttnaatagccatnatgcttccttcttggttaactggaacccgaatctgggttngggnattccattganccttccttaaaaaccaangg

SEQ ID NO: 6649 - DNA, 522 bp, Homo sapiens
  misc_feature (388)..(388): "n" may be a, t, c, g, other or unknown
  misc_feature (443)..(443): "n" may be a, t, c, g, other or unknown
  misc_feature (445)..(445): "n" may be a, t, c, g, other or unknown
  misc_feature (458)..(458): "n" may be a, t, c, g, other or unknown
  misc_feature (465)..(465): "n" may be a, t, c, g, other or unknown
  misc_feature (471)..(471): "n" may be a, t, c, g, other or unknown
  misc_feature (477)..(477): "n" may be a, t, c, g, other or unknown
  misc_feature (498)..(498): "n" may be a, t, c, g, other or unknown
aagatagagtctcgctctgtcgcccaggctggagtgcagtggtgccatctcggctcactgcaagctccgcttccagggttcacgccattctcctgcctcagccgcctgagtagctgggactacaggtgcctgccaccacgcctggctaatttttttttgcatttttagtagagacggggtttccctgtgttagccaggatggtctcgatctcctgacctcgtgatccacccgccttggcctcccaaagtgctgggattacaggcgtgagccaccgcgcccggccaatgtgatgtcttcattcttgttagtggcagaatacacgagcaatgtgggacgggtctggggaagttggaaaagaatctctccctcatgctggagtaaaagtcnattcccactcccaagctatcacccaccacacaactggcaccacaagggcaacggntnttgccaagaagcngaagcanactcgnggtggngggatccaaaaaaagttctgntggttctggaggggaaattgaaaa

SEQ ID NO: 6650 - DNA, 563 bp, Homo sapiens
  misc_feature (444)..(444): "n" may be a, t, c, g, other or unknown
  misc_feature (453)..(453): "n" may be a, t, c, g, other or unknown
  misc_feature (494)..(494): "n" may be a, t, c, g, other or unknown
  misc_feature (511)..(511): "n" may be a, t, c, g, other or unknown
gagggtacatcgggggagaggagaggagaggagagcctctctgtgccttggtttcccatttgtgcattcagggcctctgcaggcctcacacagggagtctgaggggatagtgtttaagtgagcactcaggcttcctctgaggaaaagaaatgaccaaagtgcagacttttattactgccattcctgctcctaatgggagcaggagtcaaaaggaaaaacaaattaaaaggggctaatgagaaaggaggagagatgagacagagagtgtgaagggctatgccgctggcatctcataaattcttattgagaatggcacaggtattaaaaaggtttctgggtagtctacgagaaatgtcaattattatctctactacaactacttacatatatctaatggggaaaagaagtggggcttaagtgtcaaaatggattgggagaccaaanggagaactncccttattaaattccaccaaggtggaaggtacctggcccantccttaaaaggatttgnggccaatgcttgcactttggtggccaggaaaatcttttgaccccatttcctc

SEQ ID NO: 6651 - DNA, 519 bp, Homo sapiens
  misc_feature (508)..(508): "n" may be a, t, c, g, other or unknown
  misc_feature (517)..(517): "n" may be a, t, c, g, other or unknown
gagacagagtctcactctgtcacccaggctggagtgtagtggtgtgatctcagctcactgcaacctccgcctcccgggttcaagtgagtctcctgcctcagcctcctgagtagctggggttacaggtgcccaccaccatgcccggctaactttgatcagcctttgatgtgtcttgggactgaggaagacagaaggagtcaaagattagggtaatattttgagcccaaattactgaggaataatacttttcttcgtaacaacggggaaattaacaaaggaagctatgttttaggttacagtgggatatttaaatgtaaattatggagggagataactgaactaaatttaggaaagagaacacaactataaattcagacttgcaagtcagccttatggaagtgaagtagaacaactgagttatgaggagaatgtataaatgcaggaagggactctattgactaataaatggggttcataatctgcacataaatgatgagacttaaaaggnaatctgctntg

SEQ ID NO: 6652 - DNA, 526 bp, Homo sapiens
  misc_feature (479)..(479): "n" may be a, t, c, g, other or unknown
  misc_feature (511)..(511): "n" may be a, t, c, g, other or unknown
actgctttgtaaatagctgttttcagtttataactgggactgatctttacatcagggtttctcagcctcagcacttctgacattttgggaggggtaattctttgaggctgctttccttgtgtattataatctatttagcaacatccctggcctctacccaattcatgctactagtatccctctaattgtgacaaccggaaatgtctctaagaattgccaaatgcctagtgaaatcatcctcgctccacttttggcaaccactgtttcacatgatacctgtttttttgaggtgctttagtattctgtgatcctaagaacaagggtttcatctcctgacataacacatagacattactaattgaactcttcgctcctaagggatgttacctatggggaatcaggagctggaaatagaagatggtatacatgattttgattatttctccattccttttaattttgggacgtccccttaagtnaaaccaaaccaaactgttaaaatcccttaacnctaattttttcatat

SEQ ID NO: 6653 - DNA, 532 bp, Homo sapiens
  misc_feature (475)..(475): "n" may be a, t, c, g, other or unknown
  misc_feature (494)..(494): "n" may be a, t, c, g, other or unknown
  misc_feature (500)..(500): "n" may be a, t, c, g, other or unknown
  misc_feature (509)..(509): "n" may be a, t, c, g, other or unknown
  misc_feature (511)..(511): "n" may be a, t, c, g, other or unknown
aacattttggttacctttaatatatttgggaacaaatactgtgacaacatattttaagtacataaataactcagaaaagtcatatcttttattctggaactctactgaccttatctgtataaagaacctagttttataagaaaaagggggtgagggaggggaagagagaaatgcgtagactgaagaggaatcaaagctcaggattcttcacaagtgcagcagcttccacagctggcccagaggatggtagttgcatataccaggttacgctaacctcaacaagacctagttctcacacacaaatgtgtccagtggataaaacctcagctgcagaaatagattttagcaatatccaaagacattccagggtccggtaggaagaacaaaagtatggcaaaattgaaaactaccatggacttggcagcatccaagggcatcaccaggggggctctttcatgcatgcctagagtcctgnaaacttaacccaaggtttnggatgnaaatggtancnggttcattaaactggacaccg

SEQ ID NO: 6654 - DNA, 348 bp, Homo sapiens
  misc_feature (150)..(150): "n" may be a, t, c, g, other or unknown
  misc_feature (156)..(156): "n" may be a, t, c, g, other or unknown
  misc_feature (186)..(186): "n" may be a, t, c, g, other or unknown
  misc_feature (235)..(235): "n" may be a, t, c, g, other or unknown
  misc_feature (291)..(291): "n" may be a, t, c, g, other or unknown
  misc_feature (310)..(310): "n" may be a, t, c, g, other or unknown
  misc_feature (313)..(313): "n" may be a, t, c, g, other or unknown
  misc_feature (315)..(315): "n" may be a, t, c, g, other or unknown
  misc_feature (318)..(318): "n" may be a, t, c, g, other or unknown
  misc_feature (340)..(340): "n" may be a, t, c, g, other or unknown
  misc_feature (342)..(342): "n" may be a, t, c, g, other or unknown
gagacggagttttgctcttgttgccaggctgtagtgcagtggcatgatctcagctcactgcaacctccacctcccgggttcaagtgattctcctgcctcagcttcccaagtagctaggattacaggggtgtgccaccacgcccagctaanttttgnattttgtaaagacagcctggccagcatggngaaaccttgtctgtactgaaaatacaaaaaattggctgggcgtgatggngcacgcctgtaatcccagctacttggaagggtgaggcaaaagaatctcttgaaccngggagacggatgctgcaangancnganatcacaccactgcactgcaccngngcgacc

SEQ ID NO: 6655 - DNA, 512 bp, Homo sapiens
  misc_feature (165)..(165): "n" may be a, t, c, g, other or unknown
  misc_feature (473)..(473): "n" may be a, t, c, g, other or unknown
  misc_feature (485)..(485): "n" may be a, t, c, g, other or unknown
  misc_feature (492)..(492): "n" may be a, t, c, g, other or unknown
  misc_feature (497)..(497): "n" may be a, t, c, g, other or unknown
  misc_feature (501)..(501): "n" may be a, t, c, g, other or unknown
  misc_feature (506)..(506): "n" may be a, t, c, g, other or unknown
  misc_feature (511)..(511): "n" may be a, t, c, g, other or unknown
ctttttttttttttttaagaggtatggtcttgctatgttgcccaagcttccacctcagcatcccaaagtgctaggattataggtgtgagccaccacacctggccagtggcaattttcaaaaatgttttcaagcaagaaaagcctctttaataaagaaaataatgngtttacacttacctgtaaccattctatctattctgtctccacttctttaactataaaaataaatgtcatcataagctactcttgacccaaggcactcatggctttcaatgctaatggttctgactattctcaggtgaccagaaaatacataacacgtgtcatttctaattctgtgttagcagtgactgaatcgccattaccaggcagtggacaaagtgttaaccacacactccccatttcccatttgattatccttcggtcctcacaagttgacagtgggatcaattactcccctttatggatagagnaaggtaacccgnggaagtnttacntttnccagngggant

SEQ ID NO: 6656 - DNA, 530 bp, Homo sapiens
  misc_feature (522)..(522): "n" may be a, t, c, g, other or unknown
ctggtgataacaacgatgaggtttatttttgtcaaaacatccaagggaaacattaattgttgtttgtcaactgtgaacttcacactacattgtctaaggatagaaaattgatgggtatcactctgtcagaaaatcctcaccaagaagccaattcaaggaatatgaaattgacaagcctttcaaacaaagatgtgttcggacttcactgatgcgatggtaggtcttttgggttacaatagatagggatgatataaaacacaatcttttcctgtctattccattttagaaactggtgggtgtgctcacgtttgtctgggcattgcagcactgcacacatacatgaattaagcaaagcatcggaaagtattgacacatgagactaaaataaataagagaaacgagctgctctttatacctagaaatagctggaaattactgaaaaaaattaaaggtgccaaaggtttcattttaaccccatgaattggggatgaaatcccatttctcttactatggcaggactgnatgccata

SEQ ID NO: 6657 - DNA, 521 bp, Homo sapiens
  misc_feature (214)..(214): "n" may be a, t, c, g, other or unknown
  misc_feature (223)..(223): "n" may be a, t, c, g, other or unknown
  misc_feature (428)..(428): "n" may be a, t, c, g, other or unknown
  misc_feature (447)..(447): "n" may be a, t, c, g, other or unknown
  misc_feature (472)..(472): "n" may be a, t, c, g, other or unknown
  misc_feature (492)..(492): "n" may be a, t, c, g, other or unknown
  misc_feature (505)..(505): "n" may be a, t, c, g, other or unknown
  misc_feature (510)..(510): "n" may be a, t, c, g, other or unknown
  misc_feature (516)..(516): "n" may be a, t, c, g, other or unknown
ctttattgagacttgctctgtcgcccaggctggagtgagtgacgtgatcttggctcagtgcaaactccacctcccaggttcaagccagcatcccaagcagctgggattacaggcgcccgccaccatgtcagctaatttttgaatttttagtagacatggggtttcaccactttgaccaggctggtctcaaaattcctgatctcaagcaatctgntcacctcancctccaaactgctgggattacagatgtgagacaccatgcccagcctcctaacagttatttctaaccgtaaattcccacaggtaccttcaactcaaaatatctcaaactgagctcatcaacaccctctagccacagaaaccggctttttcaaccatgtattggctttgaccagcatcgccatccacccatttgtccaaaccacatntgaagactatctctctctntcaccaagactaggtaaatcttaancttttaaataattctcaaanttccttcctttcnctttnaaggcnggacc

SEQ ID NO: 6658 - DNA, 529 bp, Homo sapiens
  misc_feature (420)..(420): "n" may be a, t, c, g, other or unknown
  misc_feature (437)..(437): "n" may be a, t, c, g, other or unknown
  misc_feature (455)..(455): "n" may be a, t, c, g, other or unknown
  misc_feature (485)..(485): "n" may be a, t, c, g, other or unknown
  misc_feature (490)..(490): "n" may be a, t, c, g, other or unknown
  misc_feature (498)..(498): "n" may be a, t, c, g, other or unknown
  misc_feature (519)..(520): "n" may be a, t, c, g, other or unknown
ctgtctcaggactttcagggaaaacaatgttgacttaccaatgggcattttcaaagactctaagttggtatgtcagtcagtgtacagacaacgtgatccgcaaggcacgggcaccaccctgccgtgaaccacatctcagccaatcttccgcaaagaaatgtacccaaaaacttttctgtaaattcaggaaggtgatccacaccttccacattttgttttgaaacaatgatggtattttaaaagttcttcaaattaacaaaagtgatatcagaaatataaacatttctaaaacagagcgggctgtgaggagtgattttgccaaacttaagtcagtagcactcgacttatatctgcttttagtctgcggtggcaccacgcttaccaaggcacagtatccccttgctatccctttccttctgngcattttttctttctgnatgccttaaccacacttnttcacctggatacctggagcttattaagcnttaantccccctnggtattactggggaatggaannttctggttt

SEQ ID NO: 6659 - DNA, 524 bp, Homo sapiens
  misc_feature (464)..(464): "n" may be a, t, c, g, other or unknown
  misc_feature (470)..(470): "n" may be a, t, c, g, other or unknown
  misc_feature (474)..(474): "n" may be a, t, c, g, other or unknown
  misc_feature (487)..(487): "n" may be a, t, c, g, other or unknown
  misc_feature (493)..(493): "n" may be a, t, c, g, other or unknown
  misc_feature (515)..(515): "n" may be a, t, c, g, other or unknown
attatagagagatgctgctgggatgtaatgggatacagtctatatgtaaatttttcagaaatccaaaaagttctgaatttggaaaatcatctggccccagcagttttggataagggattgtaaattcacgtttctaaaagtaaagagcttaaaggaaatcagaaacttatactgacaaaccaaaatgagataaagatgctacataagatttcacttttacttcttatattttaaaattatagcaacttttctgactcagtttctgcatcagcttaagttaggttcaacttagaaaagcagtatctacccaattcagctaataaatttcatgttattttattaagatgacttatacacataaacagttacctctcatgtaaaacaggcacgtatctgtaatactttaaggggtgaccactgatcactgggtcacaagccctgaaaatatggtttaaggcccagancatganaaanggcttaaggagtnagtgangatgggcatccctacttctttnggtcactcc

SEQ ID NO: 6660 - DNA, 525 bp, Homo sapiens
  misc_feature (415)..(415): "n" may be a, t, c, g, other or unknown
  misc_feature (435)..(435): "n" may be a, t, c, g, other or unknown
  misc_feature (475)..(475): "n" may be a, t, c, g, other or unknown
  misc_feature (482)..(482): "n" may be a, t, c, g, other or unknown
  misc_feature (491)..(491): "n" may be a, t, c, g, other or unknown
  misc_feature (508)..(508): "n" may be a, t, c, g, other or unknown
  misc_feature (525)..(525): "n" may be a, t, c, g, other or unknown
gctttgttttgtttttgagacagggtctcactgtcacccaggctggagtacaggggcctgatcacagctcaatgcagccttgacttcccaagttcaagtgatcctcccacctcagcctctcaagtagctgggactacaggcgtgtgccacacctggctactttttaatttttttttgagataaggtctatgttgcccaggctggttgtgaaattctgggatcaagcagtcctcttgccttggcctgccaaagtgctgggattacaggctctttccttactttctttttttttttttttttttttgagacggagtctcgctctgtcgcccaggccggactgcggactgcagtggcgcaatctcggctcactgcaagctccgcttcccgggttcacgccattctcctgcctcacctnccgagtagcagggatcacangtgtgccgccactatgcccagctaattttggatttttggnacaaaanggggttctncatgtggccaaactggncttaaacttctgggatn

SEQ ID NO: 6661 - DNA, 531 bp, Homo sapiens
  misc_feature (405)..(405): "n" may be a, t, c, g, other or unknown
  misc_feature (438)..(438): "n" may be a, t, c, g, other or unknown
  misc_feature (482)..(482): "n" may be a, t, c, g, other or unknown
  misc_feature (510)..(510): "n" may be a, t, c, g, other or unknown
  misc_feature (519)..(519): "n" may be a, t, c, g, other or unknown
  misc_feature (526)..(526): "n" may be a, t, c, g, other or unknown
  misc_feature (531)..(531): "n" may be a, t, c, g, other or unknown
gagacggagtctcactctagtggcgcgatctcggctcactgcaagctccgcctcccaggctcacgccactcttctgcctcagcctccagagtagctgggaccacaggcacctgccaccacgcctggccaatttttctgtatttttagtagaggcggggtttcaccgcgttagccaggatggtcttgatctcctgacctcgtgatccgcccgcctcagcctcccaagtgctgggactacaggcataagccactgcgcccagcctatttcaatcatttcaaatacagcaattcccaggaggagatcacactgccctgactgcctcagcagagtcaactgaacataaccatcagctctctttggtggcttggtcatcaggaggaacttgatccatgacgttgatgganagggccccgaggaagggtgactgtgggcttcanaagtcaaggtgccctgtgaaatgcccaaccttctttgggtcttntaccaagttttctgggcatggttctggnccttttctnggccatnggaan

SEQ ID NO: 6662 - DNA, 528 bp, Homo sapiens
  misc_feature (445)..(445): "n" may be a, t, c, g, other or unknown
  misc_feature (485)..(485): "n" may be a, t, c, g, other or unknown
  misc_feature (514)..(514): "n" may be a, t, c, g, other or unknown
  misc_feature (521)..(521): "n" may be a, t, c, g, other or unknown
ccttcttttcctttggctttgttaacccaaacaggcgggtagaggcagaggtggacgcaggggcctggctctgcccttctggtcctttgtttgtctggctggttgaactcagtatgtgaaaaggccccttatctttgtgtgtccgagagatgctgttcctttttggggacactgaaagttctgagtccaatgaccctgatttggctatggaaggtgcagatggcgaggggggctcctcaggactggggaagaacgatgggatcctcatcagcttggtatgtggatgggaaacctgtacatattcaagagaagggttttcacttggaggctgtcagcgtctgtgatgccaactcaataaatcctggctgaattcaactgggtgtgctggctgggtacttacccacctctgcgaactctacagagctcacgtctgtggactgcatanagcttggaaggtttcattagctggccttccccaaagtagnatctataaacatgttaaaatatcgccttnaagctgnaatactt

SEQ ID NO: 6663 - DNA, 528 bp, Homo sapiens
  misc_feature (40)..(40): "n" may be a, t, c, g, other or unknown
  misc_feature (85)..(85): "n" may be a, t, c, g, other or unknown
  misc_feature (138)..(138): "n" may be a, t, c, g, other or unknown
  misc_feature (220)..(220): "n" may be a, t, c, g, other or unknown
  misc_feature (233)..(233): "n" may be a, t, c, g, other or unknown
  misc_feature (240)..(240): "n" may be a, t, c, g, other or unknown
  misc_feature (254)..(254): "n" may be a, t, c, g, other or unknown
  misc_feature (319)..(319): "n" may be a, t, c, g, other or unknown
  misc_feature (327)..(327): "n" may be a, t, c, g, other or unknown
  misc_feature (392)..(392): "n" may be a, t, c, g, other or unknown
  misc_feature (488)..(488): "n" may be a, t, c, g, other or unknown
  misc_feature (494)..(494): "n" may be a, t, c, g, other or unknown
  misc_feature (511)..(511): "n" may be a, t, c, g, other or unknown
  misc_feature (528)..(528): "n" may be a, t, c, g, other or unknown
gagacagagtctccctctgtcatccaggctggaatgcagnggcatgatcttggctcactgcaaccttcacctcccaggttcaagngactctcatgcctcagcctcctgagtagctgggattacagtaggagccactgnggctggctcctttctttctgttttgcgtgccttttatttctttttcttggctaattactctggctagaacttctaatactgntttgaatagaggnggaaagngtggatatccttgncttggttcttttcatagaggaaaagctttcaacttttcatcattgagtatgatggcttttattgnagtgaggnacattccttttatacttaatttggtaaacgtttttatcatgaaaaggtattgaattttggtatgntttttcttcatctattgagatgatcatataattattggctttcatataacagttattgatttgcatatattgaaccctttttgcatcccagagatnaacccncttaaaaaaaggggaangaacccttgggatgccn

SEQ ID NO: 6664 - DNA, 547 bp, Homo sapiens
  misc_feature (389)..(389): "n" may be a, t, c, g, other or unknown
  misc_feature (454)..(454): "n" may be a, t, c, g, other or unknown
  misc_feature (508)..(508): "n" may be a, t, c, g, other or unknown
  misc_feature (533)..(533): "n" may be a, t, c, g, other or unknown
  misc_feature (544)..(544): "n" may be a, t, c, g, other or unknown
  misc_feature (547)..(547): "n" may be a, t, c, g, other or unknown
gagacagagtttcactcttgttgctcaggctggaacgcaatggcacaatttcaactcactgcaacctctgcctcccaggttcaagcaattctcttgcctcaacctcccgagtagctggaattacaggtgtgtgccatcatgcccggcttttttttttttttttttaatgtattagtagagacgggggtttcaccatgttggtcaggctggtcttgaactcttgacctcaggtaatcctcccgcctcggcctcccaaagtgctgggattacaggcatgagccaccacacccaccccacaatattttcttgtctttttagtaggtgtagaatctacagtaatgtcacctttctcattttgattgtggcaatttacatcttcactctcttgntttcttatcagtctggctagagattgatcaatttcattaatcttctcaaagacccagttttttgnttcattgatcttatctattttcctggttgctggtttactgattttttctctganatttagatttcctttttctggtaantttaaattggnctn

SEQ ID NO: 6665 - DNA, 549 bp, Homo sapiens
  misc_feature (450)..(450): "n" may be a, t, c, g, other or unknown
  misc_feature (462)..(462): "n" may be a, t, c, g, other or unknown
  misc_feature (484)..(484): "n" may be a, t, c, g, other or unknown
  misc_feature (508)..(508): "n" may be a, t, c, g, other or unknown
  misc_feature (532)..(532): "n" may be a, t, c, g, other or unknown
  misc_feature (544)..(544): "n" may be a, t, c, g, other or unknown
ggagacagagtcttgctctgtttcccaggcaggagtgcagtggcacaatctgcctgcaacctctgcctccgggttcaagtgattctcctgactcaacctcctgagtagctgggattacaggcatgcaccaccatgccctgctaatctctgtatttttagtagagatggggtttcaccatgttggccaggctggtctcgaactcctggactcaagtaatccacttgcctcagcctcccatagtgctgggattacagtaatgagccactgcgcctggcctacatcttcttataatgactaagtttggaagtaagagaaaaaattgaaagccattctgtctaataggtactggaaaatggaaaaagaaaaaaagaaaaaaaaacttagatagatagattccagggacacaaaaccagtgttagcataaataatgacagcccagatttatttgnacttaaaaaggnatacaggtaaatatcatggggnttttggcattgggtctggttgggngatggatatggtaatcatttgggnatgctgaaccanccttg

SEQ ID NO: 6666 - DNA, 550 bp, Homo sapiens
  misc_feature (504)..(504): "n" may be a, t, c, g, other or unknown
  misc_feature (518)..(518): "n" may be a, t, c, g, other or unknown
  misc_feature (546)..(546): "n" may be a, t, c, g, other or unknown
gtaagctcttatttaaaattacatttaattatgagattgattgattattatctgcatcccccagagggctgcaagcttcatgaaaccccatgaccatgctgtttttattaaaattccaagagaccaggaaagaatattaatctgctggtgaagtcgcagaatggatttgaggtaagaaatgtaagatgagaagaccaaatcaagaaacaggagatttcaccattagcatatcaaggtacacgttacaaataacattttggaatccctatgacactaaatcatcagataggcaaggttgatttttgccccttctatttgcaaggtggaaaaatatagttcactctatagatttcttcttttttgttgtttcctttgtttttgttttctagtttaaaaagagtttattccagggtgatcgttgaagatggccactcaggagccgtagattcaagttgctctgattatacactccaactaccagccattacaagtggctttttttangaaaaaaaccagangcagttcctaagtggttacccagaattncctt

SEQ ID NO: 6667 - DNA, 546 bp, Homo sapiens
  misc_feature (509)..(509): "n" may be a, t, c, g, other or unknown
  misc_feature (524)..(524): "n" may be a, t, c, g, other or unknown
  misc_feature (539)..(539): "n" may be a, t, c, g, other or unknown
  misc_feature (542)..(542): "n" may be a, t, c, g, other or unknown
  misc_feature (545)..(546): "n" may be a, t, c, g, other or unknown
ggagacagagtcttactctgtcacccaggctgcagtgcggtgatgtgatcttggctcactgcaacctctgcctcctgggttcacgcaattcctgtgcctcagcctcccaagtacctgggattacaggcatgcaccaccacgcctggctaatttttgtatttttagtacagacggggtttcacaccatgttggccaggctggtcttgaactcttgggctcaagtgacccacttgccttagcctctcaaagtgctgggattaccagcatgagccactgcacctggccccatacttcataatttaaatcactgttttcatctttttcaagcatgcaaaattaaaaaaaaaatggaataactttcaattataaaagctgtcaaacagaaatcctttaaaaggctaaagacctatgtaagtattaaatagcaatatataaattattaatgattaatatctcaaagaaaattttcagcaggacattactttcattatactcttcagtaatactgnagcacaacacttggnatgccgggttccaanggnaann

SEQ ID NO: 6668 - DNA, 543 bp, Homo sapiens
ggtctttgatgatttgtataatttagattttgaaatgggctctctgattactcagccaacaaatatttatagggtaccttttatatggcaaggcaccaggcacagtgctaagaggaacataagaaaaacgaacatggtctgtgccttagggagcttatatagacaaaagcaaacaaataatcattaacctttatttttgtaggtgacaaatgagcaatgcataatatgcaaaatctgggttaagggagagaatcaagatattcagaaaaaaaatctcattacctgctcctcatgcctcaaaaaaaatccagaagattttgaaatgcaggagataaacatcacatattccttactaatctttgtattccaaaaataatttctgaaaatcacaggaaagaaaacttttgtgtatttattagcagaggcaagctatactatcaattggcacctcaagggcacaaaattgcctggactacaccttcaagtcaaaatttctacctcagaagcaatgatgttctgaagatctctaatttttaatgggga

SEQ ID NO: 6669 - DNA, 544 bp, Homo sapiens
  misc_feature (535)..(535): "n" may be a, t, c, g, other or unknown
  misc_feature (538)..(538): "n" may be a, t, c, g, other or unknown
  misc_feature (541)..(541): "n" may be a, t, c, g, other or unknown
aagtacttaagatttattgaatgagaactgcattgtacaatatggtgccactagacacgtctatttaatttaaattaaaatataaaactctaaaactagccatgattcaaaggttcaatagctatatgtgactagtggctaccatataaaacatttccatcacaaagttccatttatcagatcttatatagaaccttgaataaaatttaatagacaagtgattttgtatttaacatttcacctttattgaatgcctataaggccatttgaataacggatcatgtacaaagcaacaggaaaaaaaaaactgcaagcagtaaaggttgtgcaggtgatattcagtaacactgcagtgtagccagagcaaggacataaaacttccttagctttgtaagtctgtggaaatcaaaacttctaaaagagaaaaccgaaatcagaattactgacactttaggccaggcatggtgcctcaagcctgtaatcccagcatttagggaggccaaaggatgagccccacgcccaggccaagtgaccnttnacnaaa

SEQ ID NO: 6670 - DNA, 545 bp, Homo sapiens
  misc_feature (465)..(465): "n" may be a, t, c, g, other or unknown
  misc_feature (509)..(509): "n" may be a, t, c, g, other or unknown
  misc_feature (514)..(514): "n" may be a, t, c, g, other or unknown
  misc_feature (522)..(522): "n" may be a, t, c, g, other or unknown
  misc_feature (541)..(541): "n" may be a, t, c, g, other or unknown
acgcccggctactttttttgtatttttagtagagacagggtttctccatgttggtcaggctggtctcgaactcccgacctcaggtgatccgcccgccttggcctcccaacgtgctgggattataggcgcgagccaccgtgcctggcctgttatctttgccctgggacaatccctttatagtagttgtccttttagagaactgaccagaactccctccaacaccttctctctgtcccagccctcagaatctaagactggttgactaatggtgttaatttatatttcacttgccaacagtccctccccactttgaggccagttcttcactccagtgtctccattcctgactttttttgcccagagttgtcaccctgcccttcaccccctttgaactctctcacctccaatgacaggaacggaaaggttctcagctcgggacacaactttgggcaggtcacagggcancagaacaatggggcaaagaaagtggagtgtggggcaacaaccangacangggcttgnaagccaaaaggtcgctggncaca

SEQ ID NO: 6671 - DNA, 546 bp, Homo sapiens
  misc_feature (463)..(463): "n" may be a, t, c, g, other or unknown
  misc_feature (469)..(469): "n" may be a, t, c, g, other or unknown
  misc_feature (522)..(522): "n" may be a, t, c, g, other or unknown
  misc_feature (532)..(532): "n" may be a, t, c, g, other or unknown
  misc_feature (546)..(546): "n" may be a, t, c, g, other or unknown
caaatatagagagatatagtattgaacacaactcttatttcaaaaggtataacccaaggattaaaaatatagtgatagtttttaaaaaccaatttttgtaattctagagttataaaagatgaacgcagttgttcatctattaaaacatagtctagacgatgagaaataacatcaattccaaaggaggcttgaaaggaacacactgaaatattgtggctatgataattggaggtacgatgtgttcattgtgtgtatcatgcatgtcagagactgttataagtgctttacatgtgtcaatcacttggtccacataagagtcctgtgtggtaggtgcttttataatctccattatttgaagtgagaaaaggtaagaaacttgctgaaggccacttagctagtgagtggaagagctagaaaaggaggtgagagagtctgtgtcaggggcaagagctctactgctcanaggacngtaaacctttaagaccctcatatgggttgactagtcaattaaaaatcaaccanggttcccaanggaccccctgaacn

SEQ ID NO: 6672 - DNA, 529 bp, Homo sapiens
  misc_feature (67)..(67): "n" may be a, t, c, g, other or unknown
  misc_feature (167)..(167): "n" may be a, t, c, g, other or unknown
  misc_feature (415)..(415): "n" may be a, t, c, g, other or unknown
  misc_feature (455)..(455): "n" may be a, t, c, g, other or unknown
  misc_feature (471)..(471): "n" may be a, t, c, g, other or unknown
  misc_feature (501)..(501): "n" may be a, t, c, g, other or unknown
  misc_feature (505)..(505): "n" may be a, t, c, g, other or unknown
  misc_feature (507)..(507): "n" may be a, t, c, g, other or unknown
  misc_feature (520)..(520): "n" may be a, t, c, g, other or unknown
gagatggcgtcttgctctgttgcccaggctggagtgcagtggtgcaatcttggctcactgcaacctntgccttccgggttcaagcaattctcctgcctcagcctcttgagtagctgggattacagacatgtgccaccacacccagctaatttttgtatttttagtanagacagggtttcaccatattggtcaggctggtcttgaactcctgacctcgtgatccgcctgcctcggcctcccaaagtgctgggattacaggcatgagccacgtgcccagcaaaatataggttactgtttttcagaaaaatacatatttagaaattttttcttatgattctggtcctatattggtctactcttaatattaaatagagaagcatcaataaatgaccaatttggtaaactatgatactgngatcattgttagaactagttttacatatggggagagagtntattccaaaatacctnccctacttttggctaattccttaaaaaggnacangngcttttgctgganaatcccggg

SEQ ID NO: 6673 - DNA, 530 bp, Homo sapiens
  misc_feature (437)..(437): "n" may be a, t, c, g, other or unknown
  misc_feature (491)..(491): "n" may be a, t, c, g, other or unknown
  misc_feature (495)..(495): "n" may be a, t, c, g, other or unknown
  misc_feature (511)..(511): "n" may be a, t, c, g, other or unknown
  misc_feature (519)..(519): "n" may be a, t, c, g, other or unknown
  misc_feature (523)..(523): "n" may be a, t, c, g, other or unknown
  misc_feature (527)..(527): "n" may be a, t, c, g, other or unknown
aatcaaaatgggcatgaaatttctcatgggaatgtaaaaagaagaacaatgtatagatttctatatgagctaaatactgtataaaacttcctctattaattcttgcacacttcctatgagaaaaagctctttggagatgagaaatctgaggctcgggaattaactctcttgtccaaggtcaaatagagtggtgaaaactagaagcaaacctgtctgattcatcctatggctcatttattttaatacataaaatacgaattactgcttttataagaagtaagatggcagtaccgttatcctgaaacttctaaggccgggcgtggtggctcatgcctgtaatcccagcactttgggaggacgagacaggcggatcatgaggtcaggagatcgagaccatcctggctaacacggtgaaaccctgtctctactaaaaatcnaaaaaattagccaggaagtggtggtggccgcctgtagtcccagctactcgggangctnaagcaggaaaatggcntgaacccnagangcanaac

SEQ ID NO: 6674 - DNA, 541 bp, Homo sapiens
  misc_feature (413)..(413): "n" may be a, t, c, g, other or unknown
  misc_feature (455)..(455): "n" may be a, t, c, g, other or unknown
  misc_feature (467)..(467): "n" may be a, t, c, g, other or unknown
  misc_feature (470)..(470): "n" may be a, t, c, g, other or unknown
  misc_feature (475)..(475): "n" may be a, t, c, g, other or unknown
  misc_feature (500)..(501): "n" may be a, t, c, g, other or unknown
  misc_feature (514)..(514): "n" may be a, t, c, g, other or unknown
gagacagagtctcgctctgtcgcccagcaacttcaaatgccactctcctctccagaactgcaggcctctcctctaactgtgtggcataagtcgcacagattcaagctaacaccagggctggtgtgtgctggaaatgctgaccctctccaagggtcagctgtgcaacactggtgaagaggtagtggcagagaccccatttccacctaactgaaagtagaggagcccaccagtgcctctcggaatgataaaacccttactttcttctgtgagagcactgctgaggccattcaaagatgcctttttttgtgaaaccctttaggaaacagaaaggttgacttatttgccatgtaaacccaaagaagttctctgcgtctggatgaagcccccacggtacttggtatcacaccttttgngttgcaaccctggctctgtgaagaaacaagcccacccctggnatgacggctctntgntacanggcaaacagaaggtttgggcaatcnngtagaacttgcanccttagaacagggaccttgaacctgga

SEQ ID NO: 6675 - DNA, 548 bp, Homo sapiens
  misc_feature (457)..(457): "n" may be a, t, c, g, other or unknown
  misc_feature (497)..(497): "n" may be a, t, c, g, other or unknown
  misc_feature (507)..(507): "n" may be a, t, c, g, other or unknown
  misc_feature (517)..(517): "n" may be a, t, c, g, other or unknown
  misc_feature (523)..(523): "n" may be a, t, c, g, other or unknown
ggagacagggtctcactttgtcacccaggctggaatgcagtggtgcgatcttacttagctcactgcagccctgacctcctggactcaaacaattctcctgcctcagccctgcaagtagctgggactgtgggtgcatgccaccatgcctggctaacttttgtagtttttgtaaagatggggttttgccatgttgcacatgctggtcttgaactcctgagctcaaacgatctgcccacctcggcctcccagaatgttgggattacaggggtaaaccaccacgcctggccccattagggtattcttagcatccacttgctcactgagattaatcataagagatgataagcactggaagaaaaaaatttttactaggctttggatatttttttcctttttcagctttatacagaggattggatctttagttttcctttaactgataataaaacattgaaanggaaataagttacctgagattcacagagatacccgggatnacttccttgntcaattcagnctttancaccttaaaaacctttaaagccctt

SEQ ID NO: 6676 - DNA, 523 bp, Homo sapiens
  misc_feature (440)..(440): "n" may be a, t, c, g, other or unknown
  misc_feature (445)..(445): "n" may be a, t, c, g, other or unknown
  misc_feature (450)..(450): "n" may be a, t, c, g, other or unknown
  misc_feature (472)..(472): "n" may be a, t, c, g, other or unknown
  misc_feature (502)..(502): "n" may be a, t, c, g, other or unknown
  misc_feature (505)..(505): "n" may be a, t, c, g, other or unknown
  misc_feature (511)..(511): "n" may be a, t, c, g, other or unknown
gagaccaggtatcaccctgtcatccaggctggagaagctcaatcacggctcgctgcagccttgacttccctggctccagtgatcctcccacctcagactcctgagtagctggaaccacaggcacatggcaccatgcccagctaatgtttgtattttttgtagagacaaggtttggccatgttgcccagactggtcttgaactcctgagctcaaaatgatctgcccacctcagtctcccaaagtgccgggattacaggcatgggccgccgtgcctggcctcttttggctttttaaatgtggctctaactgtgtttccatcggacagacctgctctaggtcagccttgtccaacagaactttctgtgatgctggaagttttctatatctgtgctgtcccacacaattgctactaagttacatgtggcccgttgagcatttgnaatgnggctnatgcactgaggaagtggaatcntcattttaattaacttaaatgaaatttcanttnaacagncccctggggcta

SEQ ID NO: 6677 - DNA, 537 bp, Homo sapiens
  misc_feature (468)..(468): "n" may be a, t, c, g, other or unknown
  misc_feature (470)..(470): "n" may be a, t, c, g, other or unknown
aaatcatttaaaatgtttatatcttagaagaggaagagagaagtggaaaatcaattaagccaagtagattacatgaactgtacaactggtggagaacgggtgtccagagataagcagccagaagccagagtcattgcaaattcttcagaaagcagtgatcttgagagggctaggaatcacagtggacagagcagccgtgcatccttccatgacaacaggaaggttaaggtgggtcatgcgattctgtgctgcacactcagagatacctcctcctgcaaggggtgggctgtgtcctctgtgaaacactggtgaggccttcagctagggtgacttcaatccccgatttctgtttatcttggacttttcgcttcttctgctgctgtttgttttctcgttgctctgggatttctttgctggattccagacttttgctgtcaggtattgcttctttactttctcctttattangnttttttcttttcctctcctttctttttttcctcggtcttccttttgacactttttcctttggctggc

SEQ ID NO: 6678 - DNA, 510 bp, Homo sapiens
  misc_feature (417)..(417): "n" may be a, t, c, g, other or unknown
  misc_feature (434)..(434): "n" may be a, t, c, g, other or unknown
  misc_feature (436)..(436): "n" may be a, t, c, g, other or unknown
  misc_feature (453)..(453): "n" may be a, t, c, g, other or unknown
  misc_feature (463)..(463): "n" may be a, t, c, g, other or unknown
  misc_feature (508)..(508): "n" may be a, t, c, g, other or unknown
  misc_feature (510)..(510): "n" may be a, t, c, g, other or unknown
gagatagaatcttgttctgtcacccaggctggagtgcaatggcgtgatctcggctcactgcaacctccgcctcccaggttcaaaggattctcttgcctcagcctcccgagtagctgggattacaggtacacatcaccacgccgggctaatttttgtattcttagcagaaacagggtttcaccatgttggccaggctggtctcgaactcccaacctcaggtgacccacctgccttgaaggattacaggcgtgagctaccacgcccgggtggaaccgtttttaaaaagcatttctggccgggtgtggtggcttacgcctgtaatctcagcagatttgtttcttatgagagaatttaactacaagtataaactaaggtcaagatgactttaaggaatgtactttttttgagatggagtgncactcttggtgcccaangncaatgcaatggatggcnagatctcggnttactggaaccttcggcttcccggtttaagcgaatcttctggctnan

SEQ ID NO: 6679 - DNA, 489 bp, Homo sapiens
  misc_feature (389)..(389): "n" may be a, t, c, g, other or unknown
  misc_feature (405)..(405): "n" may be a, t, c, g, other or unknown
  misc_feature (409)..(409): "n" may be a, t, c, g, other or unknown
  misc_feature (433)..(433): "n" may be a, t, c, g, other or unknown
  misc_feature (452)..(452): "n" may be a, t, c, g, other or unknown
  misc_feature (454)..(454): "n" may be a, t, c, g, other or unknown
  misc_feature (474)..(474): "n" may be a, t, c, g, other or unknown
  misc_feature (489)..(489): "n" may be a, t, c, g, other or unknown
ctgtgcatagccattgtgttttattagatctggtatatttcttactttacaaaatatatagaagagcccaaaatgcaaagcagtcaacagtcttctgatggggaagggggctctctgggggctctcccctcagattctggccaactgggagggtaagctaaatgggacgagcaggtgtgctaaggggtggccgcatggctggggtgctgacaatggggttggaacctgggtcctatggtccctgccctctaggtgtgctaaggggcatctctgggtagattgagtcaagcaagaagagaccctagggaactgaggaggttatctggggtggggtggggagagcccaggttgattgaagattctagtgaatgcccccacactgggttcanatgctatgcctgcctncctncttccctctcccttctaaggcatncactgtggggaagtgatangnccccaagttcaaggaaaggncccaagtcttttgan

SEQ ID NO: 6680 - DNA, 501 bp, Homo sapiens
  misc_feature (436)..(436): "n" may be a, t, c, g, other or unknown
  misc_feature (438)..(438): "n" may be a, t, c, g, other or unknown
  misc_feature (445)..(445): "n" may be a, t, c, g, other or unknown
  misc_feature (455)..(455): "n" may be a, t, c, g, other or unknown
  misc_feature (466)..(466): "n" may be a, t, c, g, other or unknown
  misc_feature (488)..(488): "n" may be a, t, c, g, other or unknown
  misc_feature (498)..(498): "n" may be a, t, c, g, other or unknown
atgcttcttgaattttattatttaaagagcaaaataaaaggaagtaatgcacattcaccaaagtcaagttttccgttaaatagaagaaaaatctaatactttgtaataaagaccatccagctaaaaacagatcattaaaacaacaatagcgatttgactctgtattttatttcaatgagcacacttcattcattgtctgcaggaagactaggctaggtctcaatagacaacagtcacagttactgagcaagtaaatactccacacttgcgtgccctcctttatttcttgatgtcttcagtctcatctggctctctctcttgatgctctctttcccacctcatttctttcaactcttgtctgtacttccgttcgatgaaccgcttctgatgggccatctggggaaaattatatttttcaaagcgcatccattgctgntnccatttncgcttgctgnaaacttgggcnttcccacaggctattctttctnccttggaatnaac

SEQ ID NO: 6681 - DNA, 548 bp, Homo sapiens
  misc_feature (463)..(463): "n" may be a, t, c, g, other or unknown
  misc_feature (477)..(477): "n" may be a, t, c, g, other or unknown
  misc_feature (491)..(491): "n" may be a, t, c, g, other or unknown
  misc_feature (496)..(496): "n" may be a, t, c, g, other or unknown
  misc_feature (507)..(507): "n" may be a, t, c, g, other or unknown
  misc_feature (539)..(539): "n" may be a, t, c, g, other or unknown
ggctttccgttcgcttggtagatcttccttcatccctttgagtctatgtgtgtctctgtacgtgagatgggtctcctgaatacagcacactgatgggttttgactctatccaagttgccagtctgtgtcttttaactggggcatttagcccatttacatttaaggttaatattgttatgtgtgaatttgatcctgtcattatgatgttagctggttattttgcccgttagttgatgcagtttcttcctagcatcaatggtctttacaatttgcatgtttttgcagtggctggtaccagttgttcctttccatgtttaagtgcttccttcaggagctcttgtaaggcagtcctggtggtgacaaaatctctcagcatttgcttggctgtaaaggatttatttctccttcacttatgaacttaatttggcttggatatgaaaatctgggttggaaaaacctttcntttaagaatggtgnaaaattggccccanttttnttttggcttanaaaagtttctgcttaaaaaaactgctggtaanccgaactgg

SEQ ID NO: 6682 - DNA, 541 bp, Homo sapiens
  misc_feature (444)..(444): "n" may be a, t, c, g, other or unknown
  misc_feature (462)..(462): "n" may be a, t, c, g, other or unknown
  misc_feature (465)..(465): "n" may be a, t, c, g, other or unknown
  misc_feature (476)..(476): "n" may be a, t, c, g, other or unknown
  misc_feature (512)..(512): "n" may be a, t, c, g, other or unknown
  misc_feature (522)..(522): "n" may be a, t, c, g, other or unknown
  misc_feature (529)..(529): "n" may be a, t, c, g, other or unknown
atttttttttttcaagcatggaagaaaatttattcaggaactacagacagagtaaataatactgtgcacagacgagttaacaaattaattttcctaatatccctcaaacaatatctgtgaagattatttagggagaagtgaaaatagacaaaacccaattatccaacatcacatcaagttgcttaacttgcaaagttttcaaagaaatattttcacagaattagagaatgttatcaaatatataatgaaaaatatctcagtagcccagtccattttccatcaggtgagccttcgacaagatttaaacatctttttatcattcttctgaaagcaatctataccgattatctggtatagattttctgcaaaggaaaactggtctctcagagacttgagtctctttaaggctttaaaaagggctttcagcaagtatttccttcttgnaaaatagtagggattcanggnaaattacttgngacccttaatcatactggcagcttggcatgccttanggctcaagtngaaaacnttggcatggccc

SEQ ID NO: 6683 - DNA, 546 bp, Homo sapiens
  misc_feature (494)..(494): "n" may be a, t, c, g, other or unknown
  misc_feature (519)..(519): "n" may be a, t, c, g, other or unknown
  misc_feature (535)..(535): "n" may be a, t, c, g, other or unknown
  misc_feature (546)..(546): "n" may be a, t, c, g, other or unknown
gagatcttcaagacaaatttatttctatttttcctcctggcctttgctaaaatgatgtttctcttggtgcttgagaaatttcagagagttgtttagtatcattgctgcaaatttagatcactcatatcatttatgagacttggttttatacacttttaaaataattgtccaacagtgacattcctgtgagtaaaaatatagagaagtgttaccaaaatataagcctttattaataaaaatctttggtagtaacagtattttaaattcctctcaacgatatttggttaactaataaactccctccacctttgagctacagaaaaaaaatcctcaatctaccatataattgatatttgaaaaaaaaacccataaatattctaaagcttccaggggacccctggaagccctaagacttcttggaaaccctgacaccatctgtggaaatgcttccgaggtcatctctcttctggccatttctgggcaaccggtttggncccataagggaagatgaaccacttntgaggtccggcttggngtgaagggggn

SEQ ID NO: 6684 - DNA, 507 bp, Homo sapiens
  misc_feature (442)..(442): "n" may be a, t, c, g, other or unknown
  misc_feature (465)..(465): "n" may be a, t, c, g, other or unknown
  misc_feature (473)..(473): "n" may be a, t, c, g, other or unknown
  misc_feature (487)..(487): "n" may be a, t, c, g, other or unknown
  misc_feature (490)..(490): "n" may be a, t, c, g, other or unknown
  misc_feature (492)..(492): "n" may be a, t, c, g, other or unknown
  misc_feature (501)..(501): "n" may be a, t, c, g, other or unknown
aacagtaccagtaaattctttaatgttgtcagagtaaatgtctttatgccgctcacagaagttcattcaatcgtacctttctctccatatgctcttacgggcttggctaacagagagccaatataaaactcatcagagagctgccattttaagtggaaatggtagcaacggattatttttaaatggccacctctttaaatttatgcctaaggttgtaattttttgaatttttgtaatcagaccttgatgatgaccgtgagcagtaagatataaataactcccacatgcttagcgttccaataatggaacactacacatacatggctagggttcaaagaaacttgctctgttacagggattacctagaaagactcttctgcagttcaatttgtaaaatttagcagcaatagaatagactcataccatcacactagaggaaggncagcttagaactaagtccatgancatcagangagaaatggttacnggncnttaaagagnaagttc

SEQ ID NO: 6685 - DNA, 543 bp, Homo sapiens
  misc_feature (462)..(462): "n" may be a, t, c, g, other or unknown
  misc_feature (477)..(477): "n" may be a, t, c, g, other or unknown
  misc_feature (528)..(528): "n" may be a, t, c, g, other or unknown
gacattaaatgtttttattgaacaaaaaaagataaaacatggaagttgaatttactgagcaaaagcagctctccaggtgaagctgctatactttgtgctaaataaccttatgaactgagtatacagaatacatataatatgcaagttacctcaacagcaaaggagaaggagtagaatacagtttttgaagataaaatctggtcaagtgacaaattttgttgctcaaaatttctagcccttatccacctaaattctgtatggttctacatatatgcattcagtatgtgcatactgaattcccattttaatggaagctgctttttggaagaattctttttaatttcacatttctttgatgtgccactcaatttttaaaaaaattatatttgacatatgtgcatgtggggatggggtatggatgtatacacactttaaaaacaccaaacccttggttataagtanaagggtcatgctggnttttaaattaatattaggggaatttaagctcttctcctggggggctaaggnaaccttgggtctcaa

SEQ ID NO: 6686 - DNA, 539 bp, Homo sapiens
  misc_feature (454)..(454): "n" may be a, t, c, g, other or unknown
  misc_feature (456)..(456): "n" may be a, t, c, g, other or unknown
  misc_feature (463)..(463): "n" may be a, t, c, g, other or unknown
  misc_feature (476)..(476): "n" may be a, t, c, g, other or unknown
  misc_feature (484)..(484): "n" may be a, t, c, g, other or unknown
  misc_feature (500)..(500): "n" may be a, t, c, g, other or unknown
  misc_feature (510)..(510): "n" may be a, t, c, g, other or unknown
actggaagcaaaacattcacaggccattgaactactgttggggaaaaaaacgacacaagcaagtcagttagaacgtgttgatctggttgataatgattatagattcaactatgtctaaccctgtgtcctcccgggagagagtaaacagcttcccaccgtgggagcgctgggcacgtcagttcacacgctggcaggtccattaccaggagctccaggcacagagagtcctgggctggcccagctgctgcgctctgctttctccaagcaccaaggtgcagttatgctaccgatgacccttgaaagtatgagcaattcaccaaacaactaaatcacaatgactcttctgtctctagtagctgccccgcctttcctcactggtattcatttcaagtcttaatgaagtctagccatcaattaaaaatagagtaaccttgccctttcagcatgaaactgngngggtccntctggtggagtcntataaggnccttaacttggctttnaggatctggnaagtgggaactctaaaggctgagtttaaa

SEQ ID NO: 6687 - DNA, 539 bp, Homo sapiens
  misc_feature (402)..(402): "n" may be a, t, c, g, other or unknown
  misc_feature (429)..(429): "n" may be a, t, c, g, other or unknown
  misc_feature (439)..(439): "n" may be a, t, c, g, other or unknown
  misc_feature (493)..(493): "n" may be a, t, c, g, other or unknown
  misc_feature (515)..(515): "n" may be a, t, c, g, other or unknown
  misc_feature (535)..(535): "n" may be a, t, c, g, other or unknown
gagacagggtctcactctgttgcccaggctggagtgcagtggtacgatctcagctcgctgcaacccctgcctcccgggctcaagcgattctcccacctcagcctcctgagtagctgggattacaggcatgtgccaccacgcctggctaatttttgtatttttagtagagatgggggtttcaccatgttggctaggctggtctcgaactcctgacctcaggtcatccacccgcctcagcctccctaagtgctgtgattacaagcgtgttcctggtctctttgtatctgcgatataactgggaactctgccttagtcctgagcaaggctttctatcaggtccccaggccactcagttacggtgttggagattttacctccaaattatgctcaatgcaacacttnccatccatgcttctcattttccagtgncctttgctgntcttcgcccccttaactttttacgaagaaaacttaataatttccttcatttaanaaggcctgggggatcttaaaantttcccagaagccccttggnattc

SEQ ID NO: 6688 - DNA, 542 bp, Homo sapiens
  misc_feature (460)..(460): "n" may be a, t, c, g, other or unknown
  misc_feature (488)..(488): "n" may be a, t, c, g, other or unknown
  misc_feature (513)..(513): "n" may be a, t, c, g, other or unknown
  misc_feature (520)..(520): "n" may be a, t, c, g, other or unknown
agttaaaataccttttatgaagtcaactgcttacatttacaagttgatcatgaaaacatcagtaagacacaaaaacatttccgatgctctcggcatgaagaattggtatctggagagtagcaagttataatagtaaggtttctgcaaaagattaaatagtataaagaatattagtatgccttcaactggcagaaataggactgggcacatggaaaaaggtcagaaataagagaagatgcagatttgctcaaaggctgctacccagcactcccatgctcaccccattcctaagctcttccccaagcatactcttcatatgcattggtgaggggccaggtccctggaggtcccagagacacaaagttaagggtagggaaaagttcagccccacactcccatccactttgtagggctttctcccttcagtctgggggtccccacaaatgcccaagatggtggnaacagtcacatggatttctaagagaccncatgacatgcttggaagttgcaaancactggncttaagttgcattatttggacc

SEQ ID NO: 6689 - DNA, 528 bp, Homo sapiens
  misc_feature (478)..(478): "n" may be a, t, c, g, other or unknown
  misc_feature (486)..(486): "n" may be a, t, c, g, other or unknown
  misc_feature (501)..(501): "n" may be a, t, c, g, other or unknown
  misc_feature (503)..(503): "n" may be a, t, c, g, other or unknown
  misc_feature (510)..(510): "n" may be a, t, c, g, other or unknown
gcataaagctgttcattgttccagtaccatttattgaaaaaactacccttttcctgtggaatttctttttagcttctgccaacagtcagttgataatatttgtgtgggtctatttctgagctctctattctgtctcactgaattatatgtttatcctttggccaggaccccactggtttgacttatgtagccttatattaaaattgggtagtgtgaattctcaactttgttcctctttttccatttcaaattttgggggctcttctagttcacttgcctttccacataagttttagaattagcttgtcaatatctacaaaaaatatgctgggattttgatcatgattacactgaatatatatgtcacactggggcaaactgacatcttaacaatattgagctcaattgcactaatacttaatgacctacagattaaataaaagtaagataccttcaggttccagacttgcaaagatcncaaagaangggtaaaaatggcangntccccgnaacctgaactggatggtt

SEQ ID NO: 6690 - DNA, 447 bp, Homo sapiens
  misc_feature (105)..(105): "n" may be a, t, c, g, other or unknown
  misc_feature (197)..(197): "n" may be a, t, c, g, other or unknown
  misc_feature (322)..(322): "n" may be a, t, c, g, other or unknown
  misc_feature (349)..(349): "n" may be a, t, c, g, other or unknown
  misc_feature (363)..(363): "n" may be a, t, c, g, other or unknown
  misc_feature (369)..(369): "n" may be a, t, c, g, other or unknown
  misc_feature (385)..(385): "n" may be a, t, c, g, other or unknown
  misc_feature (429)..(429): "n" may be a, t, c, g, other or unknown
  misc_feature (439)..(439): "n" may be a, t, c, g, other or unknown
  misc_feature (441)..(441): "n" may be a, t, c, g, other or unknown
cccgacccattcccacgggggtcttcccttgggaacaccactggcagatttttatttctggctggataagcagacaccttaagtttaaaacaaagaggtcacctnttcccccacgaaatgcgatgtggtggatatggccacctcactgccctgagacccaacttgatctcccaactccaggtgcatgacccaggctntgaccaacagagctgggtggaggccgttcctgcagcactgggggtggccctgacctaaccaccactcctaatccttgaatgaggttcggtattacaaaggctcttgtttctacggcccagcgcanaggctgcaggagggtctttgcctctgngcaatgctcacagntgcctngcccaagacagagacnagaagggaagccagaccggcagccagcatgggggtgcaaaaccnggaaggaaangnccaaca

SEQ ID NO: 6691 - DNA, 543 bp, Homo sapiens
  misc_feature (437)..(437): "n" may be a, t, c, g, other or unknown
  misc_feature (456)..(456): "n" may be a, t, c, g, other or unknown
  misc_feature (479)..(479): "n" may be a, t, c, g, other or unknown
  misc_feature (504)..(504): "n" may be a, t, c, g, other or unknown
  misc_feature (511)..(511): "n" may be a, t, c, g, other or unknown
  misc_feature (524)..(524): "n" may be a, t, c, g, other or unknown
  misc_feature (542)..(542): "n" may be a, t, c, g, other or unknown
gctttttgttttttgtttgttttgagatggagtctcactctgtcacccaggctggagtgaagtggtgcaatctcggcccactgcaacctccgcctcctgggttcaagcaattctcatgcctcagcctcccaagtagctgtgattacaggcgtgtgccaccacgcctagctaattttttgtatttttactagagacagggtttcaccatgttggccaggctggtcttgaactcttaacctcaggtgatctgcctgcttcagcctcccaaagtgctgagattacaggtgtgagccactacacctggccagctatgccccactttgaacaaacattgctagaatctggaagaatcttctgttagccaaggattgcttttgagggtcactccaaaaactgagctaccacccggggacaaatggtctcataaatttgagtgngtaaaagtgcaaccgattncagctcatgagccctaatataantttgggaaccattttccccccacangcattgnctaaaaaactacngggactttttttccctana

SEQ ID NO: 6692 - DNA, 514 bp, Homo sapiens
  misc_feature (396)..(396): "n" may be a, t, c, g, other or unknown
  misc_feature (466)..(466): "n" may be a, t, c, g, other or unknown
  misc_feature (469)..(469): "n" may be a, t, c, g, other or unknown
  misc_feature (480)..(480): "n" may be a, t, c, g, other or unknown
  misc_feature (484)..(484): "n" may be a, t, c, g, other or unknown
  misc_feature (496)..(497): "n" may be a, t, c, g, other or unknown
  misc_feature (505)..(505): "n" may be a, t, c, g, other or unknown
cgtttgagacagggtctcactatgttgctcaggctggtcttgaactcctgggctcaagcgatcctcctgcctcagcctcccaaactgctggaattagcacctttgggtgctcatgcctcccaaaggcatgagccaccatgcctggctgatcgccttcttttttagtgtctctgtaccatttcactagatagaaataactgatttatatacccaattcgctttttttatttttttattttttagacagaatcttgctctgttccccaggctggagtgcagtggcacgatcttgactcactacaacctccacctcacggattcaagtgattcttgtgcctcagcctcccaagtagctaagattacaagcgtgtgccaccatgcctagctaatttttgnatttttagtagagaggggattttagcatgttggtcaggctcaaactcctgacctctagtgatctgcccgnctngggctttcaantggngggatccaaggnntgagcccntgggcctgg

SEQ ID NO: 6693 - DNA, 524 bp, Homo sapiens
  misc_feature (436)..(436): "n" may be a, t, c, g, other or unknown
  misc_feature (443)..(443): "n" may be a, t, c, g, other or unknown
  misc_feature (447)..(447): "n" may be a, t, c, g, other or unknown
  misc_feature (473)..(473): "n" may be a, t, c, g, other or unknown
  misc_feature (524)..(524): "n" may be a, t, c, g, other or unknown
gagatggagtttcgctcttgtttcccaggctggagtgcaatggcgcgatctcagctcactgcaacctctgcaaccggggttcaagtgattctcctgcctcggcctcccgagtagctgggattataggcatgtgccaccacgcctggctaattttgtatttttagtagagacggagtttctccatgttggtcaggctagtctcaaactcctcaactgaggtgatccgcctgcctcggcctcccaacgtgctgggattacaggcatgagccactgcacccagcctatttattcttattatatattggttatttgtttagctcccgggttaaataaagtataggacttcattctgctctttactgcagactttaccagacattgaggctccatctggctctaactggccaccatctagcaatcttcattcatgcctggnccttgtngaancctgaaaatttacctaccattaatgncctgagctaactttgaacagggtctggggaccattttggctcatgtaagcn

SEQ ID NO: 6694 - DNA, 559 bp, Homo sapiens
  misc_feature (487)..(487): "n" may be a, t, c, g, other or unknown
  misc_feature (504)..(504): "n" may be a, t, c, g, other or unknown
  misc_feature (524)..(524): "n" may be a, t, c, g, other or unknown
  misc_feature (528)..(528): "n" may be a, t, c, g, other or unknown
  misc_feature (547)..(548): "n" may be a, t, c, g, other or unknown
gagacggagtcaagctctgttgcccaggctggagtgcagtggtgcgatcttggctcactcaagccccacctccggggttcacgctattctgcctcagcctcccgagtagctgggaccacaggcgcccgccaccacgaccggctaattttttgtattttttagtagagatggggtttcaccgtgttagacaggatggtctcgatctcctgacctcgtgatccgcccgcctgggcctcccaaagtgctgggattacaggcgtgagccaccgcacccagcctctcacctcttcttaaagtggacatcatggtggcggctgggagcaacagggcatgtcaaggacttggcacctagcgtgaggtctcatcattgtgagctcccacccctggtcaggtggcaagtcctcccagcagcgtgtgggtcaacttcaagggtccccatgcttgggatggcttggacaccaatggccaagcagggatgtatccttgnaaagccttttgcactcntaggaaacaggaaccaaaanggtnatccctgaattggatgaanntcctctaaatt

SEQ ID NO: 6695 - DNA, 517 bp, Homo sapiens
  misc_feature (465)..(465): "n" may be a, t, c, g, other or unknown
  misc_feature (471)..(471): "n" may be a, t, c, g, other or unknown
  misc_feature (480)..(480): "n" may be a, t, c, g, other or unknown
  misc_feature (485)..(485): "n" may be a, t, c, g, other or unknown
  misc_feature (492)..(492): "n" may be a, t, c, g, other or unknown
  misc_feature (503)..(503): "n" may be a, t, c, g, other or unknown
  misc_feature (512)..(512): "n" may be a, t, c, g, other or unknown
gagatagggtcttcctctattgcccaggcaggagtgcagtggtgtgatcacggctcactgcagcctcgacttcctgggctcaagtgatccttccacattagttgggactacaggcatgcaccaccatgcctggctgatttttaaattttctgtagagacaggggtctcaatattgctctggctagtcttaaactcctgggctaaagcaatcctcccacctcagcctctcaaagtgcttgggactacaggcatgagccaccgtgcccagcaaaagatgtaattttaagaatagattgcagacccctattcataagaaagtaaagagtactcctgaataattaaaagctgtattagaattagccataaaaacacatccacaggagtactgataatgtatacatttaaaaggcaggattctgcccacatgaaagtttacctgctacaatgccatgaggcacaactttntttagngctcaagcncttanggaggcntaataatatgnactccttantctca

SEQ ID NO: 6696 - DNA, 566 bp, Homo sapiens
  misc_feature (485)..(485): "n" may be a, t, c, g, other or unknown
  misc_feature (495)..(495): "n" may be a, t, c, g, other or unknown
  misc_feature (525)..(525): "n" may be a, t, c, g, other or unknown
  misc_feature (533)..(533): "n" may be a, t, c, g, other or unknown
  misc_feature (538)..(538): "n" may be a, t, c, g, other or unknown
  misc_feature (552)..(552): "n" may be a, t, c, g, other or unknown
  misc_feature (557)..(557): "n" may be a, t, c, g, other or unknown
actattctaaaaatttaagatcatgctattacctttaagaaaaataatagctttacgatggtttttaattctccatatgaaagttaaagacttcctttttggagtccaatggctgttaacataaatctaaatcctgagtaacctacgagatgcagatcacctggccaatcaagaggctccagggacatgtttacgacatggaaaaaccatgggtgttttttgcccaaaaagagtatgttccctgatggaaaaggcaggcttgagttcattatcttgagaacaaagatcaagacaactgcagtagctgcttacctgtgtggccctgtattctctcactgatttttgctctaaggaggtcccaaacgagcagttcaccagactgactgccagataaaacggaatttccatcccagacaaagcacctgcaagaatgatttaagaaatagtcctttcttcatcatgaaggaaggatatgttgaactggnccatgtaagncccaatgaagtggatcattgacatgtctgnaaatgggnttcgnccccagtacttacnaactnttcctttgg

SEQ ID NO: 6697 - DNA, 570 bp, Homo sapiens
  misc_feature (438)..(438): "n" may be a, t, c, g, other or unknown
  misc_feature (448)..(448): "n" may be a, t, c, g, other or unknown
  misc_feature (488)..(488): "n" may be a, t, c, g, other or unknown
  misc_feature (495)..(495): "n" may be a, t, c, g, other or unknown
  misc_feature (536)..(536): "n" may be a, t, c, g, other or unknown
  misc_feature (547)..(547): "n" may be a, t, c, g, other or unknown
  misc_feature (551)..(551): "n" may be a, t, c, g, other or unknown
  misc_feature (563)..(564): "n" may be a, t, c, g, other or unknown
agagtacgttctgcattttatttttgcaggcaacactttgctcaccagcaagaacacagcccaaggaagggacccaataacctttcaaaacccaaactgcttcctgcggtgagggcccagggtcctccacggagaggacaggcatcttcctttcccaccaggaaggagtcagcccggagcctctgctatgtgcaaggcggtgtgcaagcaccggctgcggctctttgctgtctcttctttctctttggggctgggctgggtgtgcgttctggtgctgatgctttggcctgtgaggctgagctagagaagtgtagatgttagatgtgccggtgccatcctgcgcctcccaagcacgcccccactcactcaccttggcacctcgacccgttcaattacagcaacgaaagaagccactgctgaatgtggcttaagggaagncccgaagcantgcttcggaacccggaacgtgcttaaggcctcggtggggncaggcangcaaggccgggaactaacctgaaaggccccccgggttcttnttgaacgcatnttgnaacaacgttttnnttttct

SEQ ID NO: 6698 - DNA, 508 bp, Homo sapiens
  misc_feature (442)..(442): "n" may be a, t, c, g, other or unknown
  misc_feature (453)..(453): "n" may be a, t, c, g, other or unknown
  misc_feature (478)..(478): "n" may be a, t, c, g, other or unknown
  misc_feature (483)..(483): "n" may be a, t, c, g, other or unknown
  misc_feature (485)..(485): "n" may be a, t, c, g, other or unknown
  misc_feature (488)..(488): "n" may be a, t, c, g, other or unknown
  misc_feature (499)..(499): "n" may be a, t, c, g, other or unknown
gagacagttttactcgctacccaggctggagcgcaatggcgtgatctcagctcactgcaacatccgcctcttggtttcatcaagcgattctcctgcctcagcctcctgagtagctgggattaagacaggaggatcgcttgaacctcggaggcggaggttgcagtgagccgagatcgtgccactacactccaacctgggcaacagagcgagactctgtttcaaaaaaaaaagaaattaggccaattaataatcccacaatggcctctaagtgctcaagtgaaaggaggagtcacatgtccctcgctttcaatcaaaagctaaaaatgattaagcctagtgaagaaagcatgtcaaaagccaagaggggctgaaagctgggccttttgggccaaacagccccattgttaaagcgaaggaaaagttcttgaaagaaattaaaagngctactccagngaacacgagtgataaagtgaaacancctgnanccntaaaaaagagnggggtcatg

SEQ ID NO: 6699 - DNA, 545 bp, Homo sapiens
  misc_feature (490)..(490): "n" may be a, t, c, g, other or unknown
  misc_feature (528)..(528): "n" may be a, t, c, g, other or unknown
  misc_feature (540)..(541): "n" may be a, t, c, g, other or unknown
gcaaattgaaggtttgtggtaaccctgcatccagcaagtctatcggcacaatttttccaatagtatgtacacacttcatttatctgtgtcacatattgataatgctcaaaatacttcaagctttttcactattattatatttgttatagtgacttgtgaccgggatctttgatgttactattataattatattggggcccatatcagatggcaaactgcatccataaatgttgtgaactgttccaccaaccagccattcttccatctctctcggggactccctattccctgagacataatactactgaaattaggccaattaataactctacaatgggctttaagtgttcaagtttgaaagaaagagttgcatgtctcttacattaaatcaaaagccagaaatgattaagcctagtgaggaaggcatgtagaaagccaaaatgggccaaaaactgggcctcttgcaccaaacagccaagttgtaaatgcnaaagaaaagttttcaaagaaaatttaaaatggcccccnggaaacacgaannggga

SEQ ID NO: 6700 - DNA, 555 bp, Homo sapiens
  misc_feature (530)..(530): "n" may be a, t, c, g, other or unknown
gagatggagtctcactctgttacccagactggagtgcagtggcatgatcttggctcactgcaacctccacctcccgggtccaagtgattctcctgcctcagcctcccgagtagctgggactacaggcatgcaccaccatgcccagctaattttatatatatttttagtagagataaggtttcaccatgttggccaggctggtcttgaactcctgacctcaggtgatccacccgccttggcttcccaaagtgctggaattactgtgcctggcctagtcattaatattttgattaacgcctacccctgtgatcaacgacaacttattcaggaagaagggttctttctactctagtatgcttccagttatttactgtgtatctagctaggttgtgaaaagaaaagaatatgaagcacgaagttcatgaaacctaactggtctatcatctactttaccaaatttcttctaaaaaagcaaccatcaaacccagagaagaatttgaagcttctaactttaatggcctttacaatangtggatttctaatcatatgaaagaa

SEQ ID NO: 6701 - DNA, 525 bp, Homo sapiens
  misc_feature (460)..(460): "n" may be a, t, c, g, other or unknown
  misc_feature (468)..(468): "n" may be a, t, c, g, other or unknown
  misc_feature (477)..(477): "n" may be a, t, c, g, other or unknown
  misc_feature (489)..(489): "n" may be a, t, c, g, other or unknown
  misc_feature (497)..(497): "n" may be a, t, c, g, other or unknown
  misc_feature (504)..(504): "n" may be a, t, c, g, other or unknown
  misc_feature (517)..(517): "n" may be a, t, c, g, other or unknown
ccgcataaatattgcttttattacaagaaagaagagaccacctctgaagtaaggcacaacacaattccattgtcactgtggcagaagtccctgttgctcatccctttgatctcagccaagactgtggtccacgggcctaaggcacttgagcttttccctcaactgaagtgtagggggtgcctgagagctgagcctcgtgggagtgtccatggtctctggacctgcatcgaagttcatgtgtttccactggtgctgaagatgaacatcaagaattactagacatgtaaaagtgtctttaagtgtctttcctcctgagtccacctttggcaatggtccccaaagcctggccccttagagatgcagctccagatcctggccaccctcagggttcaaagagactggcccaggggtacacaattgctggaatattctctgcgagtcatgcacacgtgcgggggtnaagtgcanttatatggngacacacacagnggtactgngagcttntaagggtgcacanaagggcag

SEQ ID NO: 6702 - DNA, 558 bp, Homo sapiens
  misc_feature (438)..(438): "n" may be a, t, c, g, other or unknown
  misc_feature (482)..(482): "n" may be a, t, c, g, other or unknown
  misc_feature (489)..(489): "n" may be a, t, c, g, other or unknown
  misc_feature (501)..(501): "n" may be a, t, c, g, other or unknown
  misc_feature (540)..(540): "n" may be a, t, c, g, other or unknown
  misc_feature (558)..(558): "n" may be a, t, c, g, other or unknown
gccgactaaagaaaaccatgatgtatatttgtgagagtcttaaaaaaaatttaagtggaagaaaatttttgaccaggattctaagtgaaattactctgtgcatgtgtgtgtgtgtgtgtgtacaggtaaagatcaaggtagttataagttattaaaaaataattatggagactttttggcagcagaaactacaattaaatcattcatattccttttaaaactagtttaaaatctatattcatctaccatgaaggtgtatacccttgtaaattgggccatatttcatttgatctacagaaagaggcataatattttggacttctatgaaattttggtcaaatttgacaaccttattaaaagctattttgaactttattaaaaagtaaagaatctagctgggcacggtggctcacacctgtaatcccagcactttgggangccaaggcgggtggatcacttgagggcaggagttcgagaccagnctggccnacccggggaaancctggctttactaaaatcccaaaatagcttccttaagangcttaggcccgaaaaatn

SEQ ID NO: 6703 - DNA, 530 bp, Homo sapiens
  misc_feature (20)..(20): "n" may be a, t, c, g, other or unknown
  misc_feature (104)..(104): "n" may be a, t, c, g, other or unknown
  misc_feature (155)..(155): "n" may be a, t, c, g, other or unknown
  misc_feature (237)..(237): "n" may be a, t, c, g, other or unknown
  misc_feature (306)..(306): "n" may be a, t, c, g, other or unknown
  misc_feature (334)..(334): "n" may be a, t, c, g, other or unknown
  misc_feature (407)..(407): "n" may be a, t, c, g, other or unknown
  misc_feature (455)..(455): "n" may be a, t, c, g, other or unknown
  misc_feature (480)..(481): "n" may be a, t, c, g, other or unknown
  misc_feature (502)..(502): "n" may be a, t, c, g, other or unknown
  misc_feature (508)..(508): "n" may be a, t, c, g, other or unknown
  misc_feature (525)..(525): "n" may be a, t, c, g, other or unknown
  misc_feature (530)..(530): "n" may be a, t, c, g, other or unknown
gagacatagtctcactctgncacccaggctggagtgcaatggtgcatctcagctcactgcaacctccgcctctcgggctaaaacaattctactgcctcagcctnccgagtagccgggaatacaggcacgtgccaccacacctggctaatttttgnatttttagcagagatggggtttcaccacattggccagtcttggttcaaactcctgacctcgtgatccactcacctcgacctnccaaagtgctgaaattacaggcgtgagatgcagcgcccagccattagttctatctttagtttttttganaaatcgccatactggtttccatagaggntgtactcatttacattcccaccaacagcgttcctttttctctgcatcctcgacatcttattgctttttgaccntttaaaaatagctattctgactggtgtgaaaatgtagttttaatttgncatttctctggagaatagtggatgnnccaacatttttttcacgtttnggcccnttgtatgtcccttgganaaaan

SEQ ID NO: 6704 - DNA, 534 bp, Homo sapiens
  misc_feature (447)..(447): "n" may be a, t, c, g, other or unknown
  misc_feature (461)..(461): "n" may be a, t, c, g, other or unknown
  misc_feature (476)..(476): "n" may be a, t, c, g, other or unknown
  misc_feature (486)..(486): "n" may be a, t, c, g, other or unknown
  misc_feature (505)..(505): "n" may be a, t, c, g, other or unknown
  misc_feature (515)..(515): "n" may be a, t, c, g, other or unknown
  misc_feature (530)..(530): "n" may be a, t, c, g, other or unknown
aagacagtcttgctctgtcgcccaggctggagtgcagtggcacgatcttggctcaccacaacctccacctcccaggctcaagcgattctcctgcctcagcctccctagcagctgggactacaggtacctgccaccaagcctggctaatttttgtatttttagtagagacggagtttcaccaggttgaccaggctggtctcgaactcctgacctcatgtgatccatccacctcagcctcccaaagtgctgggattacaggcatgagccaccgcacccggccttcctttcctttttctttgcacattcatctccttttttttaggggttaaaagaaacttccccctggcctcatctcccactccctcttgctgcgaggcacccgaaccatgagcgctccctccctcgaggcatcaagcacatgctggtccttctacatgcaacactctntcaaggccattcgnttgcctaacctattnctacccacanttcagggatcggatggcancccaggaagnctggcctggaccttngaaa

SEQ ID NO: 6705 - DNA, 564 bp, Homo sapiens
  misc_feature (501)..(501): "n" may be a, t, c, g, other or unknown
  misc_feature (523)..(523): "n" may be a, t, c, g, other or unknown
  misc_feature (546)..(546): "n" may be a, t, c, g, other or unknown
  misc_feature (557)..(557): "n" may be a, t, c, g, other or unknown
  misc_feature (563)..(564): "n" may be a, t, c, g, other or unknown
gatacagagactcactctgtcacccaggctggagtgcaatggtgtgatctctgctcactgcaacctccgccggggctcaagtgattctcctgcctcagcctcctgagtagctgggattacaggcacacaccgccacgcccagctaattttttttgcatttttagtacagtcggggtttcaccgtgttggccaggctggtcttgaactcctgacctcaggtgatccacctgcctcagcctcccaaagtgctgggattacaggcgttagccaccgcacccagcaaaatttttcaaatatactttattgaggttgaatttacatacaataaatgcattcattttatgtatataaattgatgagtttgacaaatgaacatacccccttcaccaccacgccaatcaaagtaaagaatattttcatcacctggaaatctcccctttccagcccaagcaacatggatgtactcttttacaggtctggctggtctaagaaattcatatnaatgggggtgggaacccatggnacaatattctttggggaaccggnttttgggtttntttacnn

SEQ ID NO: 6706 - DNA, 530 bp, Homo sapiens
  misc_feature (446)..(446): "n" may be a, t, c, g, other or unknown
  misc_feature (458)..(458): "n" may be a, t, c, g, other or unknown
  misc_feature (472)..(472): "n" may be a, t, c, g, other or unknown
  misc_feature (491)..(491): "n" may be a, t, c, g, other or unknown
  misc_feature (502)..(502): "n" may be a, t, c, g, other or unknown
  misc_feature (510)..(510): "n" may be a, t, c, g, other or unknown
  misc_feature (520)..(520): "n" may be a, t, c, g, other or unknown
agctcatctgcaagcaatttttagaagtttgggtttcttactgaaatttccatgaagtgatttttttttctgtgcttaacttcagttacttaaagacctaaaagacaaagtggtatcacatcacatattttgtatgtgtgggcttttttgaggggttagtacttgaaagatatgaattgatatttttttcacattctaaattatgttaaaaccccttcaaatctcactgtttgctcatgcatcacctattagagcaaggtgccctctaaaggtgtgattttggcatctcataggcttccttgaaagccaagcaccagaggtctgcaataaaggcagttgccagctaaatgaataaaagcgagatttcctcaattcaactataaaagcttagagcctgactgctgaattaccaccaacttgtaaataaataatcactactaaatacngataatggggtnaacagcttacactngtaaatcactgggacaganaacctaaaggnaatccctnacccattggnccaacccatt

SEQ ID NO: 6707 - DNA, 559 bp, Homo sapiens
  misc_feature (414)..(414): "n" may be a, t, c, g, other or unknown
  misc_feature (446)..(446): "n" may be a, t, c, g, other or unknown
  misc_feature (528)..(528): "n" may be a, t, c, g, other or unknown
  misc_feature (553)..(553): "n" may be a, t, c, g, other or unknown
agacagggtcttgctctgtcttcaggctggagtgcagtggtgtgatgatcttggctcactgcaaactccacctcccaggttcaagtgattctcctgcctcagcctcctgagtagctgggactacaggcatgtgccaccacgcccagctaatttctctatttttagcagagacgggtttaaccatgttggccatgatggtctcgatccacctgtcccggcctcccaaagtgctgggattacaggcgtgagccaccgcacctggccaagtcctttgtaaaatttaaattaagccactagaatcatatgcaggaaaggagaagatttttattggaatatctagacttagaggctaagaaaaaattccaaaaacaattaacaaaattttagtttataaaaacttagcatattgaagtntaacccccaagaagtggaccctacgcaactgnggacttttgggtggtgatgatgtggtcaatggaaggtcatcgggttggtacaaacgtcccctcaaatgtgggatgttaaaanggaggagctggccttttttgggaanggcacc

SEQ ID NO: 6708 - DNA, 547 bp, Homo sapiens
  misc_feature (376)..(376): "n" may be a, t, c, g, other or unknown
  misc_feature (466)..(466): "n" may be a, t, c, g, other or unknown
  misc_feature (469)..(469): "n" may be a, t, c, g, other or unknown
  misc_feature (488)..(488): "n" may be a, t, c, g, other or unknown
  misc_feature (501)..(501): "n" may be a, t, c, g, other or unknown
  misc_feature (521)..(521): "n" may be a, t, c, g, other or unknown
  misc_feature (546)..(546): "n" may be a, t, c, g, other or unknown
aagtatttcaaacagaacccaggttaaatcacccttgcatgcattgaatcggcctgagcttccctggtgcagtttgtttcctcttctcatcctctagaggacagaacaaggcagggtaggtccatcagtatcacgacctgctcagcttgtgcatagcctctctactcaccttaaccccttccaatcacgagctcccattccctgtcgccactcccaaatagtcaattaccaagtcttctcagttccacattctaagtattctacagccaccactctggtcttggcctggattatttctcacctggatttttataacagcctcctaatgcatgtccctgtctacaatactggccccctcgaatctgccttccattgnctacattcaagatcaaacttcttacatctttccacttcagacttatcattggagtctgaagtccttcagccctaagggaccacttacagnttntgggccatactttggactncccctttggctancacatcctcctttaaaacancttacccagttggctaggtcatatna

SEQ ID NO: 6709 - DNA, 541 bp, Homo sapiens
  misc_feature (411)..(411): "n" may be a, t, c, g, other or unknown
  misc_feature (445)..(445): "n" may be a, t, c, g, other or unknown
  misc_feature (462)..(462): "n" may be a, t, c, g, other or unknown
  misc_feature (469)..(469): "n" may be a, t, c, g, other or unknown
  misc_feature (475)..(475): "n" may be a, t, c, g, other or unknown
  misc_feature (498)..(498): "n" may be a, t, c, g, other or unknown
  misc_feature (511)..(511): "n" may be a, t, c, g, other or unknown
  misc_feature (533)..(533): "n" may be a, t, c, g, other or unknown
aatgtgcatagagtttatttggtacatctatcaatttctacaataactgaccaaaaacagttcacacagtgtccacctgcactccatgtctaaaatgatttatttagtagggtattttgcaaggctagaaaggagagaaaggatttcacagtatcagtgaaaactgttttatcatgaaacaaatgtaatacattaatatattcattcattctctattagaaaacagcaaaattacattgttagttgtattatttacagtgaaaacttggaagacttgacaaagcatcagttagtttatcaacagacctaggaagctccctgtcccctcctttcagggtcctttccttggaaatgaaataaacttaaatcagattttacataactttaagcaccagcttgacaatttaaagntttatttcagttttataaaatactcctgctttgnaaggcaaagtgaatgtnaaaatgngaatgnaatttaaccaggcctgggctggnaaccttttattgnaataagccttaagggttactcnatattccc

SEQ ID NO: 6710 - DNA, 554 bp, Homo sapiens
  misc_feature (535)..(535): "n" may be a, t, c, g, other or unknown
  misc_feature (547)..(547): "n" may be a, t, c, g, other or unknown
gctgcttaaaaaatgcattaatgttactgctttattcacactaattagaatacatacacaaaaaatgtgtatcatatatcactttcaaaaatttccatgttccatgagaactatgtaaacaatgcaaaatgtttccactacgtaacaaaagaaaatcagcattcccacatagtattaggaaaatatttggataatctgaatttatagtaaaacaaagtgatctgaatttgtagtaaaacaaagtgaaatattacaaagcagtcttgtcatgaagtagccttatataactcagaagcaacacatttcatactttcaaacactttggtataagtgaaattaatagaaaacaaaaagaagaagaaaaaaacctctactttggttttcacattattggaacttcagcaacaaggcaagtgcacagctaccttggatggacaaaatgggaaaacctcttatctgcttggttctcctcctggaaatggacgtgctaggaaagcgctttccagactttttggaaataaggggcttttacttnttttcacaatanggtttta

SEQ ID NO: 6711 - DNA, 555 bp, Homo sapiens
  misc_feature (473)..(473): "n" may be a, t, c, g, other or unknown
  misc_feature (513)..(513): "n" may be a, t, c, g, other or unknown
  misc_feature (531)..(531): "n" may be a, t, c, g, other or unknown
  misc_feature (538)..(538): "n" may be a, t, c, g, other or unknown
  misc_feature (540)..(540): "n" may be a, t, c, g, other or unknown
  misc_feature (546)..(546): "n" may be a, t, c, g, other or unknown
  misc_feature (555)..(555): "n" may be a, t, c, g, other or unknown
gacagagtctcactctatcacccaggctggagtgcagtggcacgatctcggcacactgcaagctctgcctcctgggttcacgccattctcctgtctcagcctcccaagtagctgggactacaggtgcctgccaccacgccaggctaattttttgtaattttagtagagacagggtttcacagtgttagccaggatggtctcaatctcctgatctcatgagccgcccgccttggcctcccaaagtgctgggattacaggcatgagccactgcccccggccaatctcaggtatttctttatagcaatgcagtaatggcctaatgcagtatatgtatatagaaatataggataaaaaggtgtatttttccacaaaatttttgacttgggatttcaatttcagttgtagaaaaatcaacctgagatccctggtaaaatcagttaaaatgtcaaatcagtggacccgggtcaactctntactatattggggcttttcactatacccccatatatttcngggtataaattttgggtntggattnangggtgnggctatatn

SEQ ID NO: 6712 - DNA, 554 bp, Homo sapiens
  misc_feature (433)..(433): "n" may be a, t, c, g, other or unknown
  misc_feature (455)..(455): "n" may be a, t, c, g, other or unknown
  misc_feature (472)..(472): "n" may be a, t, c, g, other or unknown
  misc_feature (505)..(505): "n" may be a, t, c, g, other or unknown
  misc_feature (521)..(521): "n" may be a, t, c, g, other or unknown
aaaattactgtactttattgctgtatctatgctttcccagtatagctataatactacaaggagccacagagtgccaccttctggtttaaaactgtggcaccttatttcttttgaaatgtcactttataaggtgtatgtagaaagcaacagcagcagttacaaaatgttgtctgagtgattctgagagctcaaaacaaggatccgcgtataggctgaagaaaaagacgttcagttaacagtgcgcgctgtagaactttaacacaagtcttcaggtggaattcctgtgtaaaccttagtagagatgcgactcacggagaccaaaagtaaaaatctctttaccgtttacagtttagtgaggtggtctgcattctcgcaaacgacttacaaagtacaagaaatgttgcgtgtgagtattaggcatagaaatattcantttcttaccggaaggaccacanggggacaggaaacctantggacgcccggcaacaactttcccgaagatgcncaccccaggaacggantgcaagcctgcacaggcaccttacaatcttttg

SEQ ID NO: 6713 - DNA, 534 bp, Homo sapiens
  misc_feature (496)..(496): "n" may be a, t, c, g, other or unknown
  misc_feature (512)..(512): "n" may be a, t, c, g, other or unknown
  misc_feature (523)..(523): "n" may be a, t, c, g, other or unknown
cgagacagggtcttggtttgtcgccaaggctggagtgcagtggtgtgatcacagctcactgcagccttgacctcctgggctccagtgatcctcccacctcagcctctagtggctaggaccacaggcatgtgccatcacgcctggctaattaaaaaaaaaaattttttttgtagagatggggtctcaccatgttgcccagactgctcttgaacaatcttcccacctcggcctcccaaaatgctgcgattacaggtgtaagccactgcgcccggtctgccagtgtttttctaatactaagacaagggttatgggtctgggaggaagagcccagtggtgaagcgccctgtcacatctgcccgtgtgacctctcggtgatggtgccagccttgacctctgggctgagacagtgggtcggctcttcactgtggaaacgccttgcctaccttccactctgggctctctggaaggaaagcaccatgtgcagcccacacagaangggcaccaacttgggncccccccttgngcccttaattt

SEQ ID NO: 6714 - DNA, 532 bp, Homo sapiens
  misc_feature (460)..(460): "n" may be a, t, c, g, other or unknown
  misc_feature (502)..(502): "n" may be a, t, c, g, other or unknown
  misc_feature (515)..(515): "n" may be a, t, c, g, other or unknown
gcatttccctgatggctaattttgttgagggtattttcatgtgcttattggacatctgcatgtcttatttggagtaatgtctgttcagattctttgcctataattaaatttggttgtctttttattgtttagttgtaagaattcctgatatatactggataggtgatttgcaagtattttctcccattctgtgggctttcatgtcactttcttgatagtgtcccttgaaaagcacagaagtttttaatttttatgaagtccagttgttttgttgttgttgttacttgtacttttagtgttatattagaaaccattgcctggtctatttattccagcaccacatgctaaaaagactattctttgcttcattggattatcatggaatctttgttgaaaaatcaactgattgtaggctggccgtggtggctcacatctgaaatcccagcactttgggaagctnaaggtgggaattgagcccaggaagtcaagttggccttgaccntgatacccttcanggtgaactccacctggg

SEQ ID NO: 6715 - DNA, 540 bp, Homo sapiens
  misc_feature (1)..(540): "n" may be a, t, c, g, other or unknown
nnnnnnnnnnnnnnnnnnnnnnnnnnnnnnnnnnnnnnnnnnnnnnnnnnnnnnnnnnnnnnnnnnnnnnnnnnnnnnnnnnnnnnnnnnnnnnnnnnnnnnnnnnnnnnnnnnnnnnnnnnnnnnnnnnnnnnnnnnnnnnnnnnnnnnnnnnnnnnnnnnnnnnnnnnnnnnnnnnnnnnnnnnnnnnnnnnnnnnnnnnnnnnnnnnnnnnnnnnnnnnnnnnnnnnnnnnnnnnnnnnnnnnnnnnnnnnnnnnnnnnnnnnnnnnnnnnnnnnnnnnnnnnnnnnnnnnnnnnnnnnnnnnnnnnnnnnnnnnnnnnnnnnnnnnnnnnnnnnnnnnnnnnnnnnnnnnnnnnnnnnnnnnnnnnnnnnnnnnnnnnnnnnnnnnnnnnnnnnnnnnnnnnnnnnnnnnnnnnnnnnnnnnnnnnnnnnnnnnnnnnnnnnnnnnnnnnnnnnnnnnnnnnnnnnnnnnnnnnnnnnnnnnnnnnnnnnnnnnnnnnnnnnnnnnnnnnnnnnnnnnnnnnnnnnnnnnnnnnnn

SEQ ID NO: 6716 - DNA, 454 bp, Homo sapiens
  misc_feature (443)..(443): "n" may be a, t, c, g, other or unknown
  misc_feature (445)..(445): "n" may be a, t, c, g, other or unknown
  misc_feature (447)..(448): "n" may be a, t, c, g, other or unknown
  misc_feature (451)..(452): "n" may be a, t, c, g, other or unknown
  misc_feature (454)..(454): "n" may be a, t, c, g, other or unknown
cagggttttgttggcttttacatgtttttctttagataactggtaatgacgcacattacaaaggagacttttctaaatctcaagtcctttgctaatttttctttggaacaacagcacattttcaatgccaaaccttctcctacaacatacaaaggggagatgccaaaactctgaattcttgtaacggatcctgcaactagttctatccagaagatggagacaatattccctggagttgactgaacatgtgagaaggcacagctcagaaggagaggaaggctgagggcagtgaaatgagaacctatgcatcacctggcctttttacatgttagtctatcctactatcccaggaattcacttctgctgtacttgagattcagggataataatgtgactcctcctcccacattctaagtaaatatgttaactagatgagcatttangncnnttnnan

SEQ ID NO: 6717 - DNA, 539 bp, Homo sapiens
  misc_feature (440)..(440): "n" may be a, t, c, g, other or unknown
  misc_feature (483)..(483): "n" may be a, t, c, g, other or unknown
  misc_feature (498)..(498): "n" may be a, t, c, g, other or unknown
  misc_feature (538)..(539): "n" may be a, t, c, g, other or unknown
cagcttcgggtgaatcactttaatgctgttaacggcaagtctgtaaaaggttcaggacaaagttcttttttctttcttttttaattataaaactaacagctgttagaatctttttttctttttttccttttttcttttcccagctacaaaatactctggggagatgcattataatttaaaatatataatattgcacaaacaaccaaaaggttaattaaactaaagaaataattacaaagagaaaaaccccatcccgtcaaaaaaaagattcagcattctctccatcccaccccctcactgaaggtttgaagtggaagtgacctcactctctcggtgtccctgacccacgatccctttcactcattggtgagcacaccagattaggtcaagaatcaccagagcagcatcgtgaagcaccaggctcttccagagattcctgnagcccctcatttccccaaaaggtgcagctttaccagagtgganggtgaaagccccaangctggggctggcttcaggaagaaaactttggcagaaaccnn

SEQ ID NO: 6718 - DNA, 522 bp, Homo sapiens
  misc_feature (61)..(61): "n" may be a, t, c, g, other or unknown
  misc_feature (130)..(130): "n" may be a, t, c, g, other or unknown
  misc_feature (403)..(403): "n" may be a, t, c, g, other or unknown
  misc_feature (421)..(421): "n" may be a, t, c, g, other or unknown
  misc_feature (429)..(429): "n" may be a, t, c, g, other or unknown
  misc_feature (438)..(438): "n" may be a, t, c, g, other or unknown
  misc_feature (462)..(462): "n" may be a, t, c, g, other or unknown
  misc_feature (474)..(474): "n" may be a, t, c, g, other or unknown
  misc_feature (491)..(491): "n" may be a, t, c, g, other or unknown
  misc_feature (518)..(518): "n" may be a, t, c, g, other or unknown
ggttatgaagagtcttgacttccctgagagtcaaaagccccattaattgttcatgtaccanaggtagtgcagggcacactcatgtgcccgagtccttaccccgacgcttggagacacagctgtgggtcanacaggcaaccaatcagggaggtctctgggaactcagataatgaaaattttttcatgtataaaatccttaatcaaaatgcgagtggtgtcatcttgcagtgcagacactgcaacttaaaattaatatacaacagaaccttcagcagaaggaacatccccgggctgtgtggtacaagtgaccctgaactgtggcctggactgccgagaccccaggcggcaggccggctccaggccagcatcgagatcccagggaaacaagctgttgctgcaccangatccccaaggcccgganggacttcnaaatgtganggcaaatcggcaaagatgatgtancacaaagagggncattaacaccataaggngtaactgcacaagggggcttcggcaanctta

SEQ ID NO: 6719 - DNA, 532 bp, Homo sapiens
  misc_feature (400)..(400): "n" may be a, t, c, g, other or unknown
  misc_feature (452)..(452): "n" may be a, t, c, g, other or unknown
accaagtaaaggacaaacttgtactgcatcctactttttagtaggcaactaaagcttaaaattatttgatcagacttttaaaacctctatgacaaacctttacgagtttctcaaagcgtggtctttaggctactgaaatttccaaagttcttctggaaggtttaccttttatatgacagcaatatgagactcactgccactagtcctacagtaaattaaaactatatctgcaacttcccccagacgtcaaatcaccatctaattattgtaaggatttttttccagataacaatagctggaatggggtgtttcagggattttttgttcaccccagtgggtattggtgaaatttgcaccatttccttcctatctccccaggaccacctatcaagagaagccntagtaaacgctcaacaaatgcttgataacccgataaaactactttaatctgnttaagaaaaataacctaaagaattggaataagccttggccttggtaaaaatatcaacttttccttaaaaggctctcagtt

SEQ ID NO: 6720 - DNA, 534 bp, Homo sapiens
  misc_feature (433)..(433): "n" may be a, t, c, g, other or unknown
agacggagtctcgttctgtcgcccaggctggagtgcagtggcgcgatcttggctcgctgcaaaccccgcctcccgggaccaagtgactctcctgcctcagtctcctgagtacctgggattacaggtgagtgccacaacatccaactaattttttgtatttttaacagagacggagtttcactgtgttagccagaatagtctctgtctcctgacctcgtgatccgcccacctcagcctcccaaagtgctgggattacaggcctgagccactgtgcccagcctcccatctacagactttaagcagggtagcaactctattctgaagttcctgcacattatacggcattaaaattgtattacaaattaaaacaaaagtcattctaataaaaaagtcatccaagtaaacaaaagaagctgacattacacagtaatgnatcataaattcttaatgcctaaaaactggtgaatcaatagatgtaagtcagaataaagaaaggcttggttggtacccattattttagaaaggatcataagg

SEQ ID NO: 6721 - DNA, 494 bp, Homo sapiens
  misc_feature (461)..(461): "n" may be a, t, c, g, other or unknown
  misc_feature (471)..(471): "n" may be a, t, c, g, other or unknown
  misc_feature (475)..(476): "n" may be a, t, c, g, other or unknown
  misc_feature (485)..(485): "n" may be a, t, c, g, other or unknown
  misc_feature (488)..(488): "n" may be a, t, c, g, other or unknown
  misc_feature (492)..(492): "n" may be a, t, c, g, other or unknown
caaaaagaatgatacaacttttattttccatggattttgcagatacttttgctacatagtttatgtatttttatgagatttttttcatttgtatgaagttcattcagccttatacaattttaaggtgatatgtttggtagtgtatctataatctttaaaaagtttagagtttttggaatgtacagtatatgaggtaaaatcaagattacattaaaaattgttttctcctctgcactaattttgcagtgaggctcaaatggcaagtatactattaaatgacatttactatcaaaaataggaagttcatttgaattactatgaaaaacataagccactgtaacttgacacagtggcacattttaccattttagacattcaactatatataaatctctgggctattacactcagactcatttgtactgccaaatgtggcactttaaagaagtttctagaaaacnatcgcaatcnctgnngttctgggnaanggtntc

SEQ ID NO: 6722 - DNA, 561 bp, Homo sapiens
  misc_feature (499)..(499): "n" may be a, t, c, g, other or unknown
  misc_feature (525)..(525): "n" may be a, t, c, g, other or unknown
  misc_feature (534)..(534): "n" may be a, t, c, g, other or unknown
gatacggagtctgtctcccaggctggagtacagtggcgtgatctcagctcatcggctcactgcaagctctgcctcccgggttcacgccattctcctgcctcagcctcccaagtagctgggactacgggcgcccgccaccacgcccggctaattttttttgtgtttttagtagagatggggcttcaccgtgttagccaggatggtctcgatctcctgacctcgtgatccgcttgcctcggcctcccaaaatgctgggattacaggtgtgagccactgcgcccggcccccagtccactcattttatacaaaggaaacaaagtttcagaaatgtgtatcttgctcaccagtcggaagcagagtttgcctttgaaccatgtctctggatctttcctagccatataccctactataacatattttaggagcatcatctttaaaatacaagttgcaaccttctaaattgggaagaaaagcctgtagcaacttctttatatctttnaaagaaaacctggggagggggcaagnccttaaggngggaaactatgaactcaaaacctttaa

SEQ ID NO: 6723 - DNA, 539 bp, Homo sapiens
  misc_feature (461)..(461): "n" may be a, t, c, g, other or unknown
  misc_feature (488)..(488): "n" may be a, t, c, g, other or unknown
  misc_feature (494)..(494): "n" may be a, t, c, g, other or unknown
  misc_feature (498)..(498): "n" may be a, t, c, g, other or unknown
  misc_feature (526)..(526): "n" may be a, t, c, g, other or unknown
  misc_feature (533)..(533): "n" may be a, t, c, g, other or unknown
  misc_feature (539)..(539): "n" may be a, t, c, g, other or unknown
gcctgcatggaaatattcattcaatcagaccacactccatttattaaggtctgtactcaggtgttacctctgtctagaggggacaaatgtatctaatctctacaaggtaatttgtaaaattgcagtaggccagaaaagaagtacttcatttagaacacagacagacggacccatgaggacttttagcagacagacagagggacccacgaggacttctgactgacagatgggtcactgttagttgcccatatcaaaagttgaaatgtcatggttgtaaaatcataagaaaaagaagtaataataatgtttgtaaaactacacattaatggataattaagttaacaacatacaaccacatttatattacatatgtgtttgtatatatatatatatatatttatactagtatcttaaagactgtacatacatcagctcattttttttctataaatccttatganggaaaatctggtatattccccatttgnaactgntttngaagtaattattttgagaaaggtgaatnttagctntatgcn

SEQ ID NO: 6724 - DNA, 400 bp, Homo sapiens
  misc_feature (45)..(45): "n" may be a, t, c, g, other or unknown
  misc_feature (113)..(113): "n" may be a, t, c, g, other or unknown
  misc_feature (130)..(130): "n" may be a, t, c, g, other or unknown
  misc_feature (376)..(376): "n" may be a, t, c, g, other or unknown
  misc_feature (380)..(380): "n" may be a, t, c, g, other or unknown
  misc_feature (382)..(382): "n" may be a, t, c, g, other or unknown
  misc_feature (385)..(385): "n" may be a, t, c, g, other or unknown
  misc_feature (387)..(387): "n" may be a, t, c, g, other or unknown
  misc_feature (397)..(397): "n" may be a, t, c, g, other or unknown
  misc_feature (399)..(399): "n" may be a, t, c, g, other or unknown
gaaaatgaaaatagaatatttatttatgtttaacttaagttactntcaatcaaaaccaggcaatgattaaactggcaacataaaaaggagggagcacgagtcatggaggcggnaagtggtgcacctgcanacttgctctgctccatcactttttccaagaggcccagaaaatgtaaggtcatggctacatccaagttacaatggtagtgattacagccaggttagaaagggctcacttttgttcagagcaaactctacatcattgaagagggggatcaggtcttcagattccaaagttcctaagtcaacgtttgttcctggaagacagtcaaggaaatcagggaaacgggtctgttggggattgatgttcatgggngttngnccngngttttctccngna

SEQ ID NO: 6725 - DNA, 558 bp, Homo sapiens
  misc_feature (464)..(464): "n" may be a, t, c, g, other or unknown
  misc_feature (466)..(466): "n" may be a, t, c, g, other or unknown
  misc_feature (511)..(511): "n" may be a, t, c, g, other or unknown
  misc_feature (538)..(538): "n" may be a, t, c, g, other or unknown
  misc_feature (547)..(547): "n" may be a, t, c, g, other or unknown
gttttgttttttttgcagttgtcagtcttcatgatccattctgtggcgagctgggaaaaaacgcagttgctaagtcaacgtctgaacagtgtgaggctcctgaatatctcccaggagtccctgcgcaactgtcctgagcatgagatcattgcacagagaagacagtccaccgcgcagcgctgactatctacagaggtctgagaggggcgcgtccctcttgtgtttcctctttttgccatggtaatactgattattggatttgccttgatgttgtttgtttgtcatcaaggaaccatggcttgtttgagttgtaccttggaagcctttgctggaagaacgaaagagccttgctgatccatgctgagatttgttggtgctgttggatgtgttagtggtttgggtgctttgcattttcccaactgcctgagaggactccaaggatacatcttgcgaccctactcggntnccagtggacggacgggaaagcagctggttcaagggtttgcatggnggtgcatcggaatctacgtcacttaanctggactgngtggcaaaaaa

SEQ ID NO: 6726 - DNA, 550 bp, Homo sapiens
  misc_feature (422)..(422): "n" may be a, t, c, g, other or unknown
  misc_feature (449)..(449): "n" may be a, t, c, g, other or unknown
  misc_feature (489)..(489): "n" may be a, t, c, g, other or unknown
  misc_feature (496)..(496): "n" may be a, t, c, g, other or unknown
  misc_feature (502)..(502): "n" may be a, t, c, g, other or unknown
  misc_feature (539)..(539): "n" may be a, t, c, g, other or unknown
  misc_feature (544)..(544): "n" may be a, t, c, g, other or unknown
  misc_feature (549)..(549): "n" may be a, t, c, g, other or unknown
ggtcttcctttgtcacctaggctggagtacagtggtgcaatcacagctcactgcagcctccacatcctcccacctcagcctcccaagcagctgggaaaagaggtgcacaccaccacaccaggctaattcttttattttttgtagagatggggtctcgctctgttgctcaggctggtctcaaactcatggactcaagtgatccttccacctcagcttcccaaagtgctgagattacagacatgagccccagtgcctggccaaggcttttctttttcttccaaatcattccatgcttactgtcagctaaaatctctcctctgttacatagctcctgtcttatatttgtataattaaattatggtacttaaacactctttacatttatcttctttacagtttcatctggttaggttggccattgnttcaacccattccaaactattttcggncataagaaagacgctaaggacttcataaactggcttgaancgactgntctganggcttccgattacgccaaacgtttattcatgcaagancccgngaggna

SEQ ID NO: 6727 - DNA, 554 bp, Homo sapiens
  misc_feature (438)..(438): "n" may be a, t, c, g, other or unknown
  misc_feature (441)..(441): "n" may be a, t, c, g, other or unknown
  misc_feature (469)..(469): "n" may be a, t, c, g, other or unknown
  misc_feature (511)..(511): "n" may be a, t, c, g, other or unknown
  misc_feature (554)..(554): "n" may be a, t, c, g, other or unknown
gcttggacattaaataacaaatgaaagcatcatgataaattgagacgcagagaccacagaagaaagaaaatgctttatatggtaatacttcagcagtgcttttcctctgatttttgaatgagggggtccatattttcatcttgcactgggccttgcaaattctgcagctggtcctgactgccaagagagggatttagccataaaatcagcaagggttggtcgtggggaagtggggtacaggaagatagaggatttaggcatggctgcagggttttaagctggtggtactgttggctgggaaatctaggaaatccagcattgagggaccggctttgtgaatctgttgtggatgggctgagcctgcagtgaccatggggcatcctgcctgggaggagggcgaacagcaattcatcagcacaggtggtgactgaggctcangangggctacccgagcgggaactgcgggcanggatcttggggaagcagacatttaggagatgagacaacagcntggctaacctcaaaccccttttagatagaatgtcttccttctn

SEQ ID NO: 6728 - DNA, 554 bp, Homo sapiens
  misc_feature (426)..(426): "n" may be a, t, c, g, other or unknown
  misc_feature (471)..(471): "n" may be a, t, c, g, other or unknown
  misc_feature (503)..(503): "n" may be a, t, c, g, other or unknown
  misc_feature (513)..(513): "n" may be a, t, c, g, other or unknown
  misc_feature (522)..(522): "n" may be a, t, c, g, other or unknown
agaaagacttaaattttataaacatccaagaaaaagggagggagaccaagtttaataaaattaatagatttgttaggaagaataatcaattttccataccccctccaagccattgttatttgatataaatcacagttttgttaaaggaactttaagaataacttcgtcactaatgacacatcatttttggcaaacaggaaaaatactaaattcagaggatcatagtttctgcttagtcagctctgacggccacacaagaggttgttatgatttgcaattgagaagtagtactatttggataggcttactcatggaaatgtggaaggttttgcaagcctgtcagatgtgggactgcatacgatttatgtaaattctggtcttcaatagtttgtagacttagtggcaacctagtaattgatttcctgnttccccatcactacagctgtcactggacgaggaggagaatgaacnaaataccaggcactttctattctagcataaangctctggaanccagtctgntggcctttctgggggggacctaattttttttt

SEQ ID NO: 6729 - DNA, 556 bp, Homo sapiens
  misc_feature (551)..(551): "n" may be a, t, c, g, other or unknown
  misc_feature (556)..(556): "n" may be a, t, c, g, other or unknown
gagacggagtcttgctttgtcacccaggctggcgtgcagtggcacgatctcggctcactgcaagctccgcctcccaggttcacgccattctcctgcctcagcctctcgagtagctgggactacaggcgcccgccaccatgcccagctaattttttgtatttttagtagagacagggtttcaccatgttggccaggctggtcttgaactcctgacctcgcgatccgcccacctcggcctcccaaagtgctgggattacaggcttgagccaccgctcccggccttcctatagcatgaatttctataactctagctactgcttaagtcagataaaaaaaacacaaattacaatgacaatttaccatgtgtctggcgctgttctaagcacatgttaatgcacaaaaattctatgaaataggtgtattattatcttcattttatagatacgtaaattgaggtaaaagccaagttcatcgacttcttcagaatcacacaggtaggaaaatgtcccagaagcctacactctttaaaccaccacaactaggtatacctnagtcn

SEQ ID NO: 6730 - DNA, 554 bp, Homo sapiens
  misc_feature (506)..(506): "n" may be a, t, c, g, other or unknown
  misc_feature (551)..(551): "n" may be a, t, c, g, other or unknown
gagatggagtctcactgtctcccaggctggagggcagtggcatggtctcaactcactgcaagctccgcctcccgggttcacgccattctcctgcctcagcctcctgagtagctgggactacaggcgcctgccaccatgcctggctaattttttttgtatttttagtagagacagggtttcgccgtgttaccaggatggtcttgatcccctgacctcgtgatccgcccaccttggccccccaaagtgttgggattacaggcttgagccacagtgcccggccagcatctgcttttaaacagaattttacaatgttcctatcttcacctccaccttcacttccattctgaggtgtagctagcattgtagatttctgaacttgtctagcaattagggacacaccgctcctagcctccttcaacaagctatgtgaagtgttagaattccttcactggcatgttggtgagatttttggagtatatcaagccactggctttaactagaacctncctttttcaaacttctctggatgaaaaagcatcaggatatatttncaa

SEQ ID NO: 6731 - DNA, 543 bp, Homo sapiens
  misc_feature (133)..(133): "n" may be a, t, c, g, other or unknown
  misc_feature (263)..(263): "n" may be a, t, c, g, other or unknown
  misc_feature (294)..(294): "n" may be a, t, c, g, other or unknown
  misc_feature (407)..(407): "n" may be a, t, c, g, other or unknown
  misc_feature (471)..(471): "n" may be a, t, c, g, other or unknown
  misc_feature (487)..(487): "n" may be a, t, c, g, other or unknown
  misc_feature (530)..(530): "n" may be a, t, c, g, other or unknown
  misc_feature (538)..(538): "n" may be a, t, c, g, other or unknown
gtttttttttttttttttttttttttaccagcaatacaaatctctttttattgggacttcataatctttttcaattgaagaggatttcctttgtcacccagcagggtcctggaacttcttggctggaattcanatatccagagttctggttacctacaacatctattctttacgtagtagcttacaagcatcaaaggccaccctcacctgatgcttggccggatctatgccctccaaaatagtcttcatgtcctcctgcttgnctaaatcagcccctgcttgaagtaaaacatntgcaacatccgtatgtccattttcacaagcataggttaaggctgtgtctcctgttgctgttgtagcatgcacattagcgccagaagccagcaaatatttaaccaattccaggngtccctcctgagaagcctccatcaaaggtgtggagcaacccaagttctatatcaacccctggcntaataagaaagtctgnaactttagaaaatcctcccaggaggccaagtaagagccgttcntggggttntttgg

SEQ ID NO: 6732 - DNA, 549 bp, Homo sapiens
  misc_feature (484)..(484): "n" may be a, t, c, g, other or unknown
  misc_feature (493)..(493): "n" may be a, t, c, g, other or unknown
  misc_feature (495)..(495): "n" may be a, t, c, g, other or unknown
  misc_feature (499)..(499): "n" may be a, t, c, g, other or unknown
  misc_feature (510)..(510): "n" may be a, t, c, g, other or unknown
  misc_feature (534)..(534): "n" may be a, t, c, g, other or unknown
  misc_feature (536)..(536): "n" may be a, t, c, g, other or unknown
aatagtggaaatttttattttacaaatgaaaagtcaaaatactgctttgaattgacccttaagtcacactctgaattcataccatgcagttaaaattttcccagttcatcaattaattccactgaaaacagactaagcttctgtctatggaagaagcacagaccagctttaaccatgatgacaatcactggtaagactaagcaaaggaagtgactgtatctctgtttcaaattctttttcttcttgggcacattctccatggccatgtgaaacttaaaacaaagattgcgactgtcctggccagagaagaaggttaaagctgtgtcatagagaattgcagattatagttctaccttcatcctgtgatatccatgtctctcagagaggtctggctacaccaggatgttctttgcgatagcattcaaaggccttaccttggtcacatctggtacctttagggaatattctgagccaagaaaaggangcttccatngnaacngatgaattcgnaacttcatttccgggctctaattnancggcaaacagtgg

SEQ ID NO: 6733 - DNA, 554 bp, Homo sapiens
  misc_feature (464)..(464): "n" may be a, t, c, g, other or unknown
  misc_feature (540)..(540): "n" may be a, t, c, g, other or unknown
  misc_feature (548)..(548): "n" may be a, t, c, g, other or unknown
  misc_feature (554)..(554): "n" may be a, t, c, g, other or unknown
gagacagagtttcgcttgttgcccaggctggagtgcaatggcgtgatctcagctcaccgcaacctccacctcccaggtccaagcgattctcttgcctcagcctcctgagcagctgggatcacaggcacgcgccaccatgcccggccaatccttgcatctttagtagagacggcatttctccacgttggtcaggctggcctcgaactcccaacctcaggtgatctgcccacctcagcctcccaaagtgttgggattacaggcatgagccaccatgaccggccagctactgtcttttctttgacccttcctttccggtttttgaagataaagcaggaagtaatcttctctgaagatacttgataaaaattcccaaaacaacaaaacacatgcttccacttcactgataaaaaatttaccgcagtttggcacctaagagtatgacaacagcaacaaaaagtatttcnaaagaagttaagaattcttagcaaaatagatgattcacatcttcaagtccttttggaaatcagttaaaattaatcntttcccantttcan

SEQ ID NO: 6734 - DNA, 549 bp, Homo sapiens
  misc_feature (487)..(487): "n" may be a, t, c, g, other or unknown
  misc_feature (518)..(518): "n" may be a, t, c, g, other or unknown
  misc_feature (524)..(524): "n" may be a, t, c, g, other or unknown
aaacacagttcatttttagtttgtcgtggcaatacatggaaaaaaatcaggccactactaagcatctatagagtgtatctttggcaaaaatgtggacctgcaacaattcagatggttttctttcaattaggttcaaaaatcatggctctgtaaatttccaaaacttttaaagtcttctcatgtcttcttataatcgggcattcagaggtacgtgttggttctaatagctttggtagaaacatgctgaaaatagaaatgaatataaaatgccttgtctttaggctaatttggtatggattagtaaggcctgagtgaactggaaattagtacatttcttgaaataatacaaatgaatgtgagacacatgggtagaacagcagattcagaaaaaaaggttaagtattgtagtcccaagttttataaaagacatcaagtaaggccagcaatagaggaatcaagttcttttcgggttccctgggggggattnctatcactttaccgtcatgaactgggattgnaaaagngaaaggccttgacttggtttggagg

SEQ ID NO: 6735 - DNA, 547 bp, Homo sapiens
  misc_feature (444)..(444): "n" may be a, t, c, g, other or unknown
  misc_feature (547)..(547): "n" may be a, t, c, g, other or unknown
gtctgctgtgggcaaaagatcctctgttggcctctgacccctcctcccgctgatgccaatgacaggaaaccagagactctctgcctcagagactacagggagagagggaggatgggcccaaggtgtattcctcttacgatgcccacccttaactcaccgtgcattgcctgagggccctgggctctcagtctgcattgattggagctgggaccgaagcccccattccagaaaccggaccaggagataggcaaacaagaagaagccacccaatgtgagaaagaaataagcaacgggggtgatgtccgtctttatgcccagcaaagccagccccagtaggaaggaggcgcagcacaggaggagaagcggcttctcagtctccccagtaagtgcattggcaccatggcccctcccaggcttctgcaaaaagacacacagctattgggnctacactagcaattggtgtcatggctgtgtcagatccaaagtacccatatgaaaattcttggttgggttctaggtcttcaatctcaaataatcatctggagan

SEQ ID NO: 6736 - DNA, 503 bp, Homo sapiens
  misc_feature (370)..(370): "n" may be a, t, c, g, other or unknown
  misc_feature (443)..(443): "n" may be a, t, c, g, other or unknown
  misc_feature (449)..(449): "n" may be a, t, c, g, other or unknown
  misc_feature (454)..(454): "n" may be a, t, c, g, other or unknown
  misc_feature (458)..(458): "n" may be a, t, c, g, other or unknown
  misc_feature (490)..(490): "n" may be a, t, c, g, other or unknown
  misc_feature (493)..(493): "n" may be a, t, c, g, other or unknown
  misc_feature (496)..(496): "n" may be a, t, c, g, other or unknown
atgtgaacatgttgcatttataaagaaatgtcacacgtacacacagaaaggtcatatcaaagcaggtaaaaattaagacaacatatttctccaaaaaccagtctgacatcttataataccagaaatatacacacacttcaaacctgggaaatcatcctatgaatctgctctgaccaatatggtagccactaatacctgaaatatggagtaaccaagtaacaaatttttaaatttaaaactgatactcatttcagttattggaaaacttttaagcacatttagaccaacatgggtatgtaaatttactttgcaaatttagattttatgaaatctaaacatggattaagtattatcagtaaaactttagtgnctcaactgagatatgcaaaccagacagacttagtttcataagaatgaaaaatatcttactggaataatatctnccatgnattgnggtnaatatattaaaattaatttaccttggttttancgnggntactaga

SEQ ID NO: 6737 - DNA, 508 bp, Homo sapiens
  misc_feature (278)..(278): "n" may be a, t, c, g, other or unknown
  misc_feature (455)..(455): "n" may be a, t, c, g, other or unknown
  misc_feature (467)..(467): "n" may be a, t, c, g, other or unknown
  misc_feature (473)..(475): "n" may be a, t, c, g, other or unknown
  misc_feature (477)..(477): "n" may be a, t, c, g, other or unknown
  misc_feature (503)..(503): "n" may be a, t, c, g, other or unknown
gagacagagtctcactgtctctgtcacccaggctggagtgcagtggcgtgatcttggctcactgcaatctgtgcctcctgggttcaagcgattttcctgcctcagcctcccaagtagctgggattacaggcatgtgccaccatgcctgactaatttttgtatttttagtaaagtctggggtccactatgttgaccaggctggtcgcaaacccccgacctcaagtgatctgcccacctcggtcttcctaagtgctgggattacaggcgtgagttacggnacccagcctggaagtaaggacagctgtgttctaatgccagctctgcccaaccagctgcacaaccacggggcaagtcatgccacccgtcaagcgttcagatttttcaagctagatgaaggaaaaatgactgacttcccaagaagtccttgcaactctatatatttaaagcttctctgnactttcaaaaangaaccnnnancaaccccaatacttccttaaacgcanttact

SEQ ID NO: 6738 - DNA, 536 bp, Homo sapiens
  misc_feature (231)..(231): "n" may be a, t, c, g, other or unknown
  misc_feature (431)..(431): "n" may be a, t, c, g, other or unknown
  misc_feature (492)..(492): "n" may be a, t, c, g, other or unknown
  misc_feature (494)..(494): "n" may be a, t, c, g, other or unknown
  misc_feature (503)..(503): "n" may be a, t, c, g, other or unknown
  misc_feature (519)..(519): "n" may be a, t, c, g, other or unknown
  misc_feature (521)..(521): "n" may be a, t, c, g, other or unknown
  misc_feature (531)..(531): "n" may be a, t, c, g, other or unknown
  misc_feature (533)..(533): "n" may be a, t, c, g, other or unknown
gagacagagtctcgttctgtcacccaggctagagtgcagtggtgtgatctcagctccctgcaacttccaactcctgggttcaagcgagtctcccgcctcagcctcccgagtacctgggattatagcctgccaccatgcccggttaatttttgtatttttagtagagacggggtttcgccatgttgcccaggctggtcttgaactcctgacctcaggtgattcgcccacctncagctcccaaagtgctgggattacaagcatgagccaccgcgcccagccaagggacattacttcttaagtacagaagcatcagtgaaggtcagtggcatgatgcgctgggccgtcctccacaggttattataaagaagacatccatgaggaccaatgtcacacctgccaggaaacactccccagtcccctgaagggcaaangtctggctttccaaaaacctggggcctggtctttttggcattctaatgggccaaaacccantnacatggctnttaatcccccacttantncctaattttntngag

SEQ ID NO: 6739 - DNA, 550 bp, Homo sapiens
  misc_feature (454)..(454): "n" may be a, t, c, g, other or unknown
  misc_feature (490)..(490): "n" may be a, t, c, g, other or unknown
  misc_feature (536)..(536): "n" may be a, t, c, g, other or unknown
  misc_feature (541)..(541): "n" may be a, t, c, g, other or unknown
  misc_feature (547)..(547): "n" may be a, t, c, g, other or unknown
agacggggtctcgctctgtcacccaggctgaagtgcagtggtgtgatcccggctcactgcaacctccacctcccgggttcaagtgattcccctgcctcagcctcccaagtagctgggattacaggtgtgtgccaccatacctggctaatttttgtagttttagtagagatggggtctcaccacattagccaggctggtatcgaactcctggcctcaagtgatctgcccacctcagcctcccaaagtgctgggattacaggcgtgaaccaccacacccggcccgtcttaacagtttctatactccccaagagtgagttgcaaatgaactaaaagtcaagcttgtaagagctatttatattccccaactggtaatggacccataagtatagtggctgcatcttattcacctctgtaagcccgaacctgacacattgctggtgcagtacatacccangggaatatgtgctgactttttaaagaatttggaatncaagggccagtgtcaaatttcaatctaagaactggattcattggcnaagancctganttt

SEQ ID NO: 6740 - DNA, 553 bp, Homo sapiens
  misc_feature (426)..(426): "n" may be a, t, c, g, other or unknown
  misc_feature (435)..(435): "n" may be a, t, c, g, other or unknown
  misc_feature (485)..(485): "n" may be a, t, c, g, other or unknown
  misc_feature (502)..(502): "n" may be a, t, c, g, other or unknown
  misc_feature (505)..(505): "n" may be a, t, c, g, other or unknown
  misc_feature (538)..(538): "n" may be a, t, c, g, other or unknown
accagtttactcaattaacaggtcagcatataaaacctggatcttctgacccttgattgtaccacactctgaaatgtatataaaatttatgattaccacaaataaagatacttcaaagaccctaaggaaggaaacacagaagaagggaacagcttcctcacctataaaataataaaaatgtggtctttttgacatccttgagctaaataaggtcgcaaggtggagcccactgcccagaagttttacccaaatagtctaacatagaaataggcctggaaacaggaggagtaacataaatttaaggcttaccagtgtataaagtaccttctattatcatttgatcctcactactcagttaagaattatctctatttttacatattttttaaaaaggcatcagtgaaataatgtgattaccttcaaggncacccactnggtaaatggcttggacaaatcctcattaaccctactatacccttttattntgagaaagtcagagtanctnggtggaagcctgactatttaatacggatccaanatggaaatccaaatc

SEQ ID NO: 6741 - DNA, 546 bp, Homo sapiens
  misc_feature (455)..(455): "n" may be a, t, c, g, other or unknown
  misc_feature (463)..(463): "n" may be a, t, c, g, other or unknown
  misc_feature (506)..(506): "n" may be a, t, c, g, other or unknown
  misc_feature (508)..(508): "n" may be a, t, c, g, other or unknown
  misc_feature (546)..(546): "n" may be a, t, c, g, other or unknown
cttttttcattaaaaaaccatttatagtcatttcatgttggttggaaatcacagaaattaggcaggaaaaaaaaacccaagggaacaaatacaaacagcacagcgttccccacagttctctgctctgctctcctgcgagccggggaaggagaggggcagcctgagctcgggcgggggctgggcctggctgcccgcggctcagctctcctcgtccagggcctccgagtccccccgtgccctctcgcgctcctgccggtcgctcccaggcctgtccaggtcgggaccctcccgtacgctgctggtgggaacagcaaaggcggtgtgaggatgccctcccgcccctgccctgcctgtagggcggttgggtgggatgggcaccgaggagtgtacccccgttgtggcacctgaggctcgagtgccgccttctatctggctgcttctggcactagagaacncaaccatnttcaagggtcccacgcttgggccaagccaggcattagcacaangnaacttgttgggtaagtgaagtgacttcccttgagcctn

SEQ ID NO: 6742 - DNA, 499 bp, Homo sapiens
  misc_feature (420)..(420): "n" may be a, t, c, g, other or unknown
  misc_feature (430)..(430): "n" may be a, t, c, g, other or unknown
  misc_feature (445)..(445): "n" may be a, t, c, g, other or unknown
  misc_feature (457)..(457): "n" may be a, t, c, g, other or unknown
  misc_feature (466)..(466): "n" may be a, t, c, g, other or unknown
  misc_feature (490)..(490): "n" may be a, t, c, g, other or unknown
  misc_feature (493)..(493): "n" may be a, t, c, g, other or unknown
gtctttcccattttcgggaagagtaggcctgggatttgttttaaaaggtaatttattatgaacatactgcatggcttttgctttggcagcgtttttcttttcttgaaataaagaaataaggagaaagacacatacaggccactgtttaagcctagaaaacatcccttatgggagggtttcttaaccttggcactatcaacaattcaggacagaacattcttttgtggggacagtccagtgcattgtagaatgttcagcagcatccttggcctctacccactagaggctggtagctccaagtcttgctgtaacaaccaaaaatgtctccaaacattgccaaaagccccttctggagtaaaatagccccaaattgagaaccactgcttaaggggggaaaaaaagaaaaaaaagttcccttanaatgatgaanggcaacccctggcanggtcagaaaaantggggccanatccaccctggcttttgggttcangcncctggg

SEQ ID NO: 6743 - DNA, 547 bp, Homo sapiens
  misc_feature (523)..(523): "n" may be a, t, c, g, other or unknown
  misc_feature (545)..(545): "n" may be a, t, c, g, other or unknown
  misc_feature (547)..(547): "n" may be a, t, c, g, other or unknown
ggtcatctgagcttgagttaatcggcagcactcggctttctaacctttgaggcatttctaaatctgatcccacacactcattctttcagagcccggcaaggtaagatgaactgattacaccatacttagaaacatcctgtagaatcaaagaaaaatgcttcctgcctttgtacagaaaattaagagatttttcaaagtgaagaaaagcaatttaattaccattaaacaaggtttaactgctgtgggcaatcattctctgcttgagaagcataatttcacttgaaagaaaccagattggcccccggccctcttttggcttatcctcagcaagaagcgactgggaacaactgactcttgggtgagctgtccagatagttagaaacatatcacacagcagtttaagggaccccagggggggcagggaaaccccagaatcaggccactcctgtccttgctcctgtctgctgctcggaagggccccccacagcagaaacatgtgatgcctccttcttctttggccttntacagaagggcagacatgggtntn

SEQ ID NO: 6744 - DNA, 554 bp, Homo sapiens
  misc_feature (462)..(462): "n" may be a, t, c, g, other or unknown
  misc_feature (467)..(467): "n" may be a, t, c, g, other or unknown
  misc_feature (508)..(508): "n" may be a, t, c, g, other or unknown
  misc_feature (531)..(531): "n" may be a, t, c, g, other or unknown
  misc_feature (540)..(540): "n" may be a, t, c, g, other or unknown
catgttataatgtttttattgcaattgaggatgttttcaataagtatcttgagcttgaggccctggctaagtattccttttgtactagaaatcagatttctctggcacaattccattgcctgcaatggtctttatcaaaactacaaaagccagcacactatttcaatatgtattcagttgttcatatctaaatacctcattagctatgaaacaaaccaaatataaatgctgaatatacagtacatagcaacagattcttcacagaagaaaacaatgaaagactaattttctacaatatgttacctgttcattagttcttcaataacattacttaggctatttcaaggataacaaaatgtatgcgccactacccatgttttcgcaacattttttacctaggttctaaaggggaataaatgagggatgccgtataggcagaattatttttataaactttcggangttcntttgggtggggcatcttacatgaatatatgggaccagaacnggatgtacccttaagcattagtnggtctatgnaatttgctatatgg

SEQ ID NO: 6745 - DNA, 516 bp, Homo sapiens
  misc_feature (428)..(428): "n" may be a, t, c, g, other or unknown
  misc_feature (430)..(430): "n" may be a, t, c, g, other or unknown
  misc_feature (439)..(439): "n" may be a, t, c, g, other or unknown
  misc_feature (458)..(458): "n" may be a, t, c, g, other or unknown
  misc_feature (489)..(489): "n" may be a, t, c, g, other or unknown
  misc_feature (495)..(495): "n" may be a, t, c, g, other or unknown
  misc_feature (507)..(507): "n" may be a, t, c, g, other or unknown
agcttttcaagagcgatcttttattttctgaaagtcctaaaactgatccatttgtcaaaagatgattgatgccccagttcacaaaccatatctttttctctttcagcaaatcctggagccccaagagggctgcagcctgagtgaagtggtgacatcagaacctgccctccacacccaacagctggactgcagcctcctgcaaggcctggtggatgtgcctgacctctctctgggacagagtccgttccatgtggcggtacgtgatgcggtagcagtggctggtcttgtgcgtcctacagagaggaagagaacacaggtgagtgcgggatgaacaaggctgtgcctgaaggagcagtgtggcttgccctggccagatctccccaactgcagtggagaactgaggttggaatccaggtaccatttaccgntnacaatctgnatcttatcagggggaaaangtgacagtcaggggaacattcgcttggactnaaggangcttctgggttncactggggg

SEQ ID NO: 6746 - DNA, 543 bp, Homo sapiens
  misc_feature (363)..(363): "n" may be a, t, c, g, other or unknown
  misc_feature (445)..(445): "n" may be a, t, c, g, other or unknown
  misc_feature (452)..(452): "n" may be a, t, c, g, other or unknown
  misc_feature (485)..(485): "n" may be a, t, c, g, other or unknown
  misc_feature (499)..(499): "n" may be a, t, c, g, other or unknown
  misc_feature (543)..(543): "n" may be a, t, c, g, other or unknown
gagatggagtcttgctctcgctctgttgcccaggttggagtgcaatggtgtaatctcagctcactgcaacctccgtctcctggctccaagcaattctcctgcctcagcctcctgagtagctgggattacaggcacgcaccaccacacctggctaatttttgtattcttactagagatgtggtttcatcatattgatcaggctggtctcgaactcctgacatcatgatccacccacctcggcctcccaaagtgctgggattacaggcgtgagccactgcgcccggcccattaatcttatcttttaaatcatatcaacagttctaaaaaaagacttggattttttattggtctagtgggtattgntctagaagcaagactcctctaattgatcataacaccaagcctaccccttagctgacaagtcaaatgggtggttttgggtggntcaaatncaggaagacaccctttgggatacattgactaantagccaagaataanaaggcaggggaaagaaattatctaaatatttttggctaaacctn

SEQ ID NO: 6747 - DNA, 552 bp, Homo sapiens
  misc_feature (422)..(422): "n" may be a, t, c, g, other or unknown
  misc_feature (443)..(443): "n" may be a, t, c, g, other or unknown
  misc_feature (473)..(473): "n" may be a, t, c, g, other or unknown
  misc_feature (495)..(495): "n" may be a, t, c, g, other or unknown
  misc_feature (532)..(532): "n" may be a, t, c, g, other or unknown
  misc_feature (535)..(535): "n" may be a, t, c, g, other or unknown
  misc_feature (541)..(541): "n" may be a, t, c, g, other or unknown
  misc_feature (551)..(551): "n" may be a, t, c, g, other or unknown
caaacagcgggtcattttgcagatctcaacatttttgaaagacagaatataaaacatcagcttttaccatatgttgtggtcaaatacattttataaatattggcttagatgagatttaagctcatctagctttaggtgcttaagagtccaccagacctggccggagcagtggctcatgtctataatctcagcactttgggaggccgaagcgggaagactgcttgagaccaggagttcaagaccattcaaagtggtgagactgcacgcatgagccaccatgctcagccagattttgtttctttgtgaacctgcactgctgttaggaaactgtaagtcttatcacctcccgaatctacaaaagcctctgtgtaggtatcttcaccagcaaggcttggccaatagcggatagatccttctctggnggcaaccatgacagcaacagncttaaaacaggatcacaccattagcattcncattaaaagaggaacccaaaanccaccagtctgatggcaatggatccaaggaaccgggncanttactntttggaccana

SEQ ID NO: 6748 - DNA, 539 bp, Homo sapiens
  misc_feature (518)..(518): "n" may be a, t, c, g, other or unknown
  misc_feature (537)..(537): "n" may be a, t, c, g, other or unknown
aagttttgcagagatagggtctcgctatgttgctcaggctgcttttgaactcctggccttgagcaatcctcctgagtcagcctcccaaagcagccacggtgcccagcctcaattaagttttcaacagtgaattggacttaaattgtcttctgtttacaatggctgaaatccatttaaattctcttggtggtcctttgttgattcctggagatttttgtactgtacttgcctcattcctacacatactttaattgaataaaatgggagaatgcattttcccaagtgcctaaagtgactgtggaaataaccagggagagttactattttcagtctacaacatatcatattcagatacatatcattgtggacataatgaatgggaattctatatacctataattagtcaacataattttcttttcctccttatataatgattttatctgagcaccaagggggtcctttacatcaaataaactttatgacaatccaccaggccaatttactacctcaattanggcatggtacataaaaggnga

SEQ ID NO: 6749 - DNA, 544 bp, Homo sapiens
  misc_feature (473)..(473): "n" may be a, t, c, g, other or unknown
  misc_feature (479)..(479): "n" may be a, t, c, g, other or unknown
  misc_feature (503)..(503): "n" may be a, t, c, g, other or unknown
  misc_feature (506)..(506): "n" may be a, t, c, g, other or unknown
  misc_feature (520)..(520): "n" may be a, t, c, g, other or unknown
  misc_feature (522)..(522): "n" may be a, t, c, g, other or unknown
  misc_feature (530)..(530): "n" may be a, t, c, g, other or unknown
gagacggagtcttgctctgtcacccaggctggagcgcagtggtgcaatctcagctaactgcaagatctgcctcccgggttcacgccattctcctgcctcagcctcccgagtagctgggactacaggcgcctgccacctcgaccggctaattttttgtatttttagtagagatggggttttcaccgtgctagccaggatggtctcgatctcctgacctcgtggatccacctgcttcagtctcccaaagtgctgggattacaggcgtgagctaccgcacctggcctacaaatacataattttaattaacaacttcatttgtctgaaacctttttgtctaatttgttaggatatgaggctaatatgcttaataacatgttttacatgtttgcaacaaactgaacataaacagaaaatccacatctttgaaaagagctaaacacaaagaatgaatttacgtgagaaaaagtaatggntttcantaaaaagcagtcaatgctttcttntgngcttggaaaatatntnaagcctanttttactggtttaa

SEQ ID NO: 6750 - DNA, 543 bp, Homo sapiens
  misc_feature (439)..(439): "n" may be a, t, c, g, other or unknown
  misc_feature (480)..(480): "n" may be a, t, c, g, other or unknown
  misc_feature (501)..(501): "n" may be a, t, c, g, other or unknown
  misc_feature (507)..(507): "n" may be a, t, c, g, other or unknown
  misc_feature (522)..(522): "n" may be a, t, c, g, other or unknown
  misc_feature (542)..(542): "n" may be a, t, c, g, other or unknown
gagacaaagtctcactcttgcccaggctggagtgcactggtgcgatctcggctccctgcaatgcctgactcccaggttcaagccattcttgtgcctcagcctcccaagtagctgggatttcaggcgtgagccactgcgcctgcccttgttacgatttttaaaagcttacctggttgtagtttaagcctcagatggtggttaccccagatattgcaagtgtcagctcttttggctgtttccagagaccagcctgtatttctgtgtccctgtctgtgttggtagggcatggagttgagtgtgggctgggtatccagttgtgggttgggaagctttgggggaaggaagataggttctttgaatacatacattagcttcattggtactaaaaccacccagattcagagaagtagtggacacccaggatgttgattggcttggnttgtaacgggtttttcatgagaaacatcctttggctactanggattggcacatttgggctgnttgcanctgaggcttgagcanctttttgatcaacagttttna

SEQ ID NO: 6751 - DNA, 547 bp, Homo sapiens
  misc_feature (479)..(479): "n" may be a, t, c, g, other or unknown
  misc_feature (517)..(517): "n" may be a, t, c, g, other or unknown
  misc_feature (530)..(531): "n" may be a, t, c, g, other or unknown
  misc_feature (536)..(536): "n" may be a, t, c, g, other or unknown
  misc_feature (547)..(547): "n" may be a, t, c, g, other or unknown
gagaaggagtcttgttccagcacccaggctggagagtagtggcacaatctcagctcactgcaacttccgcctccctagttcaagtgattctagtgcctcagcctcccaagtagctgggattacaggctcccaccaccacctccagctaatatttgtgtttttgttgttgttgttgttttattttttgagatggagtctcgctctgtcacccaggctgtgtatcaaaattcccatgaatatttgttatttttcccagaaaattgaccctacctagaaattacagaacttcaaaggcagcaaagagaactggtaaagtcttttttgatatggctcccagaaagtgacagaaagtgactcaattcaaaccatcatcaacactctatggggacataaggcttaacaaagaacttcacttaagtctatggtccttcttccaaacttaatgccggatctcagcctcatcacatattgaagactgnatcagaaaatggtaagtgctagcaccaataggcattangcagtagactcannttgangggagcttggn

SEQ ID NO: 6752 - DNA, 544 bp, Homo sapiens
  misc_feature (436)..(436): "n" may be a, t, c, g, other or unknown
  misc_feature (474)..(474): "n" may be a, t, c, g, other or unknown
  misc_feature (480)..(480): "n" may be a, t, c, g, other or unknown
  misc_feature (502)..(502): "n" may be a, t, c, g, other or unknown
  misc_feature (504)..(504): "n" may be a, t, c, g, other or unknown
  misc_feature (520)..(520): "n" may be a, t, c, g, other or unknown
  misc_feature (527)..(527): "n" may be a, t, c, g, other or unknown
  misc_feature (542)..(542): "n" may be a, t, c, g, other or unknown
atagagacagagtcttgctatgttgcccaagctgatcttgaactcctggcctcaagtgatcctccataagccaccacactcagcttaaactgtcttaagactaagatgcttagagagggaaaagtggtattacagtaagcttcttgggcatgacttactcacagactatctactctaaaatctaaaagaccctttttaaaagcgggatgaggtgactcttctaatttagtcagcatgagcaagaacaaacaaaacctataaactcaactattgaaagttacttcgaactttatactgaaaaagcactatacaaaaatttccatcggttattcctcatggtcacttttacaagatggtttgttcccaactggccaaatgacttcccttgttacccactgtatgcactatttcccttccgacagtgacgtccccttgnactctgtcaagtaggattaaaacttttcagactcaagnattttnccttttctcggggttttcaganantattaactggtctttnaaaaggnttaaaggccaaaatntt

SEQ ID NO: 6753 - DNA, 539 bp, Homo sapiens
  misc_feature (425)..(425): "n" may be a, t, c, g, other or unknown
ggctcatttctccatttattagaataaccacatttggagaggcatgaagcacttaagttttacatgactacaaagttatcacaaatctcaaactttttagccacagatatttcacctctgtttaaagaaaaagctttcaaaacatctgagttagcttaatacacagagaccctgaaatatatgggaactacatattttaaatgcttgtacttcctgctctaataatgtcttctttaaacggaatccagcataaaagggattgaaatgtataaggtcatgatgcaaatgctttggagatagtgaaactgatctgcacaacatggaaaaagatgtcatgtgcacagaagttctgcaaggattcactgagccatctgggcttccatggcttgtgctgtccattctggtgctggttgactaattttctncaaaagggtattccttggaaacaagtgattggactgcttatccacgttggcaggcttttcgggttcaaaaggactattcctcaatctgggcaataaatcctttcatccgtcctt

SEQ ID NO: 6754 - DNA, 550 bp, Homo sapiens
  misc_feature (534)..(534): "n" may be a, t, c, g, other or unknown
gtctaacatttatttttttctttttccccagaatcctgaaacacaatagtcttttagtagaagaggtttctgagttctttctaagcaactactctaaaaaatcagtagcttctaggtggaatcatacagtttccataaatggtcttattttccttttctggttgaaatttaacccaaagaactttaaggtctaatgtgatgcagtatttacatacaaaactcttaattcatcctgcaaaatggccaatatgagcagataaataggaaagctatgcatctaataaagcacagggccagtgctctataaagattattgagttgtaaacataagatatctattcaaaagagaccactgaaatggttggggccaggttaggccaaaacttaatgcattaatgtaaacattatcagtatgtttacgtacctggtgccataccacacagaagctttccaattcctaccacagggaggttttcttctcttaacaccaggaatcttggtcaaaccccaagggtggaatttcaattggaagcntttcaaacactggatt

SEQ ID NO: 6755 - DNA, 536 bp, Homo sapiens
  misc_feature (472)..(472): "n" may be a, t, c, g, other or unknown
  misc_feature (498)..(498): "n" may be a, t, c, g, other or unknown
  misc_feature (523)..(523): "n" may be a, t, c, g, other or unknown
ctaaacttctcttcttgcttcatttcattcatttgatcttgaatcactgataccctttcttccacttgatcaaatcggctactgaagcttgtgcatgtgtgacgtagttcttgtgccatggtttcagctccatcaggtcatttaaggtcttctctatgctgtttattctagttagccactcatctaatcttttttcaaggtttttagcttctttgcgatgggtttgaacctcatcctttagctcagagaagtttgttattagcgatcatctgaagcctacttctgtcagctcgtcaaagtcattctccgtccagctttgttccattgctagcagggagctgcattcctttggaggagaagaggtgctctgatttttagaattttcagtttttctgctctggtttctccccatctttggggttcatctacctttggcctttgatgatggtgacgacagatggggttttggggnggatgtccttctcttggtagtttccntttaacagcaggatcctaactggangtctggtggaagt

SEQ ID NO: 6756 - DNA, 557 bp, Homo sapiens
  misc_feature (458)..(458): "n" may be a, t, c, g, other or unknown
  misc_feature (496)..(496): "n" may be a, t, c, g, other or unknown
  misc_feature (500)..(500): "n" may be a, t, c, g, other or unknown
  misc_feature (509)..(509): "n" may be a, t, c, g, other or unknown
  misc_feature (552)..(552): "n" may be a, t, c, g, other or unknown
gtcaattcagtctctcttgaagggcgacttctactttctgtgcaaatagttactcttcatcaggaccctgcatatttaagtaaatcacactaactgcattattttgcctctttggagtgttatacttggtctaccatgtgtacattaatccagaaatatgcattaaaacactgcacagctctgtgaacttgatgcactgagatttataaatagtcttctgaaaatccgcttatattcaaagacattatgctaaggcaaaatgtaagtaattaagggagggtgacgaattggaggtaataataaaaaatagtcatgtagaaaattataaataatgactaaggtgaaaaagaaaagtgaaagtactgaatgggtagaaagggaactcaattttggttctaagcattagtatgaaaagggcctaatgccataataaccccattccaatgcttactacctgngggtactggtaaggtactatacttcattaagccttacnttcntggaccggnaaaatggcataataggatcttctgcaaaggctatcctggtttnggaac

SEQ ID NO: 6757 - DNA, 459 bp, Homo sapiens
  misc_feature (130)..(130): "n" may be a, t, c, g, other or unknown
  misc_feature (205)..(205): "n" may be a, t, c, g, other or unknown
  misc_feature (210)..(210): "n" may be a, t, c, g, other or unknown
  misc_feature (261)..(261): "n" may be a, t, c, g, other or unknown
  misc_feature (363)..(364): "n" may be a, t, c, g, other or unknown
  misc_feature (391)..(391): "n" may be a, t, c, g, other or unknown
  misc_feature (410)..(410): "n" may be a, t, c, g, other or unknown
  misc_feature (414)..(414): "n" may be a, t, c, g, other or unknown
  misc_feature (420)..(420): "n" may be a, t, c, g, other or unknown
  misc_feature (428)..(428): "n" may be a, t, c, g, other or unknown
atataacacagtcagggacattttggtttttcagctgaaaccacaactagccaaagctggaaaacgttacatcaccatccatgattcaacaataacaaaaaggatgactatctaaagaagaatggtctanaaagcatcacttcatgctatgggttgaactgtgccctctaataacgttgttgaagtctaaccaccagtgccttanaatgngacctaatttggaaatagggttgttgcagatataattagttaagatgaggncatactggtgtagggtgggcccctaattcaatatgactgggtatcctcacaagaagacagcaatgtgaagaaacagggagaatgccccatgaaaagggaacnnagattggactggtgcattacaatccanggacatcaaagatggttancctnatgacngcttgganaaaggttggaatagatcttccttaaagctct

SEQ ID NO: 6758 - DNA, 550 bp, Homo sapiens
  misc_feature (284)..(284): "n" may be a, t, c, g, other or unknown
  misc_feature (433)..(433): "n" may be a, t, c, g, other or unknown
  misc_feature (436)..(436): "n" may be a, t, c, g, other or unknown
  misc_feature (443)..(443): "n" may be a, t, c, g, other or unknown
  misc_feature (459)..(459): "n" may be a, t, c, g, other or unknown
  misc_feature (482)..(482): "n" may be a, t, c, g, other or unknown
  misc_feature (495)..(495): "n" may be a, t, c, g, other or unknown
  misc_feature (528)..(528): "n" may be a, t, c, g, other or unknown
  misc_feature (547)..(547): "n" may be a, t, c, g, other or unknown
gagatggagtcgtgctcttgttgcccagcctggagtacaatggcacagcctcagctcactgcaacctccacttcccgggttcaagcgattgtcctgcctcagcctcccaagtagctgggattacaggtgcctgccatcacacctggctaatttttgtatttttagtagagacagggtttcgctgtgttggccaggctggtctcaaactcctgaccttgtgatctgcccgcctcgccctgccaaagtgctgggattacaggcgtgagccactgcgcctggctcanattctcctttcttaatattcacatatcacttgttataaacttttgcaatctacagaaggagcaggatataatacaaaaaaactaaaaaaaaaagttaaaaaaataaaaataaactttggggataattagataatctaagaaattctttnagnggttttnctaactgctggggatngttaaagggaaaagaagctcatnggaaattgaattnggtgcttgtggactgacaaggttaagttgggtncctaatggaggacttttanggc

SEQ ID NO: 6759 - DNA, 545 bp, Homo sapiens
  misc_feature (26)..(26): "n" may be a, t, c, g, other or unknown
  misc_feature (260)..(260): "n" may be a, t, c, g, other or unknown
  misc_feature (393)..(393): "n" may be a, t, c, g, other or unknown
  misc_feature (432)..(432): "n" may be a, t, c, g, other or unknown
  misc_feature (458)..(458): "n" may be a, t, c, g, other or unknown
  misc_feature (478)..(478): "n" may be a, t, c, g, other or unknown
  misc_feature (506)..(506): "n" may be a, t, c, g, other or unknown
  misc_feature (514)..(514): "n" may be a, t, c, g, other or unknown
  misc_feature (540)..(540): "n" may be a, t, c, g, other or unknown
  misc_feature (545)..(545): "n" may be a, t, c, g, other or unknown
agagcacaacaagttgcatttattgnttctgacaagtgcatagtaattttcagtttgctcatgttcctagcatcacaaatctgagttacaattttgcttctcaatgaaaaacatatactctgaaaagtgattaggaagttctaaaaattttagtcatttatagagtatcttaaaaatccttatcaagtaagatattaactttacctttataaatctttgtgtgaaatgaaaaaaaaatcaaggcatacaaatttcattgngttctacatttttaaataccatcctttgtctccgttaaaagattttcatccatttattcaaaaaccttttaagttcaactgtccaatttaagacagagtgaagacatttttgagtatctgaactaagcattgncttgactgaaacgaagtaagaactcaatgagagccttgngggcctccagtcatgccttttccganatagggacttcatctttggnggcatacgcctgctatggctaaaagggnccccttanggatgagttccaaatttttcaggaanctgcn

SEQ ID NO: 6760 - DNA, 549 bp, Homo sapiens
  misc_feature (396)..(396): "n" may be a, t, c, g, other or unknown
  misc_feature (459)..(459): "n" may be a, t, c, g, other or unknown
  misc_feature (475)..(475): "n" may be a, t, c, g, other or unknown
  misc_feature (544)..(544): "n" may be a, t, c, g, other or unknown
ctttctataaccttgaaagaatacctgcccttctctaaaatgattcaactagggctgcttaccaggcccacagaaagccctgctgccagccggccttcaaaatggattaaggatttggagttctcttcatttctccactcacaggatcaaagggtgcgggcgaggactgggaagcgggggaggaaatgcaagatggaacaggccccaagtttttaactggcataagagcaactgtggttcatcctaggctcagctgagctgcagggagcaggcccccatgatctgtacagcctgtgcccttgagaaataaacacaactgccagaaagcagcacgcttcagctactgctaatcccaggctacaagacaagcaggaaatcagaggtgccctgtgatgngttttccaaaaagcgtcagcaagtacacagagcaaggaggaaggggacagtccaatgcaaatncccaattggggttcanaacagggattaaagcttgaaccccagacagccccaaccgagggcccccaatgctcatcttagccttgantcctg

SEQ ID NO: 6761 - DNA, 428 bp, Homo sapiens
  misc_feature (36)..(36): "n" may be a, t, c, g, other or unknown
  misc_feature (44)..(44): "n" may be a, t, c, g, other or unknown
  misc_feature (359)..(359): "n" may be a, t, c, g, other or unknown
  misc_feature (403)..(403): "n" may be a, t, c, g, other or unknown
  misc_feature (409)..(409): "n" may be a, t, c, g, other or unknown
  misc_feature (411)..(411): "n" may be a, t, c, g, other or unknown
  misc_feature (413)..(413): "n" may be a, t, c, g, other or unknown
  misc_feature (415)..(416): "n" may be a, t, c, g, other or unknown
gaaagtttacatgtattctttaattctagacaccgnacaacagngacaaccaattacaataaaatcacaattgcttttagatgacagtactttcagatttctaatacccaattactttcatttccacaatgtcaactgcatgctgcattttcatttctatagagcagacaagcttccagactgcagaccaagtttcttgggtaataatactactatcttgatcatgaccacaggaaaccaattttatattccctgtactatagagatgagacattatttggtgtatatgaaactcttcagtggtggtgttcaagaatattcaaatagtagctgaaaatagggtttgctagagcagtccncatatttcattaaaagaaaaatgcccagtcaaaacatttagaantaaatntntngnncagcctttccct

SEQ ID NO: 6762 - DNA, 538 bp, Homo sapiens
  misc_feature (394)..(394): "n" may be a, t, c, g, other or unknown
  misc_feature (404)..(404): "n" may be a, t, c, g, other or unknown
  misc_feature (497)..(497): "n" may be a, t, c, g, other or unknown
  misc_feature (500)..(500): "n" may be a, t, c, g, other or unknown
  misc_feature (523)..(523): "n" may be a, t, c, g, other or unknown
gagaaggagtcttactctgttgcccaggttggagtgcagttgcacgatctcggctcactgcaacctctgcctcccgggtccaagcaattctcttgcctcagcctcctgagtaggtgggattacaggtgcatgtcaccgcacccaactaatttttgtatttttaggacaaaatttttgtatattttttgcatgttttttgtataattttgtatttttgtatatttcaccatgttggtcaggctggtcccaaactcctgaccttgtgatccgcctgcctcagtctcccaaagtgctgggactacaggcatgagccaccacgcctggcctaatatttttatactatacaagtataaagtgtcatacctatatgtgcatgtgtttaaggataaaatgngatatactgngtaaaacacctgaaataataaataccgggccttatacatatttgaccctttgaattaaaagacatgcttaaaaaaaaaactgccgggaattancangaaatagagctacccatcgatgnaattaaagaagaaag

SEQ ID NO: 6763 - DNA, 554 bp, Homo sapiens
  misc_feature (422)..(422): "n" may be a, t, c, g, other or unknown
  misc_feature (450)..(450): "n" may be a, t, c, g, other or unknown
  misc_feature (461)..(461): "n" may be a, t, c, g, other or unknown
  misc_feature (468)..(468): "n" may be a, t, c, g, other or unknown
  misc_feature (508)..(508): "n" may be a, t, c, g, other or unknown
  misc_feature (520)..(520): "n" may be a, t, c, g, other or unknown
  misc_feature (538)..(538): "n" may be a, t, c, g, other or unknown
gagacagagtctcactctgtcgcccaggctggaatgcaatagtgccatctcagctcactgcaacctccacctcccaggttcaagcaattctcccacctcagcctcccgagtagctgggattacaggaaccggccatcatgcccagctaatttttgtgtttttgtagagatggagtttcaccatgttggccaggctggtcttgaactcctgacctcaggtgatccacctgcctcagcctcccaaagtgttgggattacaggcgtgagccactgttcccggcaataatgcatatttttcaaaaacagcatttaacagtgggcatctgacaaatgtcagttttcctttactgggattttccacatgatctgtgtattggtgaggagcctcttaattgaaagtgacagaaacccagcatgtagtancttaggcacaaaccggattaatgggccnaggtaaggaanggctaanaggaactggctatgaaggatgctgaataggaacttcctgntggcagtacttntggccccatacttggggnccttcaacttccaagg

SEQ ID NO: 6764 - DNA, 551 bp, Homo sapiens
  misc_feature (484)..(484): "n" may be a, t, c, g, other or unknown
  misc_feature (499)..(499): "n" may be a, t, c, g, other or unknown
  misc_feature (522)..(522): "n" may be a, t, c, g, other or unknown
  misc_feature (541)..(541): "n" may be a, t, c, g, other or unknown
ggcatgaagggcatgatagtttatttttaaaaattgtaccacactgatcatgatgaccagcatacacatgataatggcttttctcttgggtttaacattgcagtagttttgcatactgcaatgtttcaataggaccaagaacgttagagaataaagatcttagatgaaaatgaacactaataattctagtgtcctcccccatagaattaatgtaaatcccgtatgaatcagtggcattataatgttatgtggttatgaagaatgaaatttctcttagaagtaggcagcatgaatttatacttacataagtataacttatacttccttgtactttcatctttagtttttataatttaagctatgtccaccctggctaaagtacaatcatacaatatacctcagataatttccatgctaccattgccaagtttaagtgattttactattaaaaaaaaaaaaatccaaccaccatcaaaattaagangccaattaaaggaanttttaaatcatttggaaagcatngggcctaattggccaatcngactcaacct

SEQ ID NO: 6765 - DNA, 543 bp, Homo sapiens
  misc_feature (157)..(157): "n" may be a, t, c, g, other or unknown
  misc_feature (320)..(320): "n" may be a, t, c, g, other or unknown
  misc_feature (411)..(411): "n" may be a, t, c, g, other or unknown
  misc_feature (433)..(433): "n" may be a, t, c, g, other or unknown
  misc_feature (507)..(507): "n" may be a, t, c, g, other or unknown
  misc_feature (509)..(509): "n" may be a, t, c, g, other or unknown
  misc_feature (535)..(535): "n" may be a, t, c, g, other or unknown
gagacggagtcttactctgctgcccagactggagtgcagtggcacgatctcagctcactgcaagctccacctcctgggttcacgccattctcctgcctcagcctcctgagtagctgggactacaggcacccgccaccacacctggctaattttttgngtttttagtagagacggggtttcagcgtgttagccaggatggtcttgatctcctgacctcatgatctgcccgcctcggcctcccaaagtgctgggattacaggcgtgagccaccgcgcccagatgacctaagaatatgttttatttacactctcttacactgnatattaggagtgggaggcatagagatcagttcaggttttgccaacagacagaaccaggttcacacccgtcacttccacacactggtgatgngctcaaggaagctgcttatctnccattaaggccatccattcaactgcaaaatgggggataatacccttaactgggctggttacaagttttaaatgnantaaaaaaaaatagcctcggatttggncataatac

SEQ ID NO: 6766 - DNA, 544 bp, Homo sapiens
  misc_feature (514)..(514): "n" may be a, t, c, g, other or unknown
  misc_feature (533)..(533): "n" may be a, t, c, g, other or unknown
actgtaaattaatggacattctgatttttatatcaagctcatgaactctgtaaatatgaacctgagacaaaaattaggtaactgtagaaatactaggctacagggtctataagtttcagactctttactatggtaaactactaagaaatgcaatctctatcctgagaggtccctttagagacagcaagtctcctttaccccaagagaggagatacctcagtatcatcattagcaatctcttcctttttgaaatctctagagtagaaagaagcaacaacgaaatgacaaaattctaattctgactctgctgtgctagcacttaatcctaagcaaattgctctatctcccttggtttcatttttcttatgtgtaaaatagagaaactggctggtgcagtggctcacgcccggcctattatgctattcttgatgtgcatggataactgaaagcagactactttctaaaaatattacttgagttgattttttgggggtttgattttagacccagtatnctaaaattttcctttaagncctataaaccc

SEQ ID NO: 6767 - DNA, 562 bp, Homo sapiens
  misc_feature (408)..(408): "n" may be a, t, c, g, other or unknown
  misc_feature (459)..(459): "n" may be a, t, c, g, other or unknown
  misc_feature (476)..(476): "n" may be a, t, c, g, other or unknown
  misc_feature (480)..(480): "n" may be a, t, c, g, other or unknown
  misc_feature (516)..(516): "n" may be a, t, c, g, other or unknown
  misc_feature (533)..(533): "n" may be a, t, c, g, other or unknown
  misc_feature (558)..(558): "n" may be a, t, c, g, other or unknown
  misc_feature (562)..(562): "n" may be a, t, c, g, other or unknown
aatggtaaactgaatttatttcctcttggaaaacaattccagtaatctccaggttcagactgcagagtaaacattaataacagtaacatacaggttagttcaactgattcaagaatttggctgcgtgaaatcattaaggaaaaccttgaacactcaaagcttcaaatgtatccagggaaaaaaaaattctttgacagtctacataacaactattgcatatatagtgatgctacctgtcacattgcaaggcttacaaatatatatatacgggccttatccagctgtggggttctgttctgtgagaacatctcttcatggtttgcaagaatcttcagcaataaaaaatagtcttggatttaagcgctgatatacctaaagagaaattctaggcttaagtgtaaagaaaanggaagtccaacccttagtctcatgtataacagttggttttaatctttcttncttaaaaatccttatcntaanccattttgggcataggctttttttttttaaacttgnctgaatagggcccaagncccttggctttataagaacctttangtcn

SEQ ID NO: 6768 - DNA, 586 bp, Homo sapiens
  misc_feature (428)..(428): "n" may be a, t, c, g, other or unknown
  misc_feature (465)..(465): "n" may be a, t, c, g, other or unknown
  misc_feature (557)..(558): "n" may be a, t, c, g, other or unknown
  misc_feature (562)..(562): "n" may be a, t, c, g, other or unknown
  misc_feature (565)..(565): "n" may be a, t, c, g, other or unknown
gtagagacaggatatccctatgttagtcaggctggtcttctcaaagtcctgggctcaagcaatcctcccagccttccaaagtgctgggatcataggcatgagccattgtacccagcccattctctttttttaatagaagcttattattccactggaaagctgtatcataatttatgtaaccagttatatttagattgtttggtcctttttttttttttaacagataataccataatgacaatctagtccatatgttattctgcatgtacaagagtatctgtaggataaattcccggaagtggaatttctggggcaaaagatatatatatgccaaagatattgccaaattgaattccatactttcaccaagacagttttataattttattatttttgccagctcatagattttaaaaaaggcttctcangggaagtttaaatttgccatttaattttgaagtggantggagaaatctttcctatatttcaaaggatggttaaggtaatttttaaaatttccatgggaaaaattttaatccacctttcctaaaaggggnnggtnaanctattttcttaattgggggcc

SEQ ID NO: 6769 - DNA, 553 bp, Homo sapiens
  misc_feature (504)..(505): "n" may be a, t, c, g, other or unknown
aagctctgttctgctggctgctcaacgtgattcaggccatttttgaataaatccctccgtgtgccagctatcacattcaaatttgaatcctaggatgtgaaggccataataaaagcagaaaacactttttcccaaaaaccacaataaataattttcaaaccagacattgtacaattttaaattatttttcaagtaaaatctacctacatggtaaatttcatttattcaggtgaaattaagtctttgttggtgagcctttagccacaagaagagaaacaagtaatacccaagtgtagtagggaatagagtaactttgtctcccctaatgccatgcccattagctggggtaagcctgacaatgtcttgccccttaccatggtcaagcccccactcaggagccccccgcctgctccatcaagccatgggtcatgcccacaggcatgtccaatgtctggaccccatactgggctgaaaactggcatcctgtgaagaggaaggtctgcnngtcatcaaagtgggcaacccctttgagacagccatggagggtcagaat

SEQ ID NO: 6770 - DNA, 529 bp, Homo sapiens
  misc_feature (293)..(293): "n" may be a, t, c, g, other or unknown
  misc_feature (440)..(440): "n" may be a, t, c, g, other or unknown
  misc_feature (465)..(465): "n" may be a, t, c, g, other or unknown
  misc_feature (469)..(469): "n" may be a, t, c, g, other or unknown
  misc_feature (471)..(471): "n" may be a, t, c, g, other or unknown
  misc_feature (485)..(485): "n" may be a, t, c, g, other or unknown
  misc_feature (525)..(525): "n" may be a, t, c, g, other or unknown
  misc_feature (528)..(528): "n" may be a, t, c, g, other or unknown
cttttttttttttttttctgaggcagagttttgctcttgttgcccaggctggagtgcaatggcgcaatctcggctctctgcaacctccgcctcccaggttcaagccattctcctgccttagcctcccgagtagctgggattacaggcatgcaccaccacgcccggctaattttgtatttttagtagagacagtgtttctccatgttggtcaggctggtctggaactctcgacctcaggtgatccgcccgcctcagcctcccaaagtgctgggattacagacgtgaaccaccgngtccggcccacaagctaaattttgaagtattagatcctttcttaaacttttgctcttcggattgtcaatgtcaaagatagtttccagggggaccaaattgggccccaaaactggttattaaaataaagccttaacttttattggtgngcatttctttctgaaaacaattttnactngnttaccgtggttagnaaaaataagcttctggctattggaattttaaaactcaaanttnt

SEQ ID NO: 6771 - DNA, 557 bp, Homo sapiens
  misc_feature (425)..(425): "n" may be a, t, c, g, other or unknown
  misc_feature (451)..(451): "n" may be a, t, c, g, other or unknown
  misc_feature (470)..(470): "n" may be a, t, c, g, other or unknown
  misc_feature (494)..(494): "n" may be a, t, c, g, other or unknown
aagagacagcctagctctgtcacccaggccgagtgcagtgttgtgatcacagcgcactacaacctcaaaatccgggacttaagtgatcctcctgcctcagcttgccaaactgctaggattattgaggtgatcggctgcactcaactccatttttttcatcagcctttttgtcaaggactgatgagccctgccttctggaaacattcttgataatcatgacattaattttctgattcccctctaacctctgaactcccctctcacttttctaaagcgctttcttttcctgctaatctgtcagggcccagaaacaaatcaacaggagttcccattggagtggtatgaaaagagagatgcatttcagggaagggtttagatacgtgaggtccatagtggctttactaagcattaatgggtggtgaaanggagaaagcaaagtcacaatccgatncaaatctagaagaaaatcntagttggtggattaacaagttgtnggcccttgcaatgtacccggaaaataatgccttacttccaaagcatggctttcaaacctactt

SEQ ID NO: 6772 - DNA, 563 bp, Homo sapiens
  misc_feature (441)..(441): "n" may be a, t, c, g, other or unknown
  misc_feature (453)..(453): "n" may be a, t, c, g, other or unknown
  misc_feature (479)..(479): "n" may be a, t, c, g, other or unknown
  misc_feature (504)..(504): "n" may be a, t, c, g, other or unknown
  misc_feature (533)..(533): "n" may be a, t, c, g, other or unknown
  misc_feature (544)..(544): "n" may be a, t, c, g, other or unknown
  misc_feature (548)..(548): "n" may be a, t, c, g, other or unknown
  misc_feature (559)..(559): "n" may be a, t, c, g, other or unknown
gagatggagtctccctctgtcacccaggctggagtgcagtggggctatctgggctcactgcaacctgtacctcccaggttcaagggattctcctgcctcaacctcccaagtagctggaattactggcatgcaccaccatgccctgctaatttttatatttttagtagagacgaggtttcaccatgttgcccaggctgatctcaaaaacgtccgcctcggctcaagtgatatgcctgccttggcctcccaaagtgctgagattacaggcgtgagcccttgtgcccagccacctttcttaacaaagtcaaaaaaaaatcttccttcttagaagtattgcccaagataaaatgaacatcaagtccatgtaaattaggctggtttcaaacttggctaaagaaactcttttctatctttaattttctacgtgggtgacagaagganggaaaaatgaanaaggaaagcaagtgcttgggtggtgngaaccttttgcttttttttcctggnaaaggcttctggggtttggggtccttggnctaccttggangccnctgggggtaanactt

SEQ ID NO: 6773 - DNA, 556 bp, Homo sapiens
  misc_feature (422)..(422): "n" may be a, t, c, g, other or unknown
  misc_feature (445)..(445): "n" may be a, t, c, g, other or unknown
  misc_feature (495)..(495): "n" may be a, t, c, g, other or unknown
  misc_feature (516)..(516): "n" may be a, t, c, g, other or unknown
  misc_feature (538)..(538): "n" may be a, t, c, g, other or unknown
  misc_feature (547)..(547): "n" may be a, t, c, g, other or unknown
gagatggagactcgctctgtagcccaggctggagtgcagtggcatgatcttggctcaatgcaacctctgcctcctgggttcaagcgattctcctgcctcagcctcctgagtggctgggactacaggtgcacgccagcacacccggctaatttttgtattctgaatagagacggggtttcaccatattggtcaggctggtgtcgaactcctgacctcaggcgatccgcctgcctcggcctcccaaagtgataggattacaagagtgagccacagcgcctggcctggacatggtggacttttgctatccaacatctattttccccatttctgatagaagcaacccagttttgcaaatgaaaataacttatctccataggctgggttaaacattttactcaaactgggacatttgaaccgtttgnccatggaatttgaatctcaagcngaaaaagaccgaaaaagggttgaagttggcttatccaccgggggaccctnttcagaaatgtgggtttaagntccttcaacaagaagcccaaanctggccaanggtccacct

SEQ ID NO: 6774 - DNA, 547 bp, Homo sapiens
  misc_feature (436)..(436): "n" may be a, t, c, g, other or unknown
  misc_feature (471)..(471): "n" may be a, t, c, g, other or unknown
  misc_feature (475)..(475): "n" may be a, t, c, g, other or unknown
  misc_feature (482)..(482): "n" may be a, t, c, g, other or unknown
  misc_feature (513)..(513): "n" may be a, t, c, g, other or unknown
  misc_feature (521)..(521): "n" may be a, t, c, g, other or unknown
  misc_feature (526)..(526): "n" may be a, t, c, g, other or unknown
  misc_feature (546)..(546): "n" may be a, t, c, g, other or unknown
aagacagggtctcccactgtcacccaggttggggcagtggtgtaatcatagttcactgcgcccctgaactcctggcctcaagcaatcctcccaagtcagcctccagagtagttgggactataggcacacacaaccacacccggctaacactaggtatttctaacatactgatgcacattgtttgaaaattaatcttagggccgggcacagtggctcacacctgtaatcccagcattctggggggccgaggcgggtggatcacttgaggtcaggagtgcgagaccagcctggccaacatggtgaaaccccatctctactaaaaatacaaaaattagtcgggcatggtggcatgcacctgcaatcccagctatctgagaggcagagacaggtgaacccaggaggcagatgttgcagtgagctgagattacaccactgnattccagcctaaggggacagaagcgaggactccgncttnaaataantaaataaagtaagtaagtaagtaaatcttangaagtttngctangcattggaacttccgtctgng

SEQ ID NO: 6775 - DNA, 554 bp, Homo sapiens
  misc_feature (459)..(459): "n" may be a, t, c, g, other or unknown
  misc_feature (479)..(479): "n" may be a, t, c, g, other or unknown
  misc_feature (528)..(528): "n" may be a, t, c, g, other or unknown
  misc_feature (530)..(530): "n" may be a, t, c, g, other or unknown
  misc_feature (541)..(541): "n" may be a, t, c, g, other or unknown
  misc_feature (546)..(546): "n" may be a, t, c, g, other or unknown
aagaaagatgatctcgctatgctgcctaggctggccttgaacccctgggctcaagcaatcctgctacactatgaggagttgcaaatacaggtatgtgccaccacatccagcttcttaaaattttaatctcttttgcttacattatcaatctgtttttgcatactgtctactttttcccttaaagccctcagcacgttaatcatagttttaaaaaaatacctggtctgattactccaacactcctgccacgactgactctggttctaatgcttgttcagtctcttcaaactgcattttctgccttttaagtatgctttgtaattttctgttgataggtagacatgatacactgggtaaaaggaattgcagtaaacagggctttcatcctgttttcaggtgttggggtgggaaaagtgttctatgatactatgagcagggctcaagtcttgctgaacttgngtccctgggctatgaacttnccaagtgcttttcaactttccccaactgcattaagggggacagaatatncngaagtactagnggtanggatttcc

SEQ ID NO: 6776 - DNA, 494 bp, Homo sapiens
  misc_feature (422)..(422): "n" may be a, t, c, g, other or unknown
  misc_feature (458)..(458): "n" may be a, t, c, g, other or unknown
  misc_feature (464)..(464): "n" may be a, t, c, g, other or unknown
  misc_feature (466)..(466): "n" may be a, t, c, g, other or unknown
  misc_feature (468)..(468): "n" may be a, t, c, g, other or unknown
  misc_feature (479)..(479): "n" may be a, t, c, g, other or unknown
  misc_feature (485)..(485): "n" may be a, t, c, g, other or unknown
gagcctgttgcccaggctggagtgcagtggcgcgatcttggctcactgcaagctctgcctcctgggttcacgccattcccctgcttcagccttccgagcagctgggaccacaggcacccgccaccatgcctggctaattttttgtatatttagtagaggcagggtttcaccgtgttagccaggatagtctcgatctcctgacctagtgatctgcccacctcgggctcccaaagtgctgggactacaggcgtgagataccgtgctcagccatcaaacccatcttataaatcaacaggttgacacagcgtaagagggatggtgaagacttcctcacacatggacccatacatttattcattcaacaaaaacctactgggcacattttatgtcaaagcacagtgcacaagctgtgaacaaggganaaataatccttgctctatgggtaacacagaccattntgaaangncntgacttggggnaaggtntggatcttg

SEQ ID NO: 6777 - DNA, 555 bp, Homo sapiens
  misc_feature (369)..(369): "n" may be a, t, c, g, other or unknown
  misc_feature (421)..(421): "n" may be a, t, c, g, other or unknown
  misc_feature (485)..(485): "n" may be a, t, c, g, other or unknown
  misc_feature (497)..(497): "n" may be a, t, c, g, other or unknown
  misc_feature (520)..(520): "n" may be a, t, c, g, other or unknown
  misc_feature (524)..(524): "n" may be a, t, c, g, other or unknown
  misc_feature (549)..(549): "n" may be a, t, c, g, other or unknown
gaaaccaggctggagtgcagtggcatgatctcagctcactgcaacctccacttcctggactcaagcaatcctcccacctcagcctcccaagtaacaggaaccacaggcacgtgccaccatgcttggctaatttttgtgtgattttttttttttttttgtagagacaaggtttcaccatgctgcccaggatggtctggaactcctggcctcaggtgatctgcctacctcagtctcccaaagtgtcgggattataggcatgagccacagttcctggcccaaattcttttttcccccccatagaaagcagaaaaataatttattccgaaagacggcagaaataataaattcatcctgaaaatacagtaaggngtaattctgttgagacagctcttccctctgaaaatgctctcctactgactgncccactggagtattacttggcttgcagcaatttctaaacacttcattgggtcccatgtgaaaangcaggagccatntttaaaagcccagatttcaaggnggcngtacatatttttcaaaaaagacaantttttt

SEQ ID NO: 6778 - DNA, 539 bp, Homo sapiens
  misc_feature (403)..(403): "n" may be a, t, c, g, other or unknown
  misc_feature (467)..(467): "n" may be a, t, c, g, other or unknown
  misc_feature (476)..(476): "n" may be a, t, c, g, other or unknown
  misc_feature (484)..(484): "n" may be a, t, c, g, other or unknown
  misc_feature (504)..(504): "n" may be a, t, c, g, other or unknown
  misc_feature (507)..(507): "n" may be a, t, c, g, other or unknown
  misc_feature (509)..(509): "n" may be a, t, c, g, other or unknown
  misc_feature (531)..(531): "n" may be a, t, c, g, other or unknown
gtagagatgaggtctcacaaagttgcccaggatggtctcgatctcctgacctcgtgatccgcccgcctaggcctcccaaagtgctgggattacaggcgtgagccaccgcgcccggccggcttacatcttaatgagcccacagctgcctgttgacctggtgtcatcacgagggtgatcactatttccagcaagctctttgtccctcaaagcccagggatcaggggcagcccgtggaagacgagccactggttccagcgaggcacaaggagagaggttaagctgcttctaccctgttcaactgtgatgagattccagtgaaaatcagcattgagggcctcaggtgtttgcagggggctctggtatgttagaaaaactagagggaggggtctgcctttgtgtctgnttgtgaaccgtgtctactcaagtaggaaaggggagcacagatttttacaaaatagatgtgggcnggttcttgnaatcttgnctaactgaaaccatgtttgncananaatacttggaattacctaatangggctttg

SEQ ID NO: 6779 - DNA, 549 bp, Homo sapiens
  misc_feature (414)..(414): "n" may be a, t, c, g, other or unknown
  misc_feature (418)..(418): "n" may be a, t, c, g, other or unknown
  misc_feature (487)..(487): "n" may be a, t, c, g, other or unknown
  misc_feature (498)..(498): "n" may be a, t, c, g, other or unknown
  misc_feature (513)..(513): "n" may be a, t, c, g, other or unknown
  misc_feature (519)..(519): "n" may be a, t, c, g, other or unknown
  misc_feature (528)..(528): "n" may be a, t, c, g, other or unknown
  misc_feature (532)..(532): "n" may be a, t, c, g, other or unknown
  misc_feature (536)..(536): "n" may be a, t, c, g, other or unknown
ggagacggagtcttgctctgtcaccaggctggagtgcagtggtgctcactgcaacctccgcctcctgggttcaagcaactctcgtgcctcagcctcctgggtagctgggtttacaggcaggcaccatcacacccagctaatttttgtatttttagtagagttgggatttcactatgttggccaggatggtctggatatcctgacctcgtaatctgctcacctcagcctcccattcatctctttatgtaatcactcaataagcatttattcactgcctcttatatgtttcaggcactgtgtaaggggctaaggattcaaaatcaaataaacctcttttcctgatattggttctttgtcttcatacacttggcataactgtggagatgaagtttttgtacataaactgaaatgaantggncttcattataatgattggtaaaagggtgatggtttggcttctgataaactaacttgagaaaaacttggnacctcactggnaaactctgacttggngaactntttcctaangggncctnaaagggggggccc

SEQ ID NO: 6780 - DNA, 544 bp, Homo sapiens
  misc_feature (444)..(444): "n" may be a, t, c, g, other or unknown
  misc_feature (454)..(454): "n" may be a, t, c, g, other or unknown
  misc_feature (464)..(464): "n" may be a, t, c, g, other or unknown
  misc_feature (522)..(522): "n" may be a, t, c, g, other or unknown
gagatcgcctcaccctgtaacccaggctgacagaagcagtggcacaaacacggctcactgcagcctcgacttcctgggctccagcaatcctccaacctcagcttcccaagtagctgggactacagaagcatgccaccatgttaggctaatttttattttttgtagagaaagagttttgccacgtttcccaggtcagacttgaactcctgggctcaaaccatccacctgcctcagcctcctaaattgctgggattgtaggcatgagccaccacacctggcccattactaaatttctgaactgaagcttttagtcccatttttatgtgttagggaaactgagtcttggagagactaagatacatttcagtggtcacaaaagctcataagcaaacttgtagagtgaggatctgaaattaagggtatctagctctgacttaccacttncacccttggnacctgacttnttaaaaccttaaagggactttaagcctaatagtagcccttaaattttgggaaaaatancagtttggactggctggcacgg

SEQ ID NO: 6781 - DNA, 536 bp, Homo sapiens
  misc_feature (216)..(216): "n" may be a, t, c, g, other or unknown
  misc_feature (401)..(401): "n" may be a, t, c, g, other or unknown
  misc_feature (436)..(436): "n" may be a, t, c, g, other or unknown
  misc_feature (445)..(445): "n" may be a, t, c, g, other or unknown
  misc_feature (463)..(463): "n" may be a, t, c, g, other or unknown
  misc_feature (498)..(498): "n" may be a, t, c, g, other or unknown
  misc_feature (504)..(504): "n" may be a, t, c, g, other or unknown
  misc_feature (506)..(506): "n" may be a, t, c, g, other or unknown
aaattgttggtagagacagggtctctttatgttgcccaggctggtcttgaattcctggcctcaagtgatccttctacttcagccttttaaagtgctgggattataggcatgagccaccaacccagctgcttgtaacattcttgaaatgttgactccattggagtgaccagcagagcttgccatgcctcccgatctgtactctttgctgtagtttanatatttgtccgcttcaaatctcatgttgaaatctgatccccagtgttggaagtcgggtttagtgggaggtgtttggatcataaggatggatccctcataaatagattaatgccctgccatggtgagagtagtgagtgagttctctattagttttcccaagagctggttttttaaaagagcccggngcttccctctctctcttgcttcctctctaccctgngatctctgnacacactggcttcccttnccctttgccatgagtggaacaaccttcagccttanctgagnanaaaccggggctgattttggacaagccataa

SEQ ID NO: 6782 - DNA, 558 bp, Homo sapiens
  misc_feature (483)..(483): "n" may be a, t, c, g, other or unknown
  misc_feature (485)..(485): "n" may be a, t, c, g, other or unknown
  misc_feature (496)..(496): "n" may be a, t, c, g, other or unknown
  misc_feature (518)..(518): "n" may be a, t, c, g, other or unknown
  misc_feature (539)..(539): "n" may be a, t, c, g, other or unknown
  misc_feature (549)..(549): "n" may be a, t, c, g, other or unknown
  misc_feature (557)..(557): "n" may be a, t, c, g, other or unknown
caataaataattccactttaatggcaaagtaataatttagacagatacagggtgcacatttgcaaaaaaatatatgcaagctggtttacaagctagaggaacaataaaccaatagaaaatacatcatccagttaagtccattgacaccaagtacttattgttggggctttacaaagactacaaaacttttcagatgatttatttcactgtttctgcctatttacatgatatgttacatcaaaatgtacaaaatataaaatgtatacagacaaatgtttcacaaactagtttaagttgtaaactaggtggacctactggggtgtattgcaggaaattctgtttatgctcatgtttggactgtgtttctcaaaatggcagggaaagattagcaattttcttagatcacatattatacaagggaaactagtcactcatccagctacatatattggatggttcacaacagatttgaccatggttgangntttaaaggcanggggacaattctatggggcctnaaatcagtcggattcccttanggcaatagcnccgggtang

SEQ ID NO: 6783 - DNA, 557 bp, Homo sapiens
  misc_feature (131)..(131): "n" may be a, t, c, g, other or unknown
  misc_feature (497)..(497): "n" may be a, t, c, g, other or unknown
  misc_feature (551)..(551): "n" may be a, t, c, g, other or unknown
gtcttcctcttttttttttttttttttttggagacaaggtcttgctctctcacccaggctggagagcagcggcattatcactgctcactgcaaactcaactttctgggctcaagccattctcccacctcanacccccaggtaactgggaccaaagacacacattatcacacctagctaaattttttcatagagatggggtttcgccatgttgcctaggctggtctcaaactctcctgagctcaagtgacctgcctgcctcagcctccttaagtgctaggactataggtgtgagccaccataaccagcctctatcatcttttatcctaaactcccatgtaataaatattggatcttcttcctttattaagcatgcatgtgtctaacctctctggttttccatcttccttctctggtccatattctgagtaattatttcggatctatatttcaaatcacttaatttctcctaagctggttctaaacagctacttaacanttgcattaaaataatcctttaacctccttttaagcaactttattgggacaaacntataaa

SEQ ID NO: 6784 - DNA, 563 bp, Homo sapiens
  misc_feature (177)..(177): "n" may be a, t, c, g, other or unknown
  misc_feature (365)..(365): "n" may be a, t, c, g, other or unknown
  misc_feature (393)..(393): "n" may be a, t, c, g, other or unknown
  misc_feature (419)..(419): "n" may be a, t, c, g, other or unknown
  misc_feature (472)..(472): "n" may be a, t, c, g, other or unknown
  misc_feature (485)..(485): "n" may be a, t, c, g, other or unknown
  misc_feature (511)..(511): "n" may be a, t, c, g, other or unknown
  misc_feature (515)..(515): "n" may be a, t, c, g, other or unknown
  misc_feature (525)..(525): "n" may be a, t, c, g, other or unknown
  misc_feature (545)..(545): "n" may be a, t, c, g, other or unknown
  misc_feature (562)..(562): "n" may be a, t, c, g, other or unknown
aggcttttttttttttttagagcagttttaggttcacagcaaaagtgagtagaagtacagagttcccacacacctcctcccaccacacaggcacagggtcccttactaccatcatcccacatcagactggtacatgtgtaactgatgaccctacacggacatgtcattattgcttanagttcatagtccatacgagggttcacacttcggagtgcacattctgtgggtctggacaagtgcacagtgacatgcatccgccagtgtaatatcacacagagtagtttcaccgccctgaaatcctccctgttccaccttttcatccctctgtcctcccagcccctggcaaccactgacctttttactgnctccatagttttaacttttctagaatgncatatagttggaatcaaacaataggnagtcttttcagagtggcctctttcacttaagtaatatgcatggaaaggttctncatggctctttgngacctgatggctcaattaattctagncctnaaaaaaaatncattaagttttggctattcncctactggaaggacttnt

SEQ ID NO: 6785 - DNA, 514 bp, Homo sapiens
  misc_feature (139)..(139): "n" may be a, t, c, g, other or unknown
  misc_feature (157)..(157): "n" may be a, t, c, g, other or unknown
  misc_feature (170)..(170): "n" may be a, t, c, g, other or unknown
  misc_feature (185)..(185): "n" may be a, t, c, g, other or unknown
  misc_feature (188)..(188): "n" may be a, t, c, g, other or unknown
  misc_feature (221)..(221): "n" may be a, t, c, g, other or unknown
  misc_feature (234)..(234): "n" may be a, t, c, g, other or unknown
  misc_feature (255)..(255): "n" may be a, t, c, g, other or unknown
  misc_feature (271)..(271): "n" may be a, t, c, g, other or unknown
  misc_feature (290)..(290): "n" may be a, t, c, g, other or unknown
  misc_feature (319)..(319): "n" may be a, t, c, g, other or unknown
  misc_feature (336)..(336): "n" may be a, t, c, g, other or unknown
  misc_feature (347)..(347): "n" may be a, t, c, g, other or unknown
  misc_feature (361)..(361): "n" may be a, t, c, g, other or unknown
  misc_feature (387)..(387): "n" may be a, t, c, g, other or unknown
  misc_feature (404)..(404): "n" may be a, t, c, g, other or unknown
  misc_feature (434)..(434): "n" may be a, t, c, g, other or unknown
  misc_feature (453)..(453): "n" may be a, t, c, g, other or unknown
  misc_feature (456)..(456): "n" may be a, t, c, g, other or unknown
  misc_feature (471)..(471): "n" may be a, t, c, g, other or unknown
  misc_feature (508)..(508): "n" may be a, t, c, g, other or unknown
  misc_feature (510)..(510): "n" may be a, t, c, g, other or unknown
  misc_feature (512)..(512): "n" may be a, t, c, g, other or unknown
gagacggagtctcactctgtcgcccaggctggagtgctgtggcgtgatctccgctcactgcaagctccgcctcccgggttcaggccattctcctgcctcagcctcccgagtagctgggactacaggcgcccgccactgngcccagctaattttctgnatttttagtaganacggggtttcaccgnggnctccatctcctgacctcgtgatctgcccacctnggcctcccaaagngctgggattccatttaaaggnatgcatttctgatacngaaagagctttctcatgancctgaaacaatgttaataccatgcaatgntatatcactgattatgnttcactaatgntggctgaaattggncaaaaagttttttggaaatccttacnaagatcaaatatctaantcttctatggatctttctttttctctaaantttgaataaatatctaaangcnaagatgctgggccantgagggttacaagtctcttaatggaaggggcttaaancntnaa

SEQ ID NO: 6786 - DNA, 549 bp, Homo sapiens
  misc_feature (381)..(381): "n" may be a, t, c, g, other or unknown
  misc_feature (434)..(434): "n" may be a, t, c, g, other or unknown
  misc_feature (462)..(462): "n" may be a, t, c, g, other or unknown
  misc_feature (499)..(499): "n" may be a, t, c, g, other or unknown
  misc_feature (514)..(515): "n" may be a, t, c, g, other or unknown
  misc_feature (518)..(518): "n" may be a, t, c, g, other or unknown
  misc_feature (527)..(527): "n" may be a, t, c, g, other or unknown
  misc_feature (541)..(541): "n" may be a, t, c, g, other or unknown
agtttcaagatgtttattttgaaaaacgtgcttgtttatatgtaagcatcttcgtatctagcagctaatcagtattaattcttcattgtcatatcttgtatgttaacggtacttagttgataccaattctcttttggacctcatgcccaatactttttttttttttaatttccaacttttatttaaagttctggggtacatgtgcaggaagtgcaggtttgctacataggcaaatgtgtgccatggtggtttgctccacccatcacctaggtattaagcccagcatttattaggtattcttcctgatgctctccctcccctcttcccctcaacaggccccagtgtgtgttgttcccccatgtgcccatgtgttttctttgnttaagttcctacctataagtgagaacatgcggtgtttggttttctggtgctgngttaagtttgctgaggataacgagctanccatatttcaagggctcaatactatggtttgcttaangctaacttaatgggnnagngcttaaatngacatttcatcaangcaaaagt

SEQ ID NO: 6787 - DNA, 556 bp, Homo sapiens
  misc_feature (347)..(347): "n" may be a, t, c, g, other or unknown
  misc_feature (448)..(448): "n" may be a, t, c, g, other or unknown
  misc_feature (458)..(458): "n" may be a, t, c, g, other or unknown
  misc_feature (524)..(524): "n" may be a, t, c, g, other or unknown
  misc_feature (552)..(552): "n" may be a, t, c, g, other or unknown
  misc_feature (556)..(556): "n" may be a, t, c, g, other or unknown
agagcagttttaggttcacagcaaaagtgagtagaagtacagagttcccacacacctcctcccaccacacaggcacagggtcccttactaccatcatcccacatcagactggtacatgtgtaactgatgaccctacacggacatgtcattattgcttagagttcatagtccatacgagggttcacacttgggggtgcacattctgtgggtctggacaagtgcacagtgacatgcatccgccagtgtaatatcacacagagtagtttcaccgccctgaaatcctccctgttccaccttttcatccctctgtcctcccagcccctggcaaccactgacctttttactgnctccatagttttaacttttctagaatgtcatatagttggaatcaaacaataggtagtcttttcagagtggcctctttcacttagtaatatgcatggaaggnttctccatgnctctttgtgacgtgatggctcatttatttctagccctaaataatattccattaagttttggctatnccctattgaaggactttttgggtgcttncaan

SEQ ID NO: 6788 - DNA, 559 bp, Homo sapiens
  misc_feature (414)..(414): "n" may be a, t, c, g, other or unknown
  misc_feature (499)..(499): "n" may be a, t, c, g, other or unknown
  misc_feature (508)..(508): "n" may be a, t, c, g, other or unknown
  misc_feature (540)..(540): "n" may be a, t, c, g, other or unknown
  misc_feature (553)..(553): "n" may be a, t, c, g, other or unknown
agtagagacagcgtttcactatgttggccaggctggtctccaactcctgacattggcttatgttctttttaaaaagtttgatggtgagtagattttaattaaatggtgctttttattgaaattttctttaaaaataaaactctgtatttgtaatgtaagtcaggagtaaatacagattttggataaatgtctacacttcctaagtcaactctcagagtcacttttaagatcactctagctgtctggggtatccaacttgggaaattcagagcctcagtatttagaaagaaaatccttcctcaactttaatctgatgaaaagtaaatctttccttgaaagtcgatgatatgccacaaagttaaatgcgccatctggcaaaaggcaaattagaacaggttcaaaatttacaactgnctacaacattcaactatttggtcaaaatagaacctaattggcaattttgactttcacaccacacgaatgtacccgagaagttggnattccccanggcaatttttttttttagcgccaatgacaacnccattaccctaantttaag

SEQ ID NO: 6789 - DNA, 553 bp, Homo sapiens
  misc_feature (452)..(452): "n" may be a, t, c, g, other or unknown
  misc_feature (458)..(458): "n" may be a, t, c, g, other or unknown
  misc_feature (497)..(497): "n" may be a, t, c, g, other or unknown
  misc_feature (510)..(510): "n" may be a, t, c, g, other or unknown
  misc_feature (523)..(523): "n" may be a, t, c, g, other or unknown
  misc_feature (525)..(525): "n" may be a, t, c, g, other or unknown
  misc_feature (538)..(538): "n" may be a, t, c, g, other or unknown
gagacagaatctcactctgtcgccaggctggagtgcagtggcatggaatctcagctcactacaacctctgcctctcggattcaagcaatcctcctgcctcagcctcccaagtagctgggactacaggcacgtaccagcacatccagctaattttttgtatttttagtagagacagggtttcaccatgtttgccagatggtctcgatctcttgacctcgtgatctgcccacctcggcctcccgtagtgctgggattacaggcgtgagccactgcaaccagccagaatttaatattctttagctactttgactctaagtctgaaaagaatcattttagaacctgcaaaggcacaggaaataactaaaatccccaaggaaatatctaaaattggcctttaagcagaagagtaacataaacaatgctggcttctcctgatctctatctaagtcaanggtttnccaacctttttttctggctctacctatttacaagtgcangctacttccatcntggatatcttaancntttaattctccgnaagccagggggccta

SEQ ID NO: 6790 - DNA, 534 bp, Homo sapiens
  misc_feature (3)..(3): "n" may be a, t, c, g, other or unknown
  misc_feature (5)..(6): "n" may be a, t, c, g, other or unknown
  misc_feature (68)..(68): "n" may be a, t, c, g, other or unknown
  misc_feature (91)..(91): "n" may be a, t, c, g, other or unknown
  misc_feature (100)..(100): "n" may be a, t, c, g, other or unknown
  misc_feature (102)..(102): "n" may be a, t, c, g, other or unknown
  misc_feature (147)..(147): "n" may be a, t, c, g, other or unknown
  misc_feature (168)..(168): "n" may be a, t, c, g, other or unknown
  misc_feature (170)..(170): "n" may be a, t, c, g, other or unknown
  misc_feature (221)..(221): "n" may be a, t, c, g, other or unknown
  misc_feature (235)..(235): "n" may be a, t, c, g, other or unknown
  misc_feature (248)..(248): "n" may be a, t, c, g, other or unknown
  misc_feature (321)..(321): "n" may be a, t, c, g, other or unknown
  misc_feature (328)..(328): "n" may be a, t, c, g, other or unknown
  misc_feature (367)..(367): "n" may be a, t, c, g, other or unknown
  misc_feature (383)..(383): "n" may be a, t, c, g, other or unknown
  misc_feature (385)..(385): "n" may be a, t, c, g, other or unknown
  misc_feature (431)..(431): "n" may be a, t, c, g, other or unknown
  misc_feature (437)..(437): "n" may be a, t, c, g, other or unknown
  misc_feature (480)..(480): "n" may be a, t, c, g, other or unknown
  misc_feature (483)..(483): "n" may be a, t, c, g, other or unknown
  misc_feature (490)..(490): "n" may be a, t, c, g, other or unknown
  misc_feature (528)..(528): "n" may be a, t, c, g, other or unknown
  misc_feature (534)..(534): "n" may be a, t, c, g, other or unknown
gananngagtttcgctcttgttgcccaggctggagtgcaatggcgcgatcttggctcactgccatctntgcctcccgggttcaagcgattntcccgcctnancctcccgagtagctgggattacaggcatgcgccaccacgcccggntaatttttggatttttagtananacagggtttctccatgttattcaggctggtctcgaactcctgacctcacgngatccgcccgcctnggcctcccaaagngctgcgattacaggcgtgaaccaccgggcccggcctaaatgggcttttaaataacgtttttatttcagtcaanaaatagngtttggtatgtttggcaggctcttttttctcctttaggnctttccttacacaggngnttatttttgctttggctttctcttggaagttacaatgctattttgnaccttngccaccaaaacgtttttttccggctcatcttttatgaaggggnaanttttacnggctgactccattaaaggcattttggcctctaattttnaactcn

SEQ ID NO: 6791 - DNA, 531 bp, Homo sapiens
  misc_feature (437)..(438): "n" may be a, t, c, g, other or unknown
  misc_feature (460)..(460): "n" may be a, t, c, g, other or unknown
  misc_feature (473)..(473): "n" may be a, t, c, g, other or unknown
  misc_feature (486)..(486): "n" may be a, t, c, g, other or unknown
  misc_feature (497)..(497): "n" may be a, t, c, g, other or unknown
  misc_feature (502)..(502): "n" may be a, t, c, g, other or unknown
caaaagtcaccaaggcaaaaaaagttgcaagcaatcttggttactgagaatagaagtgtagtgaaatactaagtactatccttggcttggggattaaacctatataacaaaagtgaaaaggggtcatggtctaagagacacagaactattttagaagagttcaagttcacatggtagttacctctaggttcatcacactgcaatggcagaacaggcttgcagatacagacatgaacaatgcaccgagaatctggtattatcaaggactgggttgtaaaggcatcattagtatatgtacagagcttcaattccctaggcttttttaaagaaagtggtatttttatttattggtcaactcagaaataatttctcaaagtttattcagcttttaattaggaacttataccaatttttctaaccctggggagaaaaccatnngaaaaaaacccaacctatattncaactggtttttnaaagtccaccaantcaaggtcacnttttnggggcattttatttggaatccgacttaaa

SEQ ID NO: 6792 - DNA, 569 bp, Homo sapiens
  misc_feature (437)..(437): "n" may be a, t, c, g, other or unknown
  misc_feature (482)..(482): "n" may be a, t, c, g, other or unknown
  misc_feature (540)..(540): "n" may be a, t, c, g, other or unknown
  misc_feature (553)..(553): "n" may be a, t, c, g, other or unknown
gagcaacagacaggttttacattttatttccaggaaatgagatagtattttcacaaagaagaggtaagccatcctctcaaaatagacactgccttcagaggcagccatggggtacacccaacctatccaaaacaactgtcaacggaggtgtttccgaggtatcaagacagtaacaacaacaacaaattaaaaaaaaacagaagagaactcaaataactctttcgacatgtagtgaggcagagtctacgaagtaccctgaagcagttgggtgccgtgaatcctggtggtgcttcagccaatgatggcagcagggctggccaccgtggaaggcaagtgactgagggcttcctaactcaagtctctgtcccacaagacttctcagttgaccttcagagcagcggagtcacggctagagagaatcctccagaccatctcangctcgcactactgcagtctttcaaatgcccttagagcacggcttnagaacaatctctttgctttcgttccctaatgagaacaattcggcggtcttttactttntgagctcaaatanttaccatcttattaat

SEQ ID NO: 6793 - DNA, 555 bp, Homo sapiens
  misc_feature (446)..(446): "n" may be a, t, c, g, other or unknown
  misc_feature (450)..(450): "n" may be a, t, c, g, other or unknown
  misc_feature (466)..(466): "n" may be a, t, c, g, other or unknown
  misc_feature (534)..(534): "n" may be a, t, c, g, other or unknown
  misc_feature (554)..(554): "n" may be a, t, c, g, other or unknown
aaggaaccaacaagaaaacataagttgcatttattcacgtccacgccatctaaagctactgtgtacagtaatcaggactggagaagggacgatttagtatctaaaaacaacaaaaaaaacactgggacatgccccctgaattgcaagttggagttcgtaagaatctacttgctggcaagccggtttcctccctgagaagcacacttcccgcttccttctctccttccagcatcttctgtccctctcagttaaggcctggacagtgtgggatggtgttgcaatctctcctgcagagctgtcagtcgcccgtgggctcgggctgcgtgcactcaggctcccggtcgctgggctctgcgctccgccgccgcagctcctccaccgtctgcagcagggccgaccgctccagttctaaggtaagcatggcctgcttcagcttgctctactgntcangagcttctcaatgggnggcctcaaggcttggatcctaccatttggcacctggcaactggtcaaggaggcaaggtttggttgcgnaactgctgtgggtttctctna

SEQ ID NO: 6794 - DNA, 565 bp, Homo sapiens
  misc_feature (558)..(558): "n" may be a, t, c, g, other or unknown
  misc_feature (564)..(564): "n" may be a, t, c, g, other or unknown
agacagagtcttgctctgttgcccaggctggaatgtggtggtgcaatctctgctcactgcaacctacacctcccgggttcaagtgattctcctgcctcagcctcttaagcagctgggattacaggtgtgcaacaccatgcctgcctaattattgtatttttagtgtagacggggtttcaacatgttgggcaggctggtctcaaactcctggcctcaagtgatcctcccacctcagtttcccaaagtgctggaattacaggcttgagccactgtgcccggcctcatttattccttcttattagttgctattttggttcagtttgcaccactatagtcctctactagtacaaacattaaggatgatcatgggaaaacagatttggctggttagcaaaaatatgataaaggcatatcaagtattagttgtgaaacttaaattattcttggctgctacaaaaaagaattacatacattcaggtacatattctgaatctgacaaaaatatttaagatagctcgtaatggaataagacattgaacttcttattatcaaggttcntgaggnc

SEQ ID NO: 6795 - DNA, 534 bp, Homo sapiens
  misc_feature (411)..(411): "n" may be a, t, c, g, other or unknown
  misc_feature (474)..(474): "n" may be a, t, c, g, other or unknown
  misc_feature (478)..(478): "n" may be a, t, c, g, other or unknown
  misc_feature (485)..(485): "n" may be a, t, c, g, other or unknown
  misc_feature (498)..(498): "n" may be a, t, c, g, other or unknown
  misc_feature (511)..(511): "n" may be a, t, c, g, other or unknown
  misc_feature (526)..(526): "n" may be a, t, c, g, other or unknown
  misc_feature (533)..(533): "n" may be a, t, c, g, other or unknown
atgtttaaaattaatgactttattgacacaaactttgcaatgaaaagtggtatcctaataggatagtaaggattagtttctgtctcatacatacatgaaaaagtagccagatgcatttttagtcacatggtttaacttctggttgctgtctccgtgaaatccagattgttctggggagggccagatcatgtgccctgcatttccttctcccctgtaagtgagaaagtgtttctatataaaacagagacactttcttaaggtgataaattccaaacaacatgcagcagtgaactgatgcagaaacaaagctgtaaagagaagccacaaagcacatccccagggagaaagagcccttgaacttgcaggatcactgccaacctttggcagctgggggctcctgctgagtaatgncagtgggggacatatgaatcacaggttttcctttaatcttataatggtaaaaccatttttaanaccntaaggtnctaaaagcctttnttcaagaatcccnaatgatgaaggttanaaaactnt

SEQ ID NO: 6796 - DNA, 562 bp, Homo sapiens
  misc_feature (557)..(557): "n" may be a, t, c, g, other or unknown
gtttcattcttctggtaactcattttgattatttccttctttaacaaaagtattggtctgcaatgaattgggagggagaggggaggaactagttcttcactatagacaaatgtcagtttagaagatctatgctgtttggtttgggaaatgaaaggtttgggctacatttattgtttgaatttggagggacagagagattactagggactagagtggtttgagcaggatttatggaacaagtgtgacttcacattgttacaaattataggtgaagaatgaaggaacattccaggatcaagtttcctaaaatttggaaataaactgtggaaattctcctaaggtttgtatctttcttgtctgaatctaagaatctttttctattatgatgagtgagatcaggaaatgaattaaaatattttaatttcctccttggttttgaagttctttaaagaagggatttagaatttaaatagtatgggtattagtatctttgagtgaaggagaaaccgtaattaaatggcttctcatttttaaaatagggagaaaagcttcttccncttaa

SEQ ID NO: 6797 - DNA, 564 bp, Homo sapiens
  misc_feature (498)..(498): "n" may be a, t, c, g, other or unknown
  misc_feature (509)..(509): "n" may be a, t, c, g, other or unknown
  misc_feature (526)..(526): "n" may be a, t, c, g, other or unknown
  misc_feature (538)..(538): "n" may be a, t, c, g, other or unknown
  misc_feature (545)..(545): "n" may be a, t, c, g, other or unknown
  misc_feature (560)..(560): "n" may be a, t, c, g, other or unknown
gagacagggtcttgctctgtcacccaggctggagtgcagtggtgtgatcttggctctacaacctccgcctcctgcgctcaagcaatcctcccacctcagcctcttgagtagccaggactacaggcatgccccaccacacccagctaatttctgtatttttgtagagacagggttttgtcatgttgcccaggctggtctcgaactcctgagctcaagcaatgtgcccgcctcggcctcccaaagtgctacgatcacaggcgagaggcactgcacccagcccatggtttcctaacactgcctcactttgatcttgtgtgaaattgtgactcagtgctgagctttagacccagataaatgttgagggggaatacagaggagaattgacctttctgaacagctcaacctagtttctaaaggcaagattttactccagcgacatgtactggtgaccatgatgtcactctgtgagctggcctaccagtaacccaaccaacgctnaggaaggagancattttccaccaacagnacacactatggnttggggnggccaatgatgggcnccca

SEQ ID NO: 6798 - DNA, 508 bp, Homo sapiens
  misc_feature (436)..(436): "n" may be a, t, c, g, other or unknown
  misc_feature (444)..(444): "n" may be a, t, c, g, other or unknown
  misc_feature (457)..(457): "n" may be a, t, c, g, other or unknown
  misc_feature (464)..(464): "n" may be a, t, c, g, other or unknown
  misc_feature (483)..(483): "n" may be a, t, c, g, other or unknown
  misc_feature (492)..(492): "n" may be a, t, c, g, other or unknown
  misc_feature (506)..(506): "n" may be a, t, c, g, other or unknown
ggaaagagggtcttattctgtcacccaggctggagtgcagtggtgtggtcttggctcactgcagcctcaggcaatcttcctgcctcaacgtgccaagtagctgtaactacaggtgcgcaccaccactcatggctgtatttttttcatagagatggggtctccctgtgttgcccaggctggtctcccaactcctgggctcaagcgatccttttgccttggcttccccaagtgttgggattacaggcgtgagccaccatgcccggccagcatttttttttttttttttggtagagagacacaagattattctaaaatgtatatggaaagcaattccaaaaaagaagagtagaggaattgcccttcctgatgttgagaaccgtacagctacagcacagcgttatacggctcctacgtcagacagacatggctggggcancgctggangggaaatgtgganaccacanaacagaacagaggaactcnaagagaccncagacgcttcaggnca

SEQ ID NO: 6799 - DNA, 227 bp, Homo sapiens
  misc_feature (187)..(187): "n" may be a, t, c, g, other or unknown
  misc_feature (190)..(190): "n" may be a, t, c, g, other or unknown
  misc_feature (194)..(194): "n" may be a, t, c, g, other or unknown
  misc_feature (200)..(200): "n" may be a, t, c, g, other or unknown
  misc_feature (207)..(207): "n" may be a, t, c, g, other or unknown
  misc_feature (217)..(217): "n" may be a, t, c, g, other or unknown
  misc_feature (220)..(220): "n" may be a, t, c, g, other or unknown
aagacagagtctcgctctgtcacccaggctggagtgcagtggtgcgatctctgctcactgcagcctccgcctcccgggttcaagcgattctcctgcctcagcctcctgagtagctgggactacaggcgcgtgccactatgcctggccaattttttgtatttttagtagagacggggtttcaccatgntanccangatggnctccatntcctgacttngcnatccacc

SEQ ID NO: 6800 - DNA, 560 bp, Homo sapiens
  misc_feature (488)..(488): "n" may be a, t, c, g, other or unknown
  misc_feature (519)..(519): "n" may be a, t, c, g, other or unknown
  misc_feature (523)..(523): "n" may be a, t, c, g, other or unknown
  misc_feature (525)..(525): "n" may be a, t, c, g, other or unknown
  misc_feature (533)..(533): "n" may be a, t, c, g, other or unknown
  misc_feature (546)..(546): "n" may be a, t, c, g, other or unknown
  misc_feature (554)..(554): "n" may be a, t, c, g, other or unknown
actttgctttaagttctgggatacatgtgcagaacgtgcaggtttgttacagaggtatacatgtgccatggtgctgttattgttattgtttatgaacctatcatctcctactactgtctgatatgtctctgtaggccccatgaccctagcaaaatgactacacatagtaggtttttccatgaatgcttaagagatgactgagcctactgtctccagcctaacttccctatttaagagctgaaaaaatcagattttttaaaagtttcattccatttaagagttaaaccatttttcttatttagtgccagattttaccttagcatatatgacatgatgttggatacaccacagttccatttctttacctacaaatcatagttctgggaaaatgagaaatgtctgctgtaggcacttattcaagtactgcaagtcatgtgccggactaaggcaaacatgactcggaatctgacgcttgacctaaggacagntttcaaggcttacatgacctacacacgaacntaangntggctttncatttaaatgccngtagtccnaaacac

SEQ ID NO: 6801 - DNA, 551 bp, Homo sapiens
  misc_feature (517)..(517): "n" may be a, t, c, g, other or unknown
  misc_feature (525)..(525): "n" may be a, t, c, g, other or unknown
  misc_feature (532)..(532): "n" may be a, t, c, g, other or unknown
aaatttaaaatgtctttattcatttacatggtatatatcaccctctacaaaaaaaaatgacacttgtctttcaatctgtcaagcttagctaaaaaattcacgtatctcttttctatatcacatattgacatgatataggatgcaagatataaatatcaatttaatagacattattaaataattttacacttagtagaatcttggataaatggttaaaattatagattgacattaaagtgtgggcacaggaatattctgtgtataccaatgggtttaacagaagatgtgtttgcactgatttctggtcatcaacttgctttccgtgaatctttaaatacccaattccaaatcttccagctcctggagaagggctgtttctttctgaattttctccaactgatttttttctagctgttttccagttgctgcttggtctttcaagttgttcgattgctttcagtttcttctttaaggtcttgattttttggctatctcagggtcccagaaatggctgganaaaacagngtttcgngggggctctgtggggcaga

SEQ ID NO: 6802 - DNA, 517 bp, Homo sapiens
  misc_feature (465)..(465): "n" may be a, t, c, g, other or unknown
  misc_feature (474)..(475): "n" may be a, t, c, g, other or unknown
  misc_feature (481)..(481): "n" may be a, t, c, g, other or unknown
  misc_feature (504)..(504): "n" may be a, t, c, g, other or unknown
  misc_feature (511)..(511): "n" may be a, t, c, g, other or unknown
  misc_feature (514)..(514): "n" may be a, t, c, g, other or unknown
aaatttaaaggagtttaattgagcaatgaatgatttgcacatcgggcagcccccagaattacagcagattcagagagactccagtgcagccacgtggtggaagatttatagacaaaaaaagggaagtgaggtagagaaacacctggattagttacaggttggcatttgccctatttacacacagtttgaacattcagcagtgtatgagtgattgaagtacggctgctgggactggccgagactcagcaattgtgacaggtacatactcctaatttaggttttcaatcttgtctacctattaagttaggctcagtttgttcacagggactccaatacagaagtacggagtccttctcaggccatatttagttcgctttaacaattccccctttttggtcattttatcagttttgagagattgatccgaaacttggagttattgatgccctgtcaccatgggcttgnaaccccctnngaacanaacagtggagttttgcaaaggtnggaccanggnctg

SEQ ID NO: 6803 - DNA, 556 bp, Homo sapiens
  misc_feature (456)..(456): "n" may be a, t, c, g, other or unknown
  misc_feature (493)..(493): "n" may be a, t, c, g, other or unknown
  misc_feature (507)..(507): "n" may be a, t, c, g, other or unknown
  misc_feature (510)..(510): "n" may be a, t, c, g, other or unknown
  misc_feature (522)..(522): "n" may be a, t, c, g, other or unknown
caacaaacaaagttttctcgcttctgccacaatagtaaaaccatctgatcttgacaagataatggtgtcgttgactttgcttttttcttgtccgttggacaaaattggccaagaatataattggactgttatggccaataaaaacgaagtttaggtcaagtcttgtcaggatagcctgactaaaaacatctggctccttaatttaaaatagttcagacaaccagattcttgctgtgttttatgttaggttaacacgctgaactttaagaagctgtagactgcagtttgttgttatgagacctgctagctttgaagcctttcaatttctgtacaaagaatgattcgagaacttctgcacactggtaaaatggggagtcgcttggattgtagtaacgacagttatcaaaaattttggtcatatctgccacaaattccgtcagcttttcataatatcgnctttggactctttcttccatggtggcaaggtccatanggtccttaataccnccntaataatctggngcatcattaggggctactgggtcaaggaaaggcc

SEQ ID NO: 6804 - DNA, 557 bp, Homo sapiens
  misc_feature (439)..(439): "n" may be a, t, c, g, other or unknown
  misc_feature (475)..(475): "n" may be a, t, c, g, other or unknown
  misc_feature (477)..(477): "n" may be a, t, c, g, other or unknown
  misc_feature (525)..(525): "n" may be a, t, c, g, other or unknown
  misc_feature (539)..(539): "n" may be a, t, c, g, other or unknown
  misc_feature (554)..(554): "n" may be a, t, c, g, other or unknown
agtcgtagtaaaatacacataacataaaatgtactatcttagccatttttaagtgtacagttaagtaccttcactttgttgtaccactatcactactatctctagaagtccttagaagaactgacctacagacactttttagaaaaaagtattactagaaaggaacctgaacgtacaatagtgtcttcttggggaccatggattcccttgagactccagtgaatgctttggacactctacccagataaactcacaatcaaatacttgcttataatttcaaaggatcctatgaccctctggagtccatccaaccatgattacatcctatgaactgagctgcccctccagagtcaccactgcaactgcccatcccccagcagtcgccaggcacagggctccggaaatgggcaggcagatccacttcagcggtgcatatttncaagacaggatgaccctcatttccatcacaggttgnanggccttgtggcaaggaggaatggctgggcttggttaaagggaaagtcncaggaaagaaagangggtccctgcagttnaaa

SEQ ID NO: 6805 - DNA, 541 bp, Homo sapiens
  misc_feature (82)..(82): "n" may be a, t, c, g, other or unknown
  misc_feature (313)..(313): "n" may be a, t, c, g, other or unknown
  misc_feature (395)..(395): "n" may be a, t, c, g, other or unknown
  misc_feature (398)..(398): "n" may be a, t, c, g, other or unknown
  misc_feature (400)..(400): "n" may be a, t, c, g, other or unknown
  misc_feature (440)..(440): "n" may be a, t, c, g, other or unknown
  misc_feature (449)..(449): "n" may be a, t, c, g, other or unknown
  misc_feature (511)..(511): "n" may be a, t, c, g, other or unknown
  misc_feature (517)..(517): "n" may be a, t, c, g, other or unknown
  misc_feature (521)..(521): "n" may be a, t, c, g, other or unknown
gagacggagtctcgctctgtctcaaaaaaacaaacccctctttaattcccaaattgatttaccatggaactctttttaatgnaattataatacaattaacatccacaaaattagagatctaaggaaaacactaccctaatcaaaaggccacaaaatgtattcacagtaacagcttccacttactgggttttcttgccaggcatggggtaaaatagtttatacgcatcatcttatttaatcctcagaataactcaataaggatggtattactaactcccattttaaagaggaggaaactgacacttaggaaggntaaatacttgccccaaagtttcctagcaacccaaatcctgtcttaaccacgatgcttcaacagtcaactttccaatttttgnacngnttttatgacttttggcctctatcacttatttcttgatganggtaatggntcttctaggtttttccccaggctttaacatttggccctggcagataaacccctggcttaagnggatanttgnacctgggggcaaaaccaaaa

SEQ ID NO: 6806 - DNA, 545 bp, Homo sapiens
  misc_feature (179)..(179): "n" may be a, t, c, g, other or unknown
  misc_feature (278)..(278): "n" may be a, t, c, g, other or unknown
  misc_feature (442)..(442): "n" may be a, t, c, g, other or unknown
  misc_feature (456)..(456): "n" may be a, t, c, g, other or unknown
aagagatagggtcttgctcggttgctcaggctggagtgcagtggcacaataatagcccactgcctcctagaactcctgggatcaagcaatcttcacacctcagcctcctgactagctgggactacaatacacgtatggccaccacatgtggctttttttttttttttttttttttttanaaatgaggtctcgcttttttgtcccgcctggtctggtactcttggactcaagtgactctatttgtactcccaaagcactgggattaccttatttcctanaaagttggcagaactttttaaatagacattcataaatgtatactcttacacatttcactgtgcttttgagtagtgaaatacaatatgtaacttcctatatttagaaatgttttcaattcaagtaaattaaacatttaacatttggtagcatcacgtataatttnaataaataattacnttatttgctggaaataaatcaattttcaccaaggttaaagacttaaactggaaaggggttcttcatccacactttgcatatgctgcagc

SEQ ID NO: 6807 - DNA, 551 bp, Homo sapiens
  misc_feature (551)..(551): "n" may be a, t, c, g, other or unknown
aattaaggctttcagacctaatctagccatgaccaaaggccaaactccacagctttgtacaactgaagctcagcagacctttctggactttctcccactgctcctgttctatagccagttgctgtgttcaccaaacttgcctgacccttcctcctcctgtgctttcactcactctcctcctattttaatactcatctccagcctgcagcaccccaggcagtacaccttcacatgaggaaaatttacccatctttctacgctgagttaaaattcttccttttatgaaacttccctgaagtctaccagcatgacattccttctctttcctaagtccctattgctcttctgcccatcccacacatttggcacctagtcacaagttgctttgtgatatttcatgtattactctatttattatgtataagtctaattttcccatttggagatatttaccctttatgtttcaagaatgatttgacacaacttacttaaagtataaaaaccaacaaaatcagaccttccaaggtaacagtaaactttctaagggtaan

SEQ ID NO: 6808 - DNA, 547 bp, Homo sapiens
  misc_feature (517)..(517): "n" may be a, t, c, g, other or unknown
  misc_feature (524)..(524): "n" may be a, t, c, g, other or unknown
  misc_feature (543)..(543): "n" may be a, t, c, g, other or unknown
gccttaaagtgtgggctctgagtctgatgtcactcagattgaaggcagagtctctgattgaaagcacaatcctactaggattggtagggggcaaggagagggaaatcaagatgtttttcaatgctctttttatttgaaaaatttaggcatagactttttgctcatttcaaatctggtccatctacaacgaagttaaactaattcctccaagggactgacacacttcatattgataaccttaatttttaagaatatttatgaatatatacttcttgtgtgtgtctgtatatatctgtatataatattttaaaagggaattcctgtaaaggagataattcaggaagttagctaattgccattatagtccaacaacctttaagcatttacctttgcctctctgtgtcttagacatttataaagtgtatacttgtcttatgaactatttaaagttgtcaggatgaaataaaattaccgtgcaaaaatttcaaaaagtaaaggccctaaataaaaaggaagnctatcanttaaatgcttcatatctgnttca

SEQ ID NO: 6809 - DNA, 566 bp, Homo sapiens
  misc_feature (480)..(480): "n" may be a, t, c, g, other or unknown
  misc_feature (524)..(524): "n" may be a, t, c, g, other or unknown
  misc_feature (527)..(527): "n" may be a, t, c, g, other or unknown
  misc_feature (545)..(545): "n" may be a, t, c, g, other or unknown
  misc_feature (557)..(557): "n" may be a, t, c, g, other or unknown
  misc_feature (561)..(561): "n" may be a, t, c, g, other or unknown
gaaaagatgaaagctgaaaaaagttaggtttggtgtaggttacaccatggatgttggtgcctcctactggtcctaacaaaaatataagtggtaccagcaggcactacttcgcataccaatgtgaagtaaaaattccctttcatctgtggtcaagtatggaaaaattatgaaggtcctcattaaatccacattttttaacccattaaattatccttataaaaattcagataaactactgtcataaatgcaactgcactgcctcaaggacctaaaaactgttttcctaatcaactagatggcataatcaggtaacagcagaaacagatagtctagtgaatttccgagagtcaaaatatgctactttgatgcttattaaacactgaaaactttcacaatactaactccagttaagttggtgaggttaaaaatgactaaactaaaaataatggtcaattaaaacatcccacagggatctactgnaaataatagctgcaaccaagttctggtacctcaagacttgaagnccnaagatttccccagtaggnggcttataaagnaatnttttg

SEQ ID NO: 6810 - DNA, 510 bp, Homo sapiens
  misc_feature (92)..(92): "n" may be a, t, c, g, other or unknown
  misc_feature (129)..(129): "n" may be a, t, c, g, other or unknown
  misc_feature (217)..(217): "n" may be a, t, c, g, other or unknown
  misc_feature (293)..(293): "n" may be a, t, c, g, other or unknown
  misc_feature (354)..(354): "n" may be a, t, c, g, other or unknown
  misc_feature (360)..(360): "n" may be a, t, c, g, other or unknown
  misc_feature (374)..(374): "n" may be a, t, c, g, other or unknown
  misc_feature (426)..(426): "n" may be a, t, c, g, other or unknown
  misc_feature (435)..(435): "n" may be a, t, c, g, other or unknown
  misc_feature (442)..(442): "n" may be a, t, c, g, other or unknown
  misc_feature (444)..(444): "n" may be a, t, c, g, other or unknown
  misc_feature (460)..(460): "n" may be a, t, c, g, other or unknown
  misc_feature (480)..(480): "n" may be a, t, c, g, other or unknown
  misc_feature (488)..(488): "n" may be a, t, c, g, other or unknown
gtgtgtgaatctctttattgtttctctccagagcccctgcagcaggggaggggagggcgtggggaggtgggcgcccctcccaccagcctganaccgctctctgcctctctcctctcctctcttctccancatctcacccactttctctccttctcaatctcctgctcccacctccagcaccttcggggattccctcttgcagcccctgctttctaantccaccctgggctggggaaaggaaagtaagagaccacggggacaatttcaagccccccagtctccacaggggctantccccctggctacctgcctggctttctctctcctgggctaggggctggggaggtctgcggngctcantcctggccctgcantatcccaacaccctgctctggggctgtctccacagccaaaggctaatgcctnaggtcacanaagtgcnanggacaagggccaccgntccccgctgggctcatccancacaaganccagcttactcacttgccaaca

SEQ ID NO: 6811 - DNA, 466 bp, Homo sapiens
  misc_feature (425)..(425): "n" may be a, t, c, g, other or unknown
  misc_feature (435)..(435): "n" may be a, t, c, g, other or unknown
  misc_feature (445)..(447): "n" may be a, t, c, g, other or unknown
  misc_feature (463)..(463): "n" may be a, t, c, g, other or unknown
  misc_feature (465)..(465): "n" may be a, t, c, g, other or unknown
gatacaggatcttggccgggcgcggtggctcacgccttcaacttttctgtaaacctaaaattattccaaaacccaaagtatattaaaagctgagattccaccagtgcactctgggtaacagagcgagaccctctctcaaaaaaccaaacaaatgcagtgtggttgctggatggggtcccagaacagaaagggcacgcatgggaaagccacagtcttcagttagtgtggtctgcagagtgtcccaatgtggctctgtgactgtgacacataacaccacagtgaagaacagtgaccacaccaagggaggccagtgcagggtccacggggactacactgtgtctgctacttctttttttctttttgatacaggatcttggccgggccgcggtgggctcacgcctgtaatcccagcactttgggaggcngaggcaggcngatcacctgnnntcgagatttcaacaanant

SEQ ID NO: 6812 - DNA, 566 bp, Homo sapiens
  misc_feature (515)..(515): "n" may be a, t, c, g, other or unknown
  misc_feature (531)..(531): "n" may be a, t, c, g, other or unknown
  misc_feature (536)..(537): "n" may be a, t, c, g, other or unknown
  misc_feature (557)..(557): "n" may be a, t, c, g, other or unknown
aatgccagtaccatgttattttaggtattagagctttgtagtaaattttgaagtctggtagtgtgatgcttccagccctgttctttttgctcagggttgctttggctatttggggcttttatggttctgtatatattttagaatgatgccctttgtgtttgatccacaaaaagggagacatccagagctgaagagttttccctgagaattttgtcaagagctagaagagaaaggggaagaagtacatgaacaactgcatatggtgatattcactcttaagtctgctatacagaaatttaaggggtggggggcggtggttatagtgtggagccaggaacccaaggaagcctatccatagttccacatcgctgatgtaattcttagtatatggacacttgaacaattcaatatattaataagtctaaatttctatctggacaaagggtctggggtaaggagctgggggtattttggttccttatatgttgccgggaagtcagggaccccaaatgganggaccggttggaaccntggcnnaggaacctaaattggggaanatttcttgg

SEQ ID NO: 6813 - DNA, 559 bp, Homo sapiens
  misc_feature (527)..(527): "n" may be a, t, c, g, other or unknown
  misc_feature (556)..(556): "n" may be a, t, c, g, other or unknown
cagaaacaacacatttctcgagtttttattaactattgaatactacaatatgatttacatttttttgagtgttatatttaaaatgaggtttcctattaaattaaacaaacattaaaacatgaaagcaggtcagaaaggagccattggaactatgttgacaacagcaccacatctcctactgttgtttcggagtcctgactgtggttagaactgataccagtgtccgagtctgtgtcatttgtgtaattgctaaatactctttgagtaaagggaggaatctccccattgctactgggaacctcagattccttcgctctgttttcctttaactggcacccatctttgttgctaatgtgaagtgaattgaattccttggccaggagttcatattcttttgctttcatctgaagcaatgagtcactgtatttaatctctttctggatgccactcaaatgagagtgaattttcaaaccagctttcatgcttttctccaaatcacacttaacactctctaaattagagctttncagtcacttgcagctttccctttcgcatnttt

SEQ ID NO: 6814 - DNA, 560 bp, Homo sapiens
  misc_feature (286)..(286): "n" may be a, t, c, g, other or unknown
  misc_feature (472)..(472): "n" may be a, t, c, g, other or unknown
ggtacagattaggtctcactatgatgcccagactgggctcgaactcgtgggctcaagcaagccttccatctcagcttcccaaagtgttggaattataggcatgagccaccaggcctgctccctggtccttttaagcatatgggttttcaaatatgttagagcacctaagatataaaataataagatacaaaaaataatacatagctcttagctagatcatcttaattgaaaacttactgtgtgtgtgctagacaccatttttaaatctttttcttttttaacttgnttttttttgagacaaggtcttgctctgtcttccaggctggagggcagtggtgcaatcagagatcactgcagcctctaactcctaggctgaaatgatcctcttgcctcaaccttcccagtagctggggactacaggcacacacgaccacacccaactaaatttttaatttttttgtaccgaaggggncttgctatgttgaccagcttgggcttgagctcctaacctcaagggatcttctaccttaagccttccaagggttggaacacaaatgggc

SEQ ID NO: 6815 - DNA, 565 bp, Homo sapiens
  misc_feature (512)..(512): "n" may be a, t, c, g, other or unknown
catttaaaaaaaagaaaccttaaagtatcttgggctggcttttccacacacacagctggagctactgtcccaggggatctgtctccaacctctgctcacacaccacctctcatgaagcgaactccttcctgaagctcgggatcgaattataatcctgtgagcaatcattaggtgcataagaacttgtgtttctctgtctcaggtgcactctcagccctgtgagagatgagtaggatctggagtccagaagatcttggatcatttactgaactcctttaggtacacaatttccttcaatcccttcaacaactgtccccgtttgatgagaaactaaagctcacaagaggtaagaggctgagctggggacctcaaggcctggtactgtcctgttctaagccaaatgaactggggtgaactgcctttctgctcatgcctgtagtgtgcagcaaatgggggctgctcaaagcaggaaccccggtaaagtgggaaccatgggtatcccgggcttcaanttcccacccaacctgggcttttttggccaggtccttccaaccccaaaatggct

SEQ ID NO: 6816 - DNA, 561 bp, Homo sapiens
  misc_feature (486)..(486): "n" may be a, t, c, g, other or unknown
  misc_feature (509)..(509): "n" may be a, t, c, g, other or unknown
  misc_feature (515)..(515): "n" may be a, t, c, g, other or unknown
aaataaagaaaaacctttccatccaacttgaagaaaaatcagaaagtatttttctccatggaccattattctatttgaacctaacctgaattccctcatagtcaaaacctgccatgatgatgtgaattcatttccgcatagtcggaataatttttgctccaaattcttaaaggagacaatgaattagtagcttgtaaattttgcagatctgggccttcaataacttagtagaaggcaataaaatagagggaaaaatgggactgtggattacaactgttcaaatttcatcttaatttcttctatttttctcaaccatatttcttctatttttacaatcattattaaaatatttccctaaagaaatacaaatgggtaaaggtattgaaagtcacatttctttatctgaacaagtattaagattgtccatcatttcaagacaaaggttttcttaacagtgaaaatcacaggaagaaagtaatcaggtantttcatagatccaattatatggnagctgnctggttttcacatttcaaaataagtcgtataggataaccaaggtta

SEQ ID NO: 6817 - DNA, 546 bp, Homo sapiens
  misc_feature (398)..(398): "n" may be a, t, c, g, other or unknown
  misc_feature (456)..(456): "n" may be a, t, c, g, other or unknown
  misc_feature (476)..(476): "n" may be a, t, c, g, other or unknown
  misc_feature (488)..(488): "n" may be a, t, c, g, other or unknown
  misc_feature (517)..(517): "n" may be a, t, c, g, other or unknown
  misc_feature (523)..(523): "n" may be a, t, c, g, other or unknown
  misc_feature (529)..(529): "n" may be a, t, c, g, other or unknown
  misc_feature (536)..(536): "n" may be a, t, c, g, other or unknown
aaaaagacggggtctcgctatgttgcccaggctggtctcaagctcctgggctcaagcgatctgcctgtctcagcctcccaaagtgctgagattataggcatgagccaccatgcccagccatgtaatcgctctatcaaactactacttactgtggaaagggacctctcaatataactgggaagctcatcttccctaaaattcccttgttcctactagccattagattttatttttctcctttactaacagcatttcctaggttctgcccatccttatagctttatagaactccaaaccacttgacctcttagaagtacagctctgttattgatattttgaaaatgatcagataaaatcagaagaagcaaaagcataatatagtccaaggtgtttcctgngtagtttcctaaactcagaacaacacaggaaagtttccctctcttcactaaaatccangccttcactctatcttgcanggaggaggacancctcagttggatagtaaaaaaagctttancttcantttggncccttancattagctaa

SEQ ID NO: 6818 - DNA, 574 bp, Homo sapiens
  misc_feature (434)..(434): "n" may be a, t, c, g, other or unknown
  misc_feature (493)..(493): "n" may be a, t, c, g, other or unknown
  misc_feature (523)..(523): "n" may be a, t, c, g, other or unknown
  misc_feature (534)..(534): "n" may be a, t, c, g, other or unknown
  misc_feature (542)..(542): "n" may be a, t, c, g, other or unknown
ccatttatttcttcttccccctatttcttcacaaccttctagaatgagtctccttaaaaatgtggatcctaaccttctaggaataaactatcctaatgttgaaagattagggaaaaaatataaccaaacactcattttcttctaaaatgctttctctgaaatattttgaagaacaaggaaaataaaatcttaggatccaaaactcactatgccaaaggaaaagtcaggaactgagtcatgctaatactaccttccttttgttcccaaagagacagctgtaatttcacaagtttgcctatcttaggtaaaatgtagatctaccacgcacaagacaaatgcacaatcaactttttctccattcctctttacacatgcaacatctggatgcagtgagtgctaatccaggcctcataagggatgtcttccctcactgnctttcctccctttctttatcctccatctacttctggctgggctcacccctataaatatnggagtcagcaaaacctttttggaaaaagcncaggcccaaancctactgngacttggggtcttatccttaacttgggaaaaa

SEQ ID NO: 6819 - DNA, 531 bp, Homo sapiens
  misc_feature (396)..(396): "n" may be a, t, c, g, other or unknown
  misc_feature (399)..(399): "n" may be a, t, c, g, other or unknown
  misc_feature (448)..(448): "n" may be a, t, c, g, other or unknown
  misc_feature (454)..(454): "n" may be a, t, c, g, other or unknown
  misc_feature (501)..(501): "n" may be a, t, c, g, other or unknown
  misc_feature (510)..(510): "n" may be a, t, c, g, other or unknown
  misc_feature (522)..(522): "n" may be a, t, c, g, other or unknown
  misc_feature (525)..(525): "n" may be a, t, c, g, other or unknown
  misc_feature (530)..(530): "n" may be a, t, c, g, other or unknown
ggtattgaaacttaaaaagggattagaattgcatttttaaaaactgttcaataatggaagtttcaatatcagcttagggaaacaagttttgggggtgtaccatttaatttacgtgaataagttatgtatggaagaatgtatgttaactctttcaggacataagcccaaaagtcaacagaaatttgaattttttttttctattttcatgctgaaatttaattcatcatgaatttgtttccaagggtgaaattttctttcctcaacttttacatgactttgtaataagagcagttgtacgggctcacaaaaataaaagacggatgatggagtagagatgttcagtgtaaatatttagtacaggggctggcggcttttaaatttgcatcttgagctgantgnatctgctgatttcccatctgctaatattttcccatctgctaaaacctgnttccangggaaaaaggcctctctggctttctggcctggtttaaccctcatggncccctttanccggaccttggnaanaactnc

SEQ ID NO: 6820 - DNA, 570 bp, Homo sapiens
  misc_feature (516)..(516): "n" may be a, t, c, g, other or unknown
  misc_feature (557)..(557): "n" may be a, t, c, g, other or unknown
gagacggagtttccctcttgttgcccaggctggaaatggcgcgatctcggctcacagcaacctccgcctcccggattcaagcgattctcctgcttcagcctcccgagtagctgggattacaggcatgcaccaccatgcctggctaactttgtatttctagtagagatggggtttctccatgttggtcaggccggtcttgaactcccgaccccaggcgatccacctgccttggcctcccaaagtactgggattagatagtagataggcgtgaaccaccgcgcccagcctatctaccctctaattcttaattcataaaacatgaatctcttcaaaataaaagtattccattaaagttcaacaaaggctctttacctaagctaaactgactgaccacagtcgacaatcttagctaccacctatgggacatttaatatgagctctgcgttggtaattacttttatcgctaagctggtattacaaaattctatgagacaagtttactaacccctttactgngaaaaaaccttggctaaccaagataactggctccaaaagcnaaaatgcgggaaa

SEQ ID NO: 6821 - DNA, 583 bp, Homo sapiens
  misc_feature (91)..(91): "n" may be a, t, c, g, other or unknown
  misc_feature (496)..(496): "n" may be a, t, c, g, other or unknown
  misc_feature (514)..(514): "n" may be a, t, c, g, other or unknown
  misc_feature (531)..(531): "n" may be a, t, c, g, other or unknown
  misc_feature (541)..(541): "n" may be a, t, c, g, other or unknown
  misc_feature (545)..(545): "n" may be a, t, c, g, other or unknown
  misc_feature (582)..(582): "n" may be a, t, c, g, other or unknown
cagaggtcaaaagtttaatacatacaagcaaatccccacacactgttcatcaggagtcattttgttctggaaggtaaagttttctctttgngtcctttatagtaacttgtaaaagaatttgttataggttctacatttttgtcaaagtgtgtcacaaagatttaacgatataaggaacaatggtactcttgtatgttgtgtgaaattcttcaccttattcaagtacaaatctattgaaaaatagaaaaactaccaagtccattatgccgaataataataaacaacaggttttatctaattcttaatcctgagcaaaatacattgaggaagactttctgagaggactgggaaataaaggagagaaacagataaaactcaaacgaggtgattaaaaagaccccaacaggtaagttttactggctagaatgctttcctttgcattggcacttttcagaaaggggggatttcctcagacctcggagagggtttccagtancctaagcggtcatgtaanggttggcaatgacctgnggaaattttncatnttacccgcagccttggccgggtactggaaggcaatgnc

SEQ ID NO: 6822 - DNA, 576 bp, Homo sapiens
  misc_feature (450)..(450): "n" may be a, t, c, g, other or unknown
  misc_feature (495)..(495): "n" may be a, t, c, g, other or unknown
attcaaataacagaggaatgaatttttctcagagaaaagaaggaagatgaaaggaggaattaggttgagacgagagagcgtggaatgagagaggaaggtgtcaattaaaaaaatgaaccccactgcatccccctcttgacaggtggggtgagtggagctgacagccgtcgcattagctggctttggtggaaccctcatgccttgtggttcccccgagctcaaaaagagtgattccagggccagcggacacactcacacatttttacttggtgttccaatgcctcccccgcagctatttctaataatggtaattataatgatttgaggcttaagcagggcaattccggcctgaaggcagattgtaatgaagtagtcagggtgaagggaggggagaggggctgcagtgggaagaggctggatggggcactttcaggccttcaatagctttgnctagtcaagtgcaaccaggatggcctcatcttttgagcccaacgntttgacttgcaggatattcagaagcccgtttctgcttggaaatggaggattgctcacattcattgaccagccccatggcct

SEQ ID NO: 6823 - DNA, 576 bp, Homo sapiens
  misc_feature (443)..(443): "n" may be a, t, c, g, other or unknown
  misc_feature (505)..(505): "n" may be a, t, c, g, other or unknown
  misc_feature (531)..(531): "n" may be a, t, c, g, other or unknown
  misc_feature (551)..(551): "n" may be a, t, c, g, other or unknown
gtttttttgtttttaaataacccactcacattaacaaaagactgcagtagcttccaaattataggttgttatttttagtggaagtagttcaatattcatattggagcagatgtagcagtttaacaaaacagctcttcaaatcccgcacaaattgaaaacaggaaaactgattgcattttctcttatcactttccttttctgaattgacacttttggccttctgaaaatttacacatggctttcatctcaacagcacctgctgatcaaacagaaacctaacattttcatgaaaattgtataaaggactagttttgttctaaacactgtaaagggcatcagttgcctacttgatggcaacaattgtcatgtataagtcatagtcaaaatagatttatattttcataaatttctttaacataaaaatatgttaagtcccttctggnttttttttttcatattcactctctggatgggtcaaatttctttgactcaatggctggctaangcttaaatttggtatttaaaggactntgccaaatgtgtgaaaaggnaaattcccccaggataaccaatcct

SEQ ID NO: 6824 - DNA, 538 bp, Homo sapiens
  misc_feature (457)..(457): "n" may be a, t, c, g, other or unknown
  misc_feature (472)..(472): "n" may be a, t, c, g, other or unknown
  misc_feature (488)..(488): "n" may be a, t, c, g, other or unknown
  misc_feature (513)..(513): "n" may be a, t, c, g, other or unknown
  misc_feature (516)..(516): "n" may be a, t, c, g, other or unknown
  misc_feature (520)..(520): "n" may be a, t, c, g, other or unknown
  misc_feature (522)..(522): "n" may be a, t, c, g, other or unknown
gagacggagtctcactctgtccccaagctggagtgcagtggtgcaatctcagctcactgcaacctccgcctcccaggttcaagtgattctcttgcctcagcctcctgagtagctgggactacaggtgcacgccaccatgcccagctaatttttgtatttttagtagagacagggatttcaccatgttggccaggatggtcttgatctcttgaccttgtgatccacctgcctcagcctcccaaagtgctgggattacaggcgtgagccaccacatccggccagttagtattctttttaccctctaaatacttctttttaaaaccacctatttcttgactctagtttctcttccccatcctcaccctcgcagtcttaatttaggcctcattgtccttgcctgaactgctgcaacggccatctgactggcttcatgcttcagaattcataccctggaatncacctttcccactgntgatagaaggatttgnctaaaacacaaactgatcagacagnttnaatncnaaaggcattccccatt

SEQ ID NO: 6825 - DNA, 569 bp, Homo sapiens
  misc_feature (436)..(436): "n" may be a, t, c, g, other or unknown
  misc_feature (536)..(536): "n" may be a, t, c, g, other or unknown
  misc_feature (567)..(567): "n" may be a, t, c, g, other or unknown
gccctccctctcctgaccaaccagatccaaataacctttactggctgctaaatttctcttgagaaatcaagcaactctctagaattgcagtaataaacgacaatttcttagaaaaacatgtgtaaagtaactacagaatgaagtattcaacccacagaaaggaactgctaacacatgtaacacggaaaatagctgataaaagtctctttggtgccattcaattatggcatccgcagaaacacaaaaatcctcccaattattttagtaaaatcttcatttattcattatttcagaggctgagcaaatggtttgtgtaaacatatcctttggtaacacgcgcatgtttattttagccatctgaagacttcttctatgtttacataagccatcagacacatacaaccactcacttggtggctttgcgttttcttgaaangggtgaagggagagaagagagaatggaaccattaaatcaggttctcttttgcataaagccttcctttaaaggtttaaaaaagcttatgttaaaatatctnggatgggccttaagtttctttttaattcaanaa

SEQ ID NO: 6826 - DNA, 534 bp, Homo sapiens
  misc_feature (194)..(194): "n" may be a, t, c, g, other or unknown
  misc_feature (458)..(458): "n" may be a, t, c, g, other or unknown
  misc_feature (485)..(485): "n" may be a, t, c, g, other or unknown
  misc_feature (488)..(488): "n" may be a, t, c, g, other or unknown
  misc_feature (505)..(505): "n" may be a, t, c, g, other or unknown
  misc_feature (511)..(511): "n" may be a, t, c, g, other or unknown
  misc_feature (516)..(516): "n" may be a, t, c, g, other or unknown
  misc_feature (532)..(532): "n" may be a, t, c, g, other or unknown
caaatgaaagtatatttatttttataaatgtttcctccagtaagtttatgtttgactgtacttaagaaacaggaaaaaaaaaaacctgtaattaaacttgtgccaagattaaccaacagcctctactgcttgtttcccattattacaggttgggtatcccttatctgaaatgcttgggaccagaagtcttttanactttggtttttttgtgtgttttggaatatctgtattatatttactagtcaagtatcccaaatccgaaaatccaaaacctgaaaagctctaatgagcattttcctccagtgtcatgtcagtgcttgatatggttttgctctgtgtccccacacaaatctcatgtcaaattgtaatcttcggtgttggaggaggggcctggagggaggtgactgaaacatgggggcagacttcccccttgctattctgggtagtgagtcttgganatctggggttggaaagtgtgcagcatntgncccttggcctcctcctntggctntagcncgcaggacatacctgntt

SEQ ID NO: 6827 - DNA, 565 bp, Homo sapiens
  misc_feature (511)..(511): "n" may be a, t, c, g, other or unknown
  misc_feature (525)..(525): "n" may be a, t, c, g, other or unknown
  misc_feature (546)..(546): "n" may be a, t, c, g, other or unknown
  misc_feature (551)..(551): "n" may be a, t, c, g, other or unknown
  misc_feature (559)..(559): "n" may be a, t, c, g, other or unknown
gttgttgttggtgtttattgattcacctataaaccacatatcaggctatctcttaagaatacaacagactccaatcccattggaagtgagttcgcagcctgctctctgggctctctccctctttccggccttttctctttcacacggaagagcttacctataaaaggctcttgataagctctcttgacccccaagtttcctgggcagggttatttggatagtgctattactccaactttcttcttcctctttctgtcataaatcaaagccacctgacactttgcgcccgacttttaaaacaaacaggtctcctttctttcttcagccaggtcacaagaactgcctatgggctaatcttgagagcatgtttttcttggtctgaggcctgggagaaagagcagagtggatatctcaaaggcaactagagcccgagattgtcacttgaaaatgcgccagcctgggtgtaaaaagaatccctcttttggctctcctcaattgggaaaacccaagnggtcctcaaaggtnacactggatttacaccgggtnccggnccggggancttccc

SEQ ID NO: 6828 - DNA, 573 bp, Homo sapiens
  misc_feature (481)..(481): "n" may be a, t, c, g, other or unknown
  misc_feature (541)..(541): "n" may be a, t, c, g, other or unknown
  misc_feature (547)..(548): "n" may be a, t, c, g, other or unknown
  misc_feature (563)..(563): "n" may be a, t, c, g, other or unknown
  misc_feature (565)..(565): "n" may be a, t, c, g, other or unknown
  misc_feature (569)..(569): "n" may be a, t, c, g, other or unknown
aacatgatttgttttacttcataaattggcaatacaagtgctaggatgacaaagatctattcttcatgatcatgcaatgaacagcagttagtcaatgttcaatttttctctacttcaaacttaatagtcccaatcgagaatgtaattttcaaattagattaaaaatggccctggtccttggagaaaaggctgattctaggacaagggcatgaaatatacaagatgaacttgaagcatcttgtagtgccagaaaggaaatgcttaaaaacaaacaaaaagaccccacaatgacaacaacagtatatatgttaaacacaggaggccaggcgcggtggctcacacctgtaatcccagcaccttggaggccaaggcaggtggaccgcccaagctcaggagttcaagaccagcctgagcaacatagcgaaaccctgtctctatcaaaagtacaaaaaattagccaggcgtgatggaacatgcctgnaagtccaaggtattcaagaagcttaagtgggaaccttgcttgcattccaggaagggggangttccnngagcttagaaaatgncncttncttc

SEQ ID NO: 6829 - DNA, 577 bp, Homo sapiens
  misc_feature (487)..(487): "n" may be a, t, c, g, other or unknown
  misc_feature (500)..(500): "n" may be a, t, c, g, other or unknown
  misc_feature (503)..(503): "n" may be a, t, c, g, other or unknown
  misc_feature (533)..(533): "n" may be a, t, c, g, other or unknown
  misc_feature (544)..(544): "n" may be a, t, c, g, other or unknown
  misc_feature (563)..(563): "n" may be a, t, c, g, other or unknown
ggagacagggttttactctgttgtccaggctggagtgcagcagcataatcatggctcactgcagcctcaacctcttgggctcaagcaatcctcccacctcagcctctcaagtagctgggaccacaggcatgagccaccatgcctggtgaatttttaattttctgtagagacggtatctcactatgttccccatgctggtcttgaactcctggattcaagcaatcctcccgtcttagcctctcaaagtgctgagattacaggcatgagccaccatactgggtccagaataaattatctttaaagaaaagtagggtcataagccagagagaataaatacacatgtcattgataattagaggtatgaaactgtgggaaaagaattaacaagagtcatctaccatagagaaggaagcagctgcttgttccagtaatcccacaagtcctgactcaagtaaaggattttccagagcagatccttcttcatctnggagatccccatnatntgagaaccgcagaatctttttaaaacattngattgaaaaantttggaaaggttcccattnccccaggaagaatt

SEQ ID NO: 6830 - DNA, 498 bp, Homo sapiens
  misc_feature (436)..(436): "n" may be a, t, c, g, other or unknown
  misc_feature (463)..(463): "n" may be a, t, c, g, other or unknown
  misc_feature (471)..(471): "n" may be a, t, c, g, other or unknown
  misc_feature (479)..(479): "n" may be a, t, c, g, other or unknown
  misc_feature (484)..(484): "n" may be a, t, c, g, other or unknown
  misc_feature (491)..(491): "n" may be a, t, c, g, other or unknown
  misc_feature (497)..(497): "n" may be a, t, c, g, other or unknown
gtatttttagtaaagacagggtttcaccgttttagccaggatggtcttgatctcctgacctcgtgatccgcctgcctcggcctcccaaagtgctgggatctcttttttttttttcagacagagtctcactctgtcaccaggctggagtgcagtggcatgatctcggctcactgcaacctccgcctcccgggttcaagtgattctcctgcctcagcctcttgagtagctgagattacaggcacacaccaccacacccagctaatttttgtatttttagtagagacggggttcccccatgttggccaggatggtcttgatctcttgacctcatgatctgcctgccccagcctcccacaatgctgggattacaggcgtgagccaccacacctggccaacatctatctcttaagtccacgatgatttctggggatcttgnccatccacaggttttactggaaaccgnaaactatntaccggcncttgnaaatgcnggcagnt

SEQ ID NO: 6831 - DNA, 536 bp, Homo sapiens
  misc_feature (147)..(147): "n" may be a, t, c, g, other or unknown
  misc_feature (421)..(421): "n" may be a, t, c, g, other or unknown
  misc_feature (444)..(444): "n" may be a, t, c, g, other or unknown
  misc_feature (460)..(460): "n" may be a, t, c, g, other or unknown
  misc_feature (462)..(462): "n" may be a, t, c, g, other or unknown
  misc_feature (498)..(498): "n" may be a, t, c, g, other or unknown
  misc_feature (529)..(529): "n" may be a, t, c, g, other or unknown
  misc_feature (533)..(533): "n" may be a, t, c, g, other or unknown
  misc_feature (535)..(535): "n" may be a, t, c, g, other or unknown
gcctttgcacagcttttattattaagctatgagcatcctgtttgaggctagttttactagcggctatgtgcacatttgtccgcaataaaagaagtttactcattcccctgtccccttttctaatagaaggttagctttttttgttgnttttttttatttttttgcacatcccttttcactttacagtacatttgactatagtgcacaacatgattccgagtcaaaacagtggcccattgggcactgagcttctgattggtgtagggcagtccaatcagtgctggtgtcactgggttaccccaaccatgtccggccaaaatggcactacccagtggtagtgaaccatctaattaaaaccaaaactcccccagggaaaatgctacactatcagagtcagtcttgagtcagatctttatttggngctccatccagatatattttagngctttctctttacgangngagtatggtacacgatggcccagctttttggagtcnactgggtttctttttttaattagtcaatttntttngnt

SEQ ID NO: 6832 - DNA, 564 bp, Homo sapiens
  misc_feature (303)..(303): "n" may be a, t, c, g, other or unknown
  misc_feature (550)..(550): "n" may be a, t, c, g, other or unknown
gagacggagtctcgctctgtcgcccaggctggagtgcagtggtgcgatctcggcctcactgcaagctccgcctcccaggttcatgccattctcctgcctcagcctcccgggtagctgggactacaggcgcccaccaccacgcctggctaattttttgtattttgtttagtagagatggggtttcactgtgttagccaggatggtctcgatctcctgaccttgtgatccgcctgcctcggcctcccaaagtgctgcgattacaggcgtgagccactgtgtccggcctaattttttttatattgnggtaaaatatacacatgaaaatttccattttagccatttttacgtgtacaattaagtggcattaatagacaatgtgcaacggtccatttccagatctgaactattctatcatcccaaactgaaactctgtatccattaaacagtaactgatcattgcctcttccccgtaacccttggtaacttctatttctggctctatgaattggctactccagttacctcatattaggggaacatccatattggncctttggggttggg

SEQ ID NO: 6833 - DNA, 564 bp, Homo sapiens
gagacagggtgtcactctgtcacctacgctggagtgtagtggtgctatctcagttcactgcagtcttgacctcctgggctcaagcgatcttcccacctcagcccccaagtagctggagctacaggcatgcactaacatacccagctaatttttgtatttttggtagagatggggtttcgcatgttgcccagactggtctcaaactcttgggctcaagcgactagcctgcctcggcctcccaaagtgctgggattataggtgtggccactacacctggcccattgaaatatcttgaagtgcattagccattcaacacagctagcacaagatccacactaatcacttacaaatgttagtgtcaccatgcaatttttatcactaaatttatttgtaaatatttctgccttatgttatgtaaaactctctaaaggaatgtgaaaatgattataaatcatatcacaattaagaatgaggaacaaacaacacaaagaaaattattttaagaattacatacccttaccatttacaatagtggaccatatggttatagtaaatcacattaat

SEQ ID NO: 6834 - DNA, 338 bp, Homo sapiens
  misc_feature (215)..(215): "n" may be a, t, c, g, other or unknown
  misc_feature (262)..(262): "n" may be a, t, c, g, other or unknown
  misc_feature (315)..(315): "n" may be a, t, c, g, other or unknown
  misc_feature (317)..(317): "n" may be a, t, c, g, other or unknown
  misc_feature (319)..(319): "n" may be a, t, c, g, other or unknown
  misc_feature (324)..(325): "n" may be a, t, c, g, other or unknown
  misc_feature (337)..(337): "n" may be a, t, c, g, other or unknown
cttttttcttttttttttttttttttttgacagagtctcactctgttgcccaggctggagtgcagtggcacgatcttggcggctcactgcaacctccacctcctgggttcaagtgattctcctacctcagcctcccaagtagctaggattacaggcatgtgccaccaagcccgactaatttttgtatttctaatagagatggggtttcaccatgnggccaggctggtcttgaactcctgacctcaagggatccactcacctnagtttctcaaagtgctgggattacaggcatgagccactgcgcctgaccaattntngnatttnnattagagacagng

SEQ ID NO: 6835 - DNA, 569 bp, Homo sapiens
  misc_feature (392)..(392): "n" may be a, t, c, g, other or unknown
  misc_feature (418)..(418): "n" may be a, t, c, g, other or unknown
  misc_feature (426)..(426): "n" may be a, t, c, g, other or unknown
  misc_feature (462)..(462): "n" may be a, t, c, g, other or unknown
  misc_feature (482)..(482): "n" may be a, t, c, g, other or unknown
  misc_feature (509)..(509): "n" may be a, t, c, g, other or unknown
  misc_feature (524)..(524): "n" may be a, t, c, g, other or unknown
  misc_feature (529)..(529): "n" may be a, t, c, g, other or unknown
  misc_feature (539)..(539): "n" may be a, t, c, g, other or unknown
  misc_feature (547)..(547): "n" may be a, t, c, g, other or unknown
  misc_feature (566)..(566): "n" may be a, t, c, g, other or unknown
cttttcttttgagactgagtctcattctgttgcccaggctcaagtacagtgacacagtcttggctcattgcaaactccacctaccaggctcaagcaatccaactgcctcgccctcccaaagtgctgggattacacgcataactgccttcttatacccattttacttcaaattctcatgagaatagcttctatgattatttgtccctttgatagaataaattatgttgacagatttcctggtaaaaaatcatcattacatgtctgaaataaactctagtgttgatagtctagaattcttttgatacaatggcagattcaatttgctaatattttatttttacttttgaatttatattagtgagactgatctactggtttctttattaaactgntctctggcttctttatcttcccctgnataaaggnctctattttgattcacaaggtggttctttaagtttnctcaaaaaggataaactagnatctcctttcattctgacatggtggangggcccttggctganaccanggtcctggantggaagtntttggcaccggggaacggnttc

SEQ ID NO: 6836 - DNA, 570 bp, Homo sapiens
  misc_feature (524)..(524): "n" may be a, t, c, g, other or unknown
  misc_feature (553)..(553): "n" may be a, t, c, g, other or unknown
  misc_feature (569)..(569): "n" may be a, t, c, g, other or unknown
acaatttcacagcccacggtgagataattgagaccctgctgttcctggaagcactatttagacagagcaggcctcaatagatctggaacaatcttggaggaagtcatctttaacccctccctctcccttgacccactagggagagaatgagggagagagaaagaggtgaaacttacattaaacaccccttcttaccattgggaaacttcccttcttattattctttggtaattttttaaaaatatcatcatcatatctgaaataatatggatcatcagaattgcttgtatacattttttgacatgcctaatattctggtttttatggaaaatacatttgtctagtgtagagtttcctaaagtatgctatacagaatattagtaaaaattaaatgaaaaaataggacaaaatccatcactcataaatccacttttagagatgatttaaagtgtaaactaatgatttcaaggcatggtttaaagcctgggaaccccttattcaagcttacccaaaatggtatgaancaggtggaaacatggaactggtctgaagnggtggcaagggggggna

SEQ ID NO: 6837 - DNA, 571 bp, Homo sapiens
  misc_feature (495)..(495): "n" may be a, t, c, g, other or unknown
  misc_feature (555)..(555): "n" may be a, t, c, g, other or unknown
  misc_feature (571)..(571): "n" may be a, t, c, g, other or unknown
atgtataaacaggtaccagttttgattttatttaatcatttcatacattaacatacatgacacatcaaaatgagaaatgcacagtttaaccgttcaacagctggccttacttcaaaagaacactatattcatattaaacatttacagtctttccatctaactttacacatgtcctaaatcattttccagcacttctcacatagaagtctagttttgctctttaaaatcaccatctgtatcacccctagtagaaacgagggtttccccaattacatgctgaagagagccagccaccaccccacctaaagacatccaagcagctccagagcctgcctccgaggccaccccttcgccacggcagtctcgattccaagaactgattatctgacactagtgaaccagcactaaaggctgtaggatgtgactacatcacagttccagaaggaaggggaccatggccaagagaagccctaaatgacagaagctcattaaaancaagtccccaaaccttctggaacatcgtagcaaggagcttctggtttccttcttaacatngtttggctgacccccn

SEQ ID NO: 6838 - DNA, 575 bp, Homo sapiens
  misc_feature (516)..(516): "n" may be a, t, c, g, other or unknown
gttttactaaaatggtcttgttgcaaaataataacaaataccacagagagccctacatgagaaagccatgtgccttcaagcctggggatgaggactctagttctcaaattcttagaacatagcacatgattctccagggcagagaggctggctggagaatgaggacctcactgctgactctgcttaacaaagtccatgccccaggcacaggcacacatggaatgaggccaccaagcaagtcacacccacccctgttcccatgaaccccataagagagaagtgctctctgaagtctacagacttggcagggaccactggaccatggatagcttagagacagttattctgtggccaatgacataaaacctccagaatctgggccctacagttcccttatccaaatttccactaactagggaggtagaagagcaagacatggaagttgtctccaaaccagtatttggtcttcagtaaacagggataaacataaaacactggttcacaagcagacttcanacttctgggcacagcaggtggaaaaatccttaagtcccactgaccaccttccacaggag

SEQ ID NO: 6839 - DNA, 580 bp, Homo sapiens
  misc_feature (500)..(500): "n" may be a, t, c, g, other or unknown
  misc_feature (516)..(516): "n" may be a, t, c, g, other or unknown
  misc_feature (535)..(535): "n" may be a, t, c, g, other or unknown
  misc_feature (558)..(558): "n" may be a, t, c, g, other or unknown
  misc_feature (565)..(565): "n" may be a, t, c, g, other or unknown
  misc_feature (580)..(580): "n" may be a, t, c, g, other or unknown
caggctccagatgtgtttattaggctatttaaatagaaccatgtgaccatttctgtaggtaaaaggacaaagaagaattacaaacactttgggtctttcccgaattctctcccctttctctggtcaactccacccaccttcactctcaaaggaaaggcacagggggaaggaagtgagtgagggggctcagaagagtctgtgtggctcctaccaccccaaacatattctggtttcccgaagataagaggcaaggcttgctctgatctttcccagttctcagagtccagcaggccgctgtgctggacacatacatggatccaccaacatacatcagtccttctgtgttctctcctgcatggtagaggctggaagcctaagagctatattcctcagaatttcctgccagccaggatttgctttaaagtccactaatgagaggcacttctagaaaccatgattccttcttcagcagtggcagacagtaggcatgaaggttttgnaacatcttctgagcantttccagtccataatctgnttttgggcttgttggaacttganacccttngccgggagttttttn

SEQ ID NO: 6840 - DNA, 575 bp, Homo sapiens
  misc_feature (465)..(465): "n" may be a, t, c, g, other or unknown
  misc_feature (479)..(479): "n" may be a, t, c, g, other or unknown
  misc_feature (489)..(489): "n" may be a, t, c, g, other or unknown
  misc_feature (500)..(500): "n" may be a, t, c, g, other or unknown
  misc_feature (510)..(510): "n" may be a, t, c, g, other or unknown
  misc_feature (554)..(554): "n" may be a, t, c, g, other or unknown
  misc_feature (561)..(561): "n" may be a, t, c, g, other or unknown
  misc_feature (575)..(575): "n" may be a, t, c, g, other or unknown
gagacagagtcttgctctgtcacccaggctggagtccagtggtgcgatctcagctcactgcaacctctgcctatggggttcaagcaattctcatgtctcagcctcccgagtaactgggactacaggtgtgcactaccacgcccatctaatttttgtatttttagtggagatgggtttcaccatgttggccaggctggtctctgacctcaggtgatccgcccacctcagcctcccaaagtgctgggattacagatgtgagccactgcgctcagcccttttttgtcttggaagtagcagtcaaggccatctgctaaaagtaagaacagataaatttgagatttgaagagaataaaggtttaaaattactgctatagaaagcgggagaataagttgaaagtagaaatttcacaggattaccaggcaacattgagacctgagggttggtgatcaagaatttagagaggnattatcccctcttncataatgggngaactttcttnaagccatatntacacagacagttgggcttacaaaggcttggggtttttcaggcnaatgggncccaaaaccagggn

SEQ ID NO: 6841 - DNA, 560 bp, Homo sapiens
  misc_feature (482)..(482): "n" may be a, t, c, g, other or unknown
  misc_feature (529)..(529): "n" may be a, t, c, g, other or unknown
  misc_feature (559)..(559): "n" may be a, t, c, g, other or unknown
gagatggagtttccctcttgttgcccaggctggagtgcaatggtgcagtctcgactcaccaaaacctccgcctccctgattcaagcgattctcctgcctcaaccaactgagtagctggcattacaggcatgcactaccatacctggctaattttgtatttttagtaaagacagggtttctccatgttggtcaggctggtctcgaactcccgacctcaggtgatctgcctgcctcggcctcccaaagtgctgggattacaggcaggagctactgcgcctggcctaacaaactgactttttaaagcttcaagttttatcttctaagatatgttccaaagatgtatgtttttaaataggatatattccaaaatatcttacttaaatgcttcaagtatatcgtaagtaagttataaatcacattttaaaataatcaaatgtggctgggcatggtgactcacacttataatctcagcactttgggangcttaggtgggaggatcgcttgagcccaaagttcaagaccaacctgngcaacgtatggagaccccatttttttttana

SEQ ID NO: 6842 - DNA, 566 bp, Homo sapiens
  misc_feature (527)..(527): "n" may be a, t, c, g, other or unknown
  misc_feature (534)..(534): "n" may be a, t, c, g, other or unknown
  misc_feature (555)..(555): "n" may be a, t, c, g, other or unknown
  misc_feature (557)..(557): "n" may be a, t, c, g, other or unknown
  misc_feature (562)..(562): "n" may be a, t, c, g, other or unknown
  misc_feature (566)..(566): "n" may be a, t, c, g, other or unknown
gggggtggggggcagagtctccctctgtcgcccaggctggagtgcagtggcgcgatcttggctcactgcaacctccgcctcccgggttcaagcaattctcctgcctcagcctcccgagtagctaggactacaggcgtgtgccaccacgcccggcaaattttttgtatttttagtagagatggggtttcaccgtgttagccaggatggtctcgatctcctgacctcatgatccgcctgccctggcctcccaaaatgctgggattacaggcatgagccaccgcgcccggccggaaaacaaatttaaatgtcaaccatgacagggcagatgagacaaactaaaattacttttcatttcaattatcaaaaacaattagatctatttcaagaaaatatttttgctaagtaaattttcttttaatagctttaatcttataatacacatacatatttaagaatttagtggtatcacaaaataattattttattatttccacctaaaggataatgagtttggctaatatagtctnggggttnaaattcagcttaaccgcattntnaattnggcn

SEQ ID NO: 6843 - DNA, 503 bp, Homo sapiens
  misc_feature (434)..(434): "n" may be a, t, c, g, other or unknown
  misc_feature (468)..(468): "n" may be a, t, c, g, other or unknown
  misc_feature (473)..(473): "n" may be a, t, c, g, other or unknown
  misc_feature (486)..(488): "n" may be a, t, c, g, other or unknown
  misc_feature (500)..(500): "n" may be a, t, c, g, other or unknown
ggtattttttagtagagatggggtttcaccatgctgtccaggctggtctcgaactcccagcctcaggtgatccacctgccttggcctcccaaagtgctgggattacaggcatgagccaccatgcccagcctaaagctgatctttttaaagaggaaaaacaaaccaaccaggggcctgaggatgtctggtttgggttctggggaagtggaccctgaaagggtttgcaggcgacggctcctttgggaggggtccccagaagcacaggagggcactgaggcaggaggggaggctgtgccaggaagagggctgctcgctgggggtgatggggcatgagcccacagggagttctgggaaacactgagcacacgccacagacagcatggcccatggcggcctcggaggaacttgaaagggtcctgggtacagtgcaagtnggaaaagaaggggcaggaatcccagcctggccancccanatgggaaaaccannnttcggggcctangcc

SEQ ID NO: 6844 - DNA, 498 bp, Homo sapiens
  misc_feature (301)..(301): "n" may be a, t, c, g, other or unknown
  misc_feature (435)..(435): "n" may be a, t, c, g, other or unknown
  misc_feature (440)..(440): "n" may be a, t, c, g, other or unknown
  misc_feature (461)..(461): "n" may be a, t, c, g, other or unknown
  misc_feature (479)..(479): "n" may be a, t, c, g, other or unknown
  misc_feature (488)..(488): "n" may be a, t, c, g, other or unknown
  misc_feature (492)..(492): "n" may be a, t, c, g, other or unknown
  misc_feature (494)..(494): "n" may be a, t, c, g, other or unknown
gagacggagtctcgctctgtcacccagtctggagtgcagtggcgtgatctcgactcactgcaagctccgcctcccgggttcatgacattctcttgcctcagccacccgagcagctgggactataggcgcccgccacaacgcctggctaattttttgtatttttagtggagacggggtttcaccatgttagccaggatggtctcaatctcctgaccttgtgatccaccacctcggcctcccaaactgctaggattataggtgtgagccaccgcgcccgacccaaaatcttctttattattgnttttttatttttattttttgagacggagtctcactctgttgcccaggctggagtgcagtggcgcgatctcggctcactgcaagctttgcctcctgggttcacgccattctcctgcctcaggaggtcaagatcancccgnttgacatattgaaaccctggntctatatttttaccaatnaaaacttcnaatnanggtt

SEQ ID NO: 6845 - DNA, 568 bp, Homo sapiens
  misc_feature (449)..(449): "n" may be a, t, c, g, other or unknown
  misc_feature (503)..(503): "n" may be a, t, c, g, other or unknown
  misc_feature (550)..(550): "n" may be a, t, c, g, other or unknown
  misc_feature (554)..(554): "n" may be a, t, c, g, other or unknown
  misc_feature (558)..(558): "n" may be a, t, c, g, other or unknown
  misc_feature (566)..(567): "n" may be a, t, c, g, other or unknown
gagacggagttttgctcttgttgcccaggctggagtgcaatggtgcgatctcggctcaccacaaactccgcctcccgggttcaaacgattctcccgcctcagcctcccaagtagctgggattacaggcatgcgccaccatgcctggctaattttggtattttcagtagagacagggtttctccatgttagtcaggctggtctcgaactcccgacctcagatgatccgcccacctcggcctcccaaagtgctgggattacaggcgtgagccaccacgcccagcctaaagaaatctttaaaaatattttctggtgctctacatgttcagagaaatttctctagtaatgaactatagaaatgattcctgaaagtacagtcttaacagcaccatttaaatcaggggtcctatgtatggtcataactagccaggctttaagaggtttgcagctnacacaggcgaaataaaaaccaggagtttggtgtgcatgaatacaaaattggggnaaggttctgaagaaaaagtccatggcctcatcatattcccaagaagntgtnagcnccaaaaannt

SEQ ID NO: 6846 - DNA, 541 bp, Homo sapiens
  misc_feature (174)..(174): "n" may be a, t, c, g, other or unknown
  misc_feature (189)..(189): "n" may be a, t, c, g, other or unknown
  misc_feature (215)..(215): "n" may be a, t, c, g, other or unknown
  misc_feature (225)..(225): "n" may be a, t, c, g, other or unknown
  misc_feature (457)..(457): "n" may be a, t, c, g, other or unknown
  misc_feature (461)..(461): "n" may be a, t, c, g, other or unknown
  misc_feature (488)..(488): "n" may be a, t, c, g, other or unknown
  misc_feature (513)..(513): "n" may be a, t, c, g, other or unknown
  misc_feature (534)..(534): "n" may be a, t, c, g, other or unknown
  misc_feature (538)..(538): "n" may be a, t, c, g, other or unknown
  misc_feature (540)..(540): "n" may be a, t, c, g, other or unknown
aagagacagggtctggctctgtagcctaggctggagtgcagtggcgtgaccacagctcactgcagccttgaactcctggattcaagtgatcctctcacctcggtctcctgagtagctggaaccacaggcgtgtgccaccatgcctggctaatataatttttttttttttttganatggagtcttgctgngttgcccaggctggtcttgaactcgnggcctcaagngatcctcccaccttggcctcctgaatagctaggattacaggcgtgaaccaccaaccctgaccattttgatttttttaaaacagactatcagaaaagaaaagtttagagaaattgtggaaacatgccttagggtagggccttcccagcttgccgtgagagggccctgcctgcctccgcatctaggaagcacaggcccgtcaggtgtgaatgtccccggcctgtcttctccctntcanaacaggccaccattatttttctttganatttggctacactggcttttttaancctcttttggctatgcttaangctntnt

SEQ ID NO: 6847 - DNA, 578 bp, Homo sapiens
  misc_feature (344)..(344): "n" may be a, t, c, g, other or unknown
  misc_feature (487)..(487): "n" may be a, t, c, g, other or unknown
  misc_feature (511)..(511): "n" may be a, t, c, g, other or unknown
  misc_feature (513)..(513): "n" may be a, t, c, g, other or unknown
aagacggagtctcaccctgtcacccaggctggagtgcagtggtgtgatcttggcacactgcaacctctgcctcctgggttcaagtgattctcctgccccagcctcccgagtagctcggattacaggtgtgtgccagcacaccaggctaatttttgtatttttagtagagacagcgtttcaccatgttagtcaggctggtcttgaagagaaggatacattttttaaattacataattaagagagaccttgtgctataagagaaacaagactgacaataattttaaaaaacagcataacattataagttgtactagtttggaaaaaagcacaactctctcccttgntccttaatttagctttgatgttatgacacatcatataaactgcagtattccatgtaagttaagcacaacccaattatttacctgaataaaattaaggccaaacaaaatggaaaacatatttgccatctaatatttccatggtnggtggttaaggttcatgaagctgncntattgaagaaagaatcagaattgtaaggcaaaaataggtctaagttagaagaatgcctttgggaa

SEQ ID NO: 6848 - DNA, 578 bp, Homo sapiens
  misc_feature (430)..(430): "n" may be a, t, c, g, other or unknown
  misc_feature (507)..(507): "n" may be a, t, c, g, other or unknown
  misc_feature (532)..(532): "n" may be a, t, c, g, other or unknown
  misc_feature (536)..(536): "n" may be a, t, c, g, other or unknown
  misc_feature (549)..(549): "n" may be a, t, c, g, other or unknown
ggcacatttcagccaaattcatatttattccagtctctaacactctgttgttatgtctgctgtaagatgatcaggagttagtatgaagtattcttctctacgcaccaaagaaaacaaacaaagcaaacttcaagtcagtgaattagttaccacagttaaaatgcatttgattttgtccttttcctttttcacaagaacgacagctgaatactctttcatgtgatgcctgatatttttctttttctttttctctcttttttgagacagggtctttaagatggggtctcgctctgttgcccaggttggagtgcagtggtgcaatcttggctcattgcaacctcagcctcctgttttcaagtgattcttctgactcagcctcccaggtagctgggattacaggcatgtgccaccgtgcccggctaatttttgnatttttagtagagaaggggggtttcaccatgttggccaggatggtctcgaactcctgacctgaagtgatccacccgncttggcctccaaaggctgggaatanccgngtgagccctgtgncaggctctgaggtggaaattttctggtac

SEQ ID NO: 6849 - DNA, 585 bp, Homo sapiens
  misc_feature (547)..(547): "n" may be a, t, c, g, other or unknown
  misc_feature (553)..(553): "n" may be a, t, c, g, other or unknown
  misc_feature (570)..(570): "n" may be a, t, c, g, other or unknown
  misc_feature (572)..(572): "n" may be a, t, c, g, other or unknown
aaggtatttattaaccttagtagatgactaaaggaagaaacacacatacaaaagtctggtcctaccaatgggcttagcttccccaggaaccaggaaattttactctcccacccctataaccactgttgcaaaatggctttctcttccactgaccaggtttctcatgcccaccctttgctaggtaaagagtagtaaaagagaaaatggccaatgaaaaggagggggaaacactttttaaaaataactatattttcaggacaggctctgtgtgagatacactctaacgtggggacacgccacagtcctcagtggcccctgcccatcctcccaactcactgtacagaaacactctatggaggccaatatttgattctagaagccagtgtccctcaacccaacttctgcaactccatacccaacaaatgatgctcaaaaacaaaagcagctattttaagatcactaaacactggctggtgatggcaaaactggggctttccttattcttttcttcattttgcttttatcaggccctggccttctactttcntaaaangaatttactccaaattntngggaagaaatctt

SEQ ID NO: 6850 - DNA, 588 bp, Homo sapiens
  misc_feature (555)..(555): "n" may be a, t, c, g, other or unknown
  misc_feature (565)..(565): "n" may be a, t, c, g, other or unknown
gagttccaggatacaggtgcagagtgtggaggtttgttacataagtagatgtgtgccatggtcgtttgttgcacctatcaacccattatctaggttttaagccccatatatgttagctatttgtcctaatgctttctctcccctcacccaccaaccgccctcaagtcagttttctaagagtattaatcaagaaaccatctcataatcacaccaaagcatatttctacacaagatataaaatactaggatatttgctaaagataaatgcatgccatacactgtaacaatggaaatgacttcctacaggataacaatgctaaaattaaactctttgtaattagtaaagatgaacatgtgggtaatatattgtatatattttttaaactattttttgcctcagtaaagagagagcttagataccttgtgtcataaaataataaagcaaaaataacatttctatgtgaacatttttaaaggttttaaaattcatcctgggctgggtgtaatggcttgctcaccctgtaatccagcactttcagaagcttaagggggtgnatcacttganggcaggagtcaagaccagcccgg

SEQ ID NO: 6851 - DNA, 578 bp, Homo sapiens
  misc_feature (448)..(448): "n" may be a, t, c, g, other or unknown
  misc_feature (475)..(475): "n" may be a, t, c, g, other or unknown
  misc_feature (484)..(484): "n" may be a, t, c, g, other or unknown
  misc_feature (496)..(496): "n" may be a, t, c, g, other or unknown
  misc_feature (538)..(538): "n" may be a, t, c, g, other or unknown
  misc_feature (561)..(562): "n" may be a, t, c, g, other or unknown
cttttgtctttttttttattgtactctaagttttagggtacatgtgcacagcgtgcaggtttgttacatatgtatacatctgccatgttggtgtgctgcacccattaacttgtcatttaacattaggtatatctcctaatgctatccctcccccgaccccaaccccacaacaggccccggtgtgtgatgttccccttcctgtgtccatgtgttctcattgttcaattcccacctatgagtgagaacatgcagtgtttggttttctgttcttgtgatagtttgctgagaatgatggtttccagcttcatccatgtccctacaaaggacataaactcatcatttttatggctgcataatactttttcatttgtttgtataatctctgatctctttcagcagtgttttgtaatcctcattatagagagctttcacctccctggttagctgnatttctaggtattttatttttttttgnacatattgngaatgggaatgngttccttaattggctctcagcttggatggtctttttatacanggatgctagggattttttatggnnaatttggatccggaac

SEQ ID NO: 6852 - DNA, 558 bp, Homo sapiens
  misc_feature (481)..(481): "n" may be a, t, c, g, other or unknown
  misc_feature (490)..(491): "n" may be a, t, c, g, other or unknown
  misc_feature (515)..(515): "n" may be a, t, c, g, other or unknown
  misc_feature (518)..(518): "n" may be a, t, c, g, other or unknown
  misc_feature (526)..(526): "n" may be a, t, c, g, other or unknown
  misc_feature (557)..(557): "n" may be a, t, c, g, other or unknown
gagatagcgtctcaccctgtcacctaggctaccgtgcattctcagctcactgcaacctccatctcccaggttcaagtgattctcctgcctcagcctcccaagtagctgggattacaggcatctgccatcatgcctgtctaattttttgtatttttagtaaagatagggtttctccatgttggtcaggctggtctcaaactcccgacctcaggtgatccgcctgcctcgacctcccaaagtgctgggattacaggcctgagccactgctcatggccagttctttcattttttgagtttctgtttctgatctaaagtttaccactggtttccaatttgtttgtgaagcagagaatattgacacacttttagttgcttgcataattcattcctttcctataagattatagactcttcctatttccccagatccttttaaaggtctctaatctttgaaagtttggtacataactggtcatactgnacacatacnnggcacaataaccatcactgagtanaanggtaatcnttcactaatagccctaagaaagaaatgctgna

SEQ ID NO: 6853 - DNA, 575 bp, Homo sapiens
  misc_feature (455)..(455): "n" may be a, t, c, g, other or unknown
  misc_feature (470)..(470): "n" may be a, t, c, g, other or unknown
  misc_feature (494)..(494): "n" may be a, t, c, g, other or unknown
  misc_feature (509)..(509): "n" may be a, t, c, g, other or unknown
  misc_feature (540)..(540): "n" may be a, t, c, g, other or unknown
  misc_feature (567)..(567): "n" may be a, t, c, g, other or unknown
ggtttctttattccattttattatttattaagactgttaacaaaaaataggctttatttttcctctgaacttaaaaactataaatttacttgggtcactaacagtgctctcagtctgagagaaaataacataataacaacaataatgaacaaagcacttagcatgtgccaggcactgttctaggtgcttttacctattcagtcattacttttcacaacagctctgtgaggtaagtactatttcatacaaactttttcttttggagagggagggagggagggagggagacagcacctgcgggagactgggcaggatctctcctatgaagtcagaacaactattgcctgtggcaaagtacccagcactgtctcccactaagcctcactaatttatcttagtctgtacatgtaagaatcctctaatacaccaaccttggaccagtttctcattctcgntcaagggtttggaangtgagcagcaagctgcttttggangcactaaacttgggnggtgctgggatataaagccttcccagatgcntgactatccgttcataacttttaagcnacgggtag

SEQ ID NO: 6854 - DNA, 486 bp, Homo sapiens
  misc_feature (478)..(479): "n" may be a, t, c, g, other or unknown
  misc_feature (482)..(486): "n" may be a, t, c, g, other or unknown
gcaagttaaattacatttattatataaagagatcctataacttgatacgaaaaacaaagcaactccaacagataacagaagggcaaaaggacaggaacatttgatcaaagaaacacagctaccgatagcacacaaatattcaacctcattaataatcaaaggattaggatgcacttcttgcttattcaataaagttaataatttctaatttttctacttttcaaatgtactcaaatgtgctatttttagtaataaaaaactgagtaattaaaaaaacatagaaagtatgaaaatttctgccaatgcagaaatcataaacagcattaaaatgaatcaacacttgtatgggcagtaaggttcagacccctagaagccaattcattttgccttggttcctgagttttattatgggattgtcaataaggagaaagttgttcctgatttacatgctgacaatcttccaggtataggggggggnngtnnnnn

SEQ ID NO: 6855 - DNA, 573 bp, Homo sapiens
  misc_feature (572)..(572): "n" may be a, t, c, g, other or unknown
cccaaatacaacttttattatccaaaatcatcttggaaggactttttctaatatgcccattttctaaataagattaaccatttgatgggaatatttccaattgtatcacctccttccttgactttttcttcatcaacttagggcctgggttgtaggcactgtggctctttgggatagttaaatgggtgcaatttggctgagaccgcccctgtcttaaatggcccaggctacagggcttgccaaatggctttggtttgcaacctcttcctttgatatccattgaagaacacatgtcctaccctcttgattgcaagcttctatctgctattggctatcaggagcataacagataagttctaaggtccttccagttccaaaagccattgaccaaccctgtgaggcactatgagagattggagattactgaggaatctcttccaataacatatgatatataaaggtaattgtgattctatgaagagtgaataaaaattgaaaacaaaaccatctggttaaaactattaaatgaagttttaaaaataatggatgggtaaatgaatggccatcaaatna

SEQ ID NO: 6856 - DNA, 583 bp, Homo sapiens
  misc_feature (569)..(569): "n" may be a, t, c, g, other or unknown
  misc_feature (582)..(582): "n" may be a, t, c, g, other or unknown
gagataaggtcttactctgtcacccaggctggagtgcagtggcacaatctcagctcactgcaacttttgcctcctggactttggcaatcctcccacctcagcctcccaagtagctgggaccacaggcatacaccaccatgcccagctaattttttttttttttttgtagaggtgggggtttcaccatattggccaggctggtctcgaactcctgagctcaagcgatccacccacctaggcctcccaaagtgctgggattacaggcatgcaccaccaggcccagccacatctgattttagggggattcctctgaacacgtcaccagtcagtgtgagatctgcatgaagtatttggttgagagcccttatctggtgaaggaagatccctactattcttaatttgctgaggggttttataatcaaaggagattgaattttattgacttccttttctgcatcaattgagatgatcatttggtctttctcctttaatctgcaatgtggtgtattttggtaatagattttttgatgtggaatcatccttgaattggaggataagtccaacttggncatgttggatttnt

SEQ ID NO: 6857 - DNA, 582 bp, Homo sapiens
  misc_feature (518)..(518): "n" may be a, t, c, g, other or unknown
  misc_feature (557)..(557): "n" may be a, t, c, g, other or unknown
  misc_feature (559)..(559): "n" may be a, t, c, g, other or unknown
  misc_feature (566)..(566): "n" may be a, t, c, g, other or unknown
aatgaatcactgcttttcctttattgataggtcagagagcatttcctggcacccccagggtacagccccctgactcctgctacccaagaaggccatcctttcctgcctgtgatactccgtggcatctgttctgccagaggactgaccctttgtgctccacatatgttttgccaggaaacacttatctcagccacaaaccgtccctgtcctccaaaagactcagagctgcttacaaggggctgctttggtcagtcagctgttagtcctggggctcttgcctcctctgtgggggtagcatcagtcaccctaaagttctcaggccgccgctagctagtgagttacaagattttagaaaccagctcttgtccacagatcctcaggcccctggttcttggatccagaggcgtctgaggtatgttcacaggcacctgctgctgctgctgctgctgctgctgcctctgctcttgccctcagtccccgtctttccacctgggtccccttgcactttcatgcctgangctgcactggtggccaagtctaaactgagggtcttccgnanaccgaanccgccgaacgccttgg

SEQ ID NO: 6858 - DNA, 577 bp, Homo sapiens
  misc_feature (450)..(450): "n" may be a, t, c, g, other or unknown
  misc_feature (528)..(528): "n" may be a, t, c, g, other or unknown
  misc_feature (543)..(543): "n" may be a, t, c, g, other or unknown
  misc_feature (572)..(572): "n" may be a, t, c, g, other or unknown
gagacaaagtctcactgtcgcccaggctggagtgcagtggtgtgatctcggctcactgtaacctccacctcccaggttcaagcgattctcctgcctcagcctcccaagtagctgggattacaggcgagcaccaccatggccagctaatttttctatttttagtagagacggagtttcaccatgttggccaggctggtctcgaacccctgacctcaggtgatccacctgccttggcctcccaaaatgctgggattacaagtgtgagccaccgtgcccagccattttttttttttttgagacagggtcttgctctgttgcccaggctacaatgcagtggcgtaatcatggctcatgcatcctcaccctcccaggctcagatgatcctcccatctcagcctcccaagtagctaggactacaggtgcacgttgccatgcctggctaaattttgngttttttgtagagatggggtcttgccaagctgcctaggctggtctggaactcctgggctcaaatgatctggccacctnagcttccaaagtgtnggaatacaggcttaaccatgggccggcanaattc

SEQ ID NO: 6859 - DNA, 589 bp, Homo sapiens
  misc_feature (435)..(435): "n" may be a, t, c, g, other or unknown
  misc_feature (461)..(461): "n" may be a, t, c, g, other or unknown
  misc_feature (499)..(499): "n" may be a, t, c, g, other or unknown
  misc_feature (540)..(541): "n" may be a, t, c, g, other or unknown
  misc_feature (549)..(549): "n" may be a, t, c, g, other or unknown
  misc_feature (559)..(559): "n" may be a, t, c, g, other or unknown
  misc_feature (581)..(581): "n" may be a, t, c, g, other or unknown
gagactaagtcttgctctgtcacccaggctggagtgcagtgacacgatcacagctcacttcagccacctcatcagactaattttttttctttttttgaagagatggggtctagctatgttgttcagactgttcttgaatttctggcctcaagcaatcctcccacgttggcctcccaaagtgttgggactacaggcatgagccactgtacctggcccaaaggctttcttgaccctccagttcacaaggatctctccattctgtacattcacagcacttacaggataggcctacattcaactggcacttcatcctatatgccttgtggcagctcttagagtattattttactgcacttttatataactcatgaattgttatatgaaatttctatggatgataagtccagcaaaaaggaatatttaatttttaattgngatctgattcatatatcatatctctncaattacaggctcctgggaagtggtaacaggggctttnagcttcctgggattttccaatggacttacaccccagtgctnnggcccccnggaaaatggncaggaagcatttgccggggaantggaatga

SEQ ID NO: 6860 - DNA, 574 bp, Homo sapiens
  misc_feature (445)..(445): "n" may be a, t, c, g, other or unknown
  misc_feature (492)..(492): "n" may be a, t, c, g, other or unknown
  misc_feature (511)..(511): "n" may be a, t, c, g, other or unknown
  misc_feature (522)..(522): "n" may be a, t, c, g, other or unknown
  misc_feature (549)..(549): "n" may be a, t, c, g, other or unknown
  misc_feature (557)..(557): "n" may be a, t, c, g, other or unknown
  misc_feature (572)..(573): "n" may be a, t, c, g, other or unknown
gttgagacggagtctcgctcttgttgcccgggctgaagtgcaatggcaccatctcagctcaccgcaacctccatctcctgggttcaagcaattctcctgcctcagcctcccgaatagctgggattacaggcatgcgccaccatgccctgctaattttgtatttttagtagagatggggttctccatgttggtcatgctggtgttgaactcctgacctcaggtgatccgcctgcctcggccttccaaagtgttgggattataggcatgagccaccatgcccggctaaagcccagtctctttattacaccatgtggattcctgactgctttatgtgggacccaatccttgtcacctccagcaacccctctgcttgtcctgcatggatttgcctgcctggaagtagggctgtgcccgtgcctgtgcccgaagcctccctcctgaacangctggactcacgcattgaggtctgcgcctttcttcaacaggtagtanatgcaggggaagggccacngtggtggttgnccctggggatgacaaggtcaagggtgnctggcttntggtgggcaacaagnnc

SEQ ID NO: 6861 - DNA, 586 bp, Homo sapiens
  misc_feature (366)..(366): "n" may be a, t, c, g, other or unknown
  misc_feature (473)..(473): "n" may be a, t, c, g, other or unknown
  misc_feature (548)..(548): "n" may be a, t, c, g, other or unknown
  misc_feature (551)..(551): "n" may be a, t, c, g, other or unknown
  misc_feature (553)..(553): "n" may be a, t, c, g, other or unknown
  misc_feature (560)..(560): "n" may be a, t, c, g, other or unknown
  misc_feature (585)..(585): "n" may be a, t, c, g, other or unknown
gggctcttacaaactttattttacctccatttagcactggtttcacccccatggcactgtttggcaatggatctttctctctaatgacagtctaagttaggtgagactgggtatcttggcctactccttcctgcaaccccatgacgcagttcaggaggaggggctcgcagttcaggagttaatgcgtgttcaggagcaggggctccaagcactgcattcctggggcccccctctggttccacacctttgctcttgccattaccttagattctatgcccttccctcctttctttacctgtctaaatcctacctgtcctctagagctggttcaaggccagcttctaccagggagcctacagtgattgntccttccttggaattccctcagcctttcctagtcatcaacatttcctggggtgtggagtgctttcctacagaccaggtatcccaaaggttgggcccaagtcttccgntgcaacaaggcatgccaatggggaggaaaggagacagtgcttggaagggaaggagatcctgaaactttggggaanaananttggggncaaacttaatcagaaagggggcctnt

SEQ ID NO: 6862 - DNA, 582 bp, Homo sapiens
  misc_feature (430)..(430): "n" may be a, t, c, g, other or unknown
  misc_feature (487)..(487): "n" may be a, t, c, g, other or unknown
  misc_feature (543)..(543): "n" may be a, t, c, g, other or unknown
  misc_feature (547)..(547): "n" may be a, t, c, g, other or unknown
gagacagagttttactcttgttgcccaggctggaattacaggcatgtgccaccatgcccagctattttttttgtatttttattagagacggggtttctccacgttgatcaggctggtctctttttttttttttttttgagacggagtctcgatctgtcacccaggctggagtgcagtggcgcgatctcggctcactgtaagctccgcctcccgggttcacacattctcctgcctcagcctcccgagtagctgggactacaggcgcccgccaccacatccggctaatttttttgtatttttagtagagacggggtttcaccatgttagccaggatggtctcgctctcctgagcttgtgatccgcctgcctcggtctcccaaagtgctgggattacaggcgtgagccactgcgcccagcctttattttattntattttatttttgagacaaagtctcactctggtgcccaggctggagtacagtggtgngatctcgggtaaccacaaccttcaccttcctggttcaagggattctctggcttaancttnccaagtagctggaattaccggggccgggcaacaac

SEQ ID NO: 6863 - DNA, 588 bp, Homo sapiens
  misc_feature (480)..(480): "n" may be a, t, c, g, other or unknown
  misc_feature (505)..(505): "n" may be a, t, c, g, other or unknown
  misc_feature (531)..(531): "n" may be a, t, c, g, other or unknown
  misc_feature (548)..(548): "n" may be a, t, c, g, other or unknown
  misc_feature (551)..(551): "n" may be a, t, c, g, other or unknown
  misc_feature (561)..(561): "n" may be a, t, c, g, other or unknown
  misc_feature (581)..(581): "n" may be a, t, c, g, other or unknown
  misc_feature (584)..(584): "n" may be a, t, c, g, other or unknown
ctttttgagacggagtttcgctgttgttgcccaggctggagtacaatggcatgatctcggctcactgcaacctccgcctctcgggttcaagcgattctcctgcctcagcctccggagtagctgggattacaggcatgcaccaccacgctcagctaattttgtattttgagcagagaaggggtttcaccatgttgaccaggctggtcttgaactcctgaactcaggtgatccacccgcctcatcctcccaaagtgctgggattacaggtgtgagccaccgtgcccagcaaaagacttttgatgcttaaacagaaacatatatttcatgctttggtttacaagttatatggtaagcaccccgctccccaaccaaaggaaagtctacccaagtactagaaaagaaagactgaaaaggaacaagcacgttaacatctctttggatctataaaaaggtattcactcaaattcaagacttttggangggttttggaataaaaatggtttgnaagggcacaagtggaaggttaaaganggaaggaaatcccaagnggnttaacagtcnaagaccggtttgttttgganaanaaac

SEQ ID NO: 6864 - DNA, 585 bp, Homo sapiens
  misc_feature (506)..(506): "n" may be a, t, c, g, other or unknown
  misc_feature (508)..(508): "n" may be a, t, c, g, other or unknown
  misc_feature (521)..(521): "n" may be a, t, c, g, other or unknown
  misc_feature (542)..(542): "n" may be a, t, c, g, other or unknown
  misc_feature (572)..(572): "n" may be a, t, c, g, other or unknown
  misc_feature (579)..(579): "n" may be a, t, c, g, other or unknown
gagacggagtcttgctctgtcaccaggctggagtgcagtgacacgatcttggctcactgcaacctccgcctcctgggttcaagcgattctcctgcctcagcctcctgagtagctgggactacagccgtgcgccaccacgcctggctaattttttgtattttagtagagatgtggtttcaccatgttggccaggatggtctcgatctcctgaactcgtgatctgcccgcctcggcctcccgaagtgttgagattacaggcgtgagccaccgtgccagccgggcctcctttttttgctggtttccttcctgttttttcagaagggaccactccaggagtcagaaaagaacacacactatgaaacttaccccaaactcagtaatgctggaagcgccatacttattgcaaaaagtagcaggactcttgctccccagggttggcaagatgccagcaacaggattccaaaagcccacggaaatgctggcttcacaaggcccaaagtcccaangngcttaaccgaacnttttccttaaaacactggtgncccttaaaaaaacttaaaataagcttttgncccaaanagaaat

SEQ ID NO: 6865 - DNA, 576 bp, Homo sapiens
  misc_feature (412)..(412): "n" may be a, t, c, g, other or unknown
  misc_feature (478)..(478): "n" may be a, t, c, g, other or unknown
  misc_feature (489)..(489): "n" may be a, t, c, g, other or unknown
  misc_feature (498)..(498): "n" may be a, t, c, g, other or unknown
  misc_feature (527)..(527): "n" may be a, t, c, g, other or unknown
  misc_feature (530)..(530): "n" may be a, t, c, g, other or unknown
  misc_feature (538)..(538): "n" may be a, t, c, g, other or unknown
  misc_feature (576)..(576): "n" may be a, t, c, g, other or unknown
ccactagtcgtgcattggagatggcaggtttgaaatgcctaacagttgaagagactcgacactgctgctctgtgcacagatgtgggatttcttacacctttttagtcagacctacttagctgccttttgcatttttcaatgctgacatgtttcagtaaaactttgactaactagaatacttgggggaagggggttctggttgaatgatttcctggttaaactaaaagttatttagaaagccctttttattgaaaatctttccaaagtatatcagcatacttttctctggagcgaggcggcactgtcagagaaaaattgtacagtatgtagctgtttggaaggactgtgaaacaaatttagcaaagctgctaactgcttatcactcctttctctagctggaaagcagcacctntcagtatccctgaggtagctaaaccctactactctcttcaaaaattaatttggccttttaagcaanaaaccctggantcttatcanggggacaaaccaaaggtcctgggggccanaanccttaacntttaatccttaaaaccttcagggtttaattccttcaan

SEQ ID NO: 6866 - DNA, 564 bp, Homo sapiens
  misc_feature (436)..(436): "n" may be a, t, c, g, other or unknown
  misc_feature (470)..(470): "n" may be a, t, c, g, other or unknown
  misc_feature (530)..(530): "n" may be a, t, c, g, other or unknown
  misc_feature (543)..(543): "n" may be a, t, c, g, other or unknown
  misc_feature (563)..(563): "n" may be a, t, c, g, other or unknown
gagacagagttttgctcttgttgcccaggctgaagtgcaatggcgcgatcttggctcactgcaacctccgcctcccgggttcaagcgattctcctccctcagcctcccgagtagctgggattacaagcgcccgccaccacacccagccaatttctgcatttttagtagagacggggtttcaccactgtggccaggctggtctcgaactcctgacctcaggtgatccacccgcctcggcctcccaaagtagtgggattacaggtgtgacccaccgcacctggccaatttcccctttttatatgaacctcagtaaggtaggctttctgttctttggatgccacaaaaaaaaattcttaaccgatacagctaggaagtcaggattccaacttgaaactctgattccagaacccgtgagctgaattccattcctccctgnttctctctttcttttgctctctttgctacactgnagcacatcagtggccacgctgatcttcgaagttcctcaaacgacccattcttctggccanaaaaaagccttgntctttccttggctgaggaant

SEQ ID NO: 6867 - DNA, 574 bp, Homo sapiens
  misc_feature (437)..(437): "n" may be a, t, c, g, other or unknown
  misc_feature (493)..(493): "n" may be a, t, c, g, other or unknown
  misc_feature (496)..(496): "n" may be a, t, c, g, other or unknown
  misc_feature (501)..(501): "n" may be a, t, c, g, other or unknown
  misc_feature (503)..(503): "n" may be a, t, c, g, other or unknown
  misc_feature (508)..(508): "n" may be a, t, c, g, other or unknown
  misc_feature (528)..(528): "n" may be a, t, c, g, other or unknown
  misc_feature (574)..(574): "n" may be a, t, c, g, other or unknown
gagacggagtgttgctctgtcgctcaggctggagtacagtggcagaatctcagctcactgcaacctccgcctcccgggttcaagcgattctccagcctcaggctcccgagtagctgagactacagacacctgccaccacgcccggctaatttttttctattttcagtagaaaaggggtttcaccatgttagccaggctggtctcgaactcctgaccttgcgacccacccgcctcggcctcccaaagtgccgggactacaggcgtgagccactgtgcctggctatacttgtctttaacagtggtaggaaaacatatgggatgataagagtttttaagggtaaatgaaagcacctaagaaattatctaaaagtacttcaatactttatggatgagaaaacaaacgaccagagaaagttacgtgactggcctaagattgngtaaataaagtctacctctactaatccctggttcaatgatatttctctgggttggnaanggctncntttantaatcagtaccaaccaattntgatctgggaaaaaaggaaaatgaaaaattttaaggctaccgctcn

SEQ ID NO: 6868 - DNA, 576 bp, Homo sapiens
  misc_feature (323)..(323): "n" may be a, t, c, g, other or unknown
  misc_feature (484)..(484): "n" may be a, t, c, g, other or unknown
  misc_feature (523)..(523): "n" may be a, t, c, g, other or unknown
  misc_feature (556)..(556): "n" may be a, t, c, g, other or unknown
  misc_feature (565)..(565): "n" may be a, t, c, g, other or unknown
ggtagagataggatttccctatgttacccaggctggtttcaaactcctgggctgaaggaatccttccatctcagcctcttaaagtgttgggattacaggtgtgagccattatgcccagcccctcattattattatttaaagaaagctaggacattttcactatttttttaagaactcttttctaatcatcatatgctagaaactgagaaggaactcttcattgattattatttcttcttggactcatgagttatttagaagaatgtttcttaatttcaaaatttgggaaaatatatattagttttttttgtttttgtttttgnttttattgatcattcttgggtgtttctcccagagggggatttggcagggtcataggacaatagtggagggaaggtcagcagataaacaagtgaacaaaggtctctggttttcctaggcagaggaccctgcggccttccgcagtggttggggtcattgggtncttgagattagggagtgggggatgactcttaaccgagtntgccggcctttcaacatctgtttaccaaagccncattttgcnccaccttaatt

SEQ ID NO: 6869 - DNA, 583 bp, Homo sapiens
  misc_feature (442)..(442): "n" may be a, t, c, g, other or unknown
  misc_feature (478)..(478): "n" may be a, t, c, g, other or unknown
  misc_feature (480)..(480): "n" may be a, t, c, g, other or unknown
  misc_feature (482)..(482): "n" may be a, t, c, g, other or unknown
  misc_feature (541)..(541): "n" may be a, t, c, g, other or unknown
  misc_feature (549)..(549): "n" may be a, t, c, g, other or unknown
  misc_feature (559)..(559): "n" may be a, t, c, g, other or unknown
  misc_feature (577)..(577): "n" may be a, t, c, g, other or unknown
ggagatggagtctggctctgtcacccaggctggagtgcaatggcgtgatctcagctcactgcaacctccgcctcccgggctcaagcgattctcctgcctcagcctcccgagtagctgggactacaggcacgtgccaccacgcccagctaatttttgtattttttagtagagacaggtttcaccattttggccaggatggtttctatctcttgacctcgtgatctgcccgcctcggcctcccaaagtgctgggattacaggcgtgagccaccacgcctggcctctacaataattcttaaatttatacttatgcatatggacatatctaatcagaaagaataacttccagttccctttcatatagaatgaagaattatgaacattttaagtttcactctctccagatttttcttattcatgactactttacctggatgtcctantttgcttgctctttcaaggtgtgtgtgtgtgtgtgngngngtgtacaatcatgccaagttggatcttttatctggaaaagcccatcttacacatattcnccaagggnaatttttaanggactgccagaaaaaaantttgga

SEQ ID NO: 6870 - DNA, 577 bp, Homo sapiens
  misc_feature (356)..(356): "n" may be a, t, c, g, other or unknown
  misc_feature (432)..(432): "n" may be a, t, c, g, other or unknown
  misc_feature (487)..(488): "n" may be a, t, c, g, other or unknown
  misc_feature (554)..(554): "n" may be a, t, c, g, other or unknown
  misc_feature (573)..(573): "n" may be a, t, c, g, other or unknown
gagacggagtctcgctgtgtcgcccaggctggagtgcagtggagccatctcggctcactgcaagctccgcctcccgggttcgcgccattctcctgcctccgcctcctgagtagctgggagaccaaggcaggaggatcccttgaacccaggggttcaaggccagtctgatcaacatagtaagatcctgtctttacaaaaaacaattttaaagttagctgtgaacagtaatgcacacttataaagctgtatattaagactaaggcttaagaaacccttgagcctaggagttcaaggctgcagtgcaagctatgattacaccactgcacttcagcccacgtgacagaatgagatgctgnctctacatgatgatgataataacaataatatatttcaaaactattctgggattagaaacttactactcttacctgnctaccattaaaaacccaagaagtccaaatggggggcataaggggggaaagtaggnnaaaaatttccatggaaaaacttggaatatcctgggaggcttgggaaccaacccaaatattgggttntcaatccttgggtaataanggga

SEQ ID NO: 6871 - DNA, 575 bp, Homo sapiens
  misc_feature (369)..(369): "n" may be a, t, c, g, other or unknown
  misc_feature (426)..(426): "n" may be a, t, c, g, other or unknown
  misc_feature (460)..(460): "n" may be a, t, c, g, other or unknown
  misc_feature (470)..(470): "n" may be a, t, c, g, other or unknown
  misc_feature (497)..(497): "n" may be a, t, c, g, other or unknown
  misc_feature (504)..(504): "n" may be a, t, c, g, other or unknown
  misc_feature (514)..(514): "n" may be a, t, c, g, other or unknown
  misc_feature (532)..(532): "n" may be a, t, c, g, other or unknown
  misc_feature (557)..(557): "n" may be a, t, c, g, other or unknown
  misc_feature (575)..(575): "n" may be a, t, c, g, other or unknown
aatttttttgtagagacagagtcttgctatgttgccagagctggtctcaaactgccggcctcaagcgatccctcaacctcccaaaatgttgggattacaggcatgagccaccatgcccagccaagatagtttaaacagccctggcctcaacttcttcactctgtctgtgggtctactaggaggggagatgctactaggctcctcccatcagtctaggttgcccttgaaaaccttgatcccctgagcctctgcccctctccacctacaagcctcacctgcacggtcatgagaagagaccaccagtggctgactccagggtccacagccaactgcattggagacgcacacacgtacgatcagggccttttngggatccaacctgtcaaaatggccctggtcccttcactggcagcttatctggagccnggaaaaagccccacccattatgagccttgggaanaaggcttcancttgggcctgaggccgaaaaaaggtcnacttggnacatggagtntagggcctgggggttaanggcttgaggaaccaacctttggggnaatacattctggtccggn

SEQ ID NO: 6872 - DNA, 547 bp, Homo sapiens
  misc_feature (455)..(455): "n" may be a, t, c, g, other or unknown
  misc_feature (464)..(464): "n" may be a, t, c, g, other or unknown
  misc_feature (493)..(493): "n" may be a, t, c, g, other or unknown
  misc_feature (510)..(510): "n" may be a, t, c, g, other or unknown
  misc_feature (518)..(518): "n" may be a, t, c, g, other or unknown
  misc_feature (541)..(542): "n" may be a, t, c, g, other or unknown
ctgagacggagtctcactctgtctcccaggctggagtgcagtggcgtgatctcggctgactgcaagctctgcctccccgattcacgccattctcctgtctcagccttccaagtagctgggactacaggcgcccgccaccatgcctggctaatttttttgtatttttaggagagacagggtttcactgtgttagccaggatggtctcgaactcctgacctcgtgatctgtccgcctcggcctcccaaagtgctgaggttacaggcgtgagccaccgcgcccagcctattttagtaattttaatgtttaaacaaggtttcatttcatttcaaaaattccaaatctattagcataaagatgtaacaaaaattgctttttgctcaatcctagaccactccattgcctcacaaagaaaggtaacatgtgctacagagaaagaagtgcctaaaggtgttgnactgcaaanatcctggctattaatctccatactacagntgtgaaccccaggaaanaagcccancccattaggactttaggccaagnntgtaa

SEQ ID NO: 6873 - DNA, 588 bp, Homo sapiens
  misc_feature (522)..(522): "n" may be a, t, c, g, other or unknown
  misc_feature (544)..(544): "n" may be a, t, c, g, other or unknown
  misc_feature (560)..(560): "n" may be a, t, c, g, other or unknown
  misc_feature (571)..(571): "n" may be a, t, c, g, other or unknown
  misc_feature (577)..(577): "n" may be a, t, c, g, other or unknown
  misc_feature (581)..(581): "n" may be a, t, c, g, other or unknown
gtatttttagtagagacgaggtttcactgtgttagccaggagggtctcaatatcttgacctcgtgatccaccagccttggcctcccaaagtgctgggattacaggtgtgagccaccgtgccggcccatgcagcagttctaacagcctttctgaaaggtctgctgcagtgcttgttttgcaccatctcttcatctcttctgatggctggaattttaatgagatagcaggaagtaaagcagccatcctggaccatgaggtcagcttcagaatggaggctagacacagtgaaaagaaatagaaaaagtctaggtacctgagatctttatgaaatagaacttttaaagcaattccagtctaccctccagattttgacatgagagagaaataaacttctattttgtgtaaactattattaacagtttaaaagcttaagccaaacctaatcctaactgacacacatgccaacagcattcagaaagcccttcatggtaaagtggtcataataccaagttagtaataacnggctggctacaaatatgcctgncaaacttatccatccntataatggaancctggnatcnttttttt

SEQ ID NO: 6874 - DNA, 579 bp, Homo sapiens
  misc_feature (466)..(466): "n" may be a, t, c, g, other or unknown
  misc_feature (478)..(478): "n" may be a, t, c, g, other or unknown
  misc_feature (512)..(512): "n" may be a, t, c, g, other or unknown
  misc_feature (514)..(514): "n" may be a, t, c, g, other or unknown
  misc_feature (566)..(566): "n" may be a, t, c, g, other or unknown
  misc_feature (573)..(573): "n" may be a, t, c, g, other or unknown
gagacgcagtcttgctctgttgcccaggctggagtgcagtggcacgatcttggctggctacaagctccgcctcccgggttcacgccattcttctacctcagcctcccgagtagctgggactacaagcgcccgccaccactcctggctaattttttgtatttttagtaaggacggggtttcactgtgttagccaggatggtcttgatctcctgaccttgtgatccacctgcctcggcctcccaaagttttgggattacaggcgtgagccaccgcgcctggcccgataattttgaaatatgtaatacatgagtgaaatgatcacaattaaaatatggaatacttccaccacccacaaaagttttctattgtctctttgcaatcgattcttcttgccatcccagcttccaggctaccactggttggcttcacattagtaggttagtgtgcattttccagaactttctanaaagggaaccgnggttcatggccttggggtctggcttccatcactntnaaagcataatttgagatcccctgtggtacacacagggacttattcctttaangaagganaagttt

SEQ ID NO: 6875 - DNA, 589 bp, Homo sapiens
  misc_feature (521)..(521): "n" may be a, t, c, g, other or unknown
  misc_feature (525)..(525): "n" may be a, t, c, g, other or unknown
  misc_feature (530)..(530): "n" may be a, t, c, g, other or unknown
  misc_feature (544)..(544): "n" may be a, t, c, g, other or unknown
  misc_feature (548)..(548): "n" may be a, t, c, g, other or unknown
  misc_feature (571)..(571): "n" may be a, t, c, g, other or unknown
  misc_feature (584)..(584): "n" may be a, t, c, g, other or unknown
aaggaatcatttcatacagttacactgaatttaaaaccatagaaaatgctcccccctcccctaatgaaagacctgaatgttttaggaggttccttacaacttttgagccactttattattttctttttgtcagttctcttgaggcataatttatagacattaaaagtcaccaatctccagggtacaactcagtgagcttggacaaacaggcagtcattcaaccacactacaatcatgatagaaacattcctatcacccccaaaaaaagttccctcgggcccctttgctgcctactccctccctacagccccgtccccagctgccactaatctgatttctacctaaatgagcccaatttctcctcctggctgtactccctgtcctgccccagtaacactggctaactcacttagttctggttctcaggcttcccatcagtggattagcaggcttccattagaactgacacccacgcacactactaattgcagctctgattttatcagtcatccttcgaaggnttgngggtnaaattaattggaanaacngggaccatgatgaaacctaatgnctgaaaaccgggntggga

SEQ ID NO: 6876 - DNA, 586 bp, Homo sapiens
  misc_feature (487)..(487): "n" may be a, t, c, g, other or unknown
  misc_feature (500)..(500): "n" may be a, t, c, g, other or unknown
  misc_feature (572)..(572): "n" may be a, t, c, g, other or unknown
aacctctcacagctcataccactggatctgagactggaattaggtgtcttccttgctactcccagactctttacttgccctctttcctaaaactagctttgaaactcatgttgtcagcctgtaaccatggttctcaattgggcaattttgcccctttctgccacccggggtataattggcgtgtgtaagacgttttgattgtcacaactgagggagttccactggcacctagagagtcaaggccaggaatgatgctaaacatcctacaatgcacaggacagctccccctgccccccaacaaagaatgatcaggtccaaaacgtcaataatgccaaggttgagaaatcctggtccacagtgctcactaatgccacctgcaggacgctcttatctcctgcatcattaacttcgctgtttggatcattcccattagtatacaaacatgttgtaatttccgcatttaaaaatattttctgtccgggtgcantggctcagcttgnaatctcagcacttgggaagctgaggacccagacttttttcctgaactccagacttatggtaactacctactnaacatttacatttt

SEQ ID NO: 6877 - DNA, 589 bp, Homo sapiens
  misc_feature (390)..(390): "n" may be a, t, c, g, other or unknown
  misc_feature (458)..(458): "n" may be a, t, c, g, other or unknown
  misc_feature (525)..(525): "n" may be a, t, c, g, other or unknown
  misc_feature (563)..(563): "n" may be a, t, c, g, other or unknown
  misc_feature (581)..(581): "n" may be a, t, c, g, other or unknown
ctttccatttgcttggtaagatcttcctccatccctttatttttagtctatttgtgtctttgcatgtgagatgggtctcctgaatacagcacacaaatgggtcttgactctttatccaatttgccagtctatgtcttttaattggggcatttagcccatttacatttaaggttaatattgttatgtgtgaatttaatcctgtcattatgatgttagctggttattttgcctgttaattgatgcagtttcttcatagcattgatggtctttacaatttggcatgtttttgcagtggctggtaccagttgttcctttccatgtttagtgcttccttcaggagctcttgtaaggcaggcctggtggtgacaaaatctctcagcatttgcttgnctgtaaaggattttatttctccttcacttataaagcttaatttggctagatatgaaattctgggttgnaaactcttttctttaagaatggtgaatatttacccccactttttctgcttggaagggttctgctganaaaacccctggtaagccgaagggcttccctttgagggnaacccgaccttttttttnggtggcct

SEQ ID NO: 6878 - DNA, 584 bp, Homo sapiens
  misc_feature (535)..(535): "n" may be a, t, c, g, other or unknown
  misc_feature (541)..(541): "n" may be a, t, c, g, other or unknown
  misc_feature (558)..(558): "n" may be a, t, c, g, other or unknown
  misc_feature (562)..(562): "n" may be a, t, c, g, other or unknown
  misc_feature (572)..(572): "n" may be a, t, c, g, other or unknown
  misc_feature (575)..(575): "n" may be a, t, c, g, other or unknown
  misc_feature (577)..(577): "n" may be a, t, c, g, other or unknown
gagatggagtttcgctctgtcacccaggctagagtgcaatggtatgatctcagcttactgcaacctctgcctcctgggttcaagcgattctcctgcttcagccttccaagtagctgggattacaggtgcccgccacacgcccagctgatttttgtagttttagtacagatggggtttcaccatgttggccaggctggtctcaaacccctgaactcaggtgatctgcctgccttggcctcccaaagtgctgggattacaggcgtaagctactgtgcctggcccaaagtcaggattcttaagggaactctccaggacatgcttcgtttctctcagtctgtgtcatttagggtggcagaatggtctcacagggttaacatctctggaagtaaaccatttacccaatatgatgtagtggaagttagaaaaaacaacaacaacaacaacaacaaaaaacccaaaaaactagcctgcaggcaaaacaatctgggtcaaagagtttaacaggcctttactaagagccccttttttgagagtncagttnttgagggataaagcttnttgntcctaagcantgntngggcaac

SEQ ID NO: 6879 - DNA, 575 bp, Homo sapiens
  misc_feature (459)..(459): "n" may be a, t, c, g, other or unknown
  misc_feature (501)..(501): "n" may be a, t, c, g, other or unknown
  misc_feature (504)..(504): "n" may be a, t, c, g, other or unknown
  misc_feature (508)..(508): "n" may be a, t, c, g, other or unknown
  misc_feature (517)..(517): "n" may be a, t, c, g, other or unknown
  misc_feature (536)..(536): "n" may be a, t, c, g, other or unknown
  misc_feature (542)..(542): "n" may be a, t, c, g, other or unknown
  misc_feature (574)..(574): "n" may be a, t, c, g, other or unknown
caactttatccacagtttgcatcggtaatatacatttaagtgttccatttatttttaaatgcatcagaaaagcaattatgatagatctgtgaccaatacaaacatttctgatttattcaaaaaattcagttaaaaaagtcattaaactagcattctgtaaagataattattaaacaaatggtaatgcatttttactccttatttcatttctaacatacccaacgtcacttctttcttgtgccatacagtaataaaatgtaacagaaatagatatctattaaattttgggggcctaataaaatatttttgattattcaactgtcattaaatcacaaatcccactcaagtgatgaaaatcattcttaattcaataactgatgaaatagataatagccataaaaacatttagaataaattttacacttagaaactctaaaagaaatacatcagagccttggnataacattgtaggggacatgctgtgaaactgctttaaaacgnggngtgncatttggcncaggagtaatgaaccggcntgaggnggcctcaaaaaagccctcttaaatggaattgnt

SEQ ID NO: 6880 - DNA, 554 bp, Homo sapiens
  misc_feature (465)..(465): "n" may be a, t, c, g, other or unknown
  misc_feature (484)..(484): "n" may be a, t, c, g, other or unknown
  misc_feature (507)..(507): "n" may be a, t, c, g, other or unknown
  misc_feature (520)..(520): "n" may be a, t, c, g, other or unknown
  misc_feature (533)..(533): "n" may be a, t, c, g, other or unknown
  misc_feature (536)..(536): "n" may be a, t, c, g, other or unknown
  misc_feature (548)..(548): "n" may be a, t, c, g, other or unknown
gagatggagtcttgctctgtcgcccaggctggagtgcagtggcgcgatctcggctcactgcaacctccacctcctgggttcaagcgattctcctgcctctgcctcccaagtagctggaactacaggcacgtgccagcacacccggctaagtttatgtatttttagtagagacagggtttcaccgtgttagccaggatggtctcgatctcctgacctcgtgatccgcccatctcggcctcccaaagtgagagccatcactattatttgcataatctcatttacacaaacttgataaaagcatagtatcaaaaggctgatgtgaactgcttcattaatagtcttattttcatcatcattaggtgcggtccacctatgtccctggcattagatgactccacaaagttttattttatattgaattatattcgcctactgcctttttttcgagacaagatcttcctctgntgcccaagctggaatgcantgggcgcaatcatgacttactgnaagccttaacctnctggggtcaaagnganccttccatttanccttca

SEQ ID NO: 6881 - DNA, 574 bp, Homo sapiens
  misc_feature (495)..(495): "n" may be a, t, c, g, other or unknown
  misc_feature (509)..(509): "n" may be a, t, c, g, other or unknown
  misc_feature (558)..(558): "n" may be a, t, c, g, other or unknown
  misc_feature (561)..(561): "n" may be a, t, c, g, other or unknown
  misc_feature (569)..(569): "n" may be a, t, c, g, other or unknown
  misc_feature (573)..(573): "n" may be a, t, c, g, other or unknown
gtatttttgtagagctggggtttctccaagttggccaggctggtcttgaactcctgaccttgggtgatctgcttgtcttggtctcccaaagtgctgggattacgggcatgagccactgctcctggcctcaggcatggttttctacaggcaattttttgttctttattaatctttcaccttataaaagggaacagtctgtaaatagcatttataagcatacttagtaatacagtccctatgatcatatggaaacaaataaatgaaagctggtgtaatggtaaatgtgattcagtctcccttgggtctgggccttttgggtttgggtccctctgtgcggccaaggcaggtcagttgcagagagatggtccagaccttgccaaatggtttctatatgaggcttctgggtcaacactccctttcaataaagacctgggctatgatgactccagccgggtctgcgccacaatgggtggagtgctcacaggggtcctcggncatgggaaaccccnttaatccctgacaacatgcatcaaacacttccatttgaacttccaaggnccntaaaagcncacnt

SEQ ID NO: 6882 - DNA, 550 bp, Homo sapiens
  misc_feature (463)..(463): "n" may be a, t, c, g, other or unknown
  misc_feature (521)..(521): "n" may be a, t, c, g, other or unknown
cagaccttagaaaatgaaatattcatttatacaatgaaaggtacagtaaataacccattttatttctattctaattggcacaaagatagaacagtctgacagaaaattaataagaacaagaaccaggaactctaaataggcatgaaaccttatgaaaagtacttcttgtttataaatactaaatcaaatttctcattattaaaattagcatacaatctgaatttgctccttatccaaattcaccagtgttacaaaggtgacttttttaaaaaaatagagacaagatcctgctatgttactctggttaatcttgaactctcgggctcaagatgatcatctcacctcggcctccaaaagtgttgagattacaagcatgagttatcgcacctggctagaagattaaatttttaaggcagtcaatagtaatgggtaccctgaatgggagcatttactgctttactgngatactatcttgcagaattattcatttaactcttctcagcaatttgaggtaagtattnccattacctccatttaccggataaagaaa

SEQ ID NO: 6883 - DNA, 548 bp, Homo sapiens
  misc_feature (497)..(497): "n" may be a, t, c, g, other or unknown
  misc_feature (511)..(511): "n" may be a, t, c, g, other or unknown
  misc_feature (524)..(524): "n" may be a, t, c, g, other or unknown
  misc_feature (526)..(526): "n" may be a, t, c, g, other or unknown
  misc_feature (533)..(533): "n" may be a, t, c, g, other or unknown
  misc_feature (545)..(545): "n" may be a, t, c, g, other or unknown
cctgctacgtctatagggcttggaataatgtctggaatgtagtaaataggtagctgtatttttgttctcttttctgtcccccttttttcctgttctattgtgtgtgtgtagaaggctgacagctctagatttcattgtattcctttgcttccagttggcgatggtaattaattccctggcagaagatcataaagcaggaggagagaggttgtgtcaacagttcccaaccctctggctttgctctgcttcctccaactctacgagtttcataatggacctacctccacagctcacactatcatctgtgctttcacaaacttgtcttccccttgtcccttccgacttaggggtagcaaagggttttccctgtttacggtccttaaaaactcagaatttctcacattcctacttgttttcttaacgctgtttacacctgttaaataatcacttcactgatttatttttcaagttaaataatctcacatttaccatctggnttctggtaaaaccnttacagattccangngctcaangctattttgacnaaa

SEQ ID NO: 6884 - DNA, 545 bp, Homo sapiens
  misc_feature (466)..(466): "n" may be a, t, c, g, other or unknown
  misc_feature (518)..(518): "n" may be a, t, c, g, other or unknown
  misc_feature (543)..(543): "n" may be a, t, c, g, other or unknown
aaaaaaaaaaaagccaactttttttttttaatcaagagataagtacgtagctgcaagctcaaggtctcggttgaggacaatcattatgagtcctagtaaaagacaaccagttttaagaacactgtcaggcaagctaccatgtagttctccttgactccatgcttagctctttcagacttcccagtaattacgaagggtcacatttttgttcagctttgcccagtgctgtcattcataatagatgaatgaaaagtcccagaaacctgttctgtttgggaaggttttcttttgttccaggcttcggtggttaatatgcttgacaaatttcagagtctctctgtctctgtagaccaatgccaaagaattgctttctggattcactgttagcagctcttcatcttcacctttggcaatgtaagaagtaaaacccgccatattctggctcccagccttcacagccccagtncagaaattaagtctagggcaaatcagccttgctatgggcatgaaattaaagngaatgacccggctttcaaagcctantt

SEQ ID NO: 6885 - DNA, 545 bp, Homo sapiens
  misc_feature (502)..(502): "n" may be a, t, c, g, other or unknown
  misc_feature (521)..(521): "n" may be a, t, c, g, other or unknown
  misc_feature (529)..(529): "n" may be a, t, c, g, other or unknown
gtcttcctaatccaaatggctggtctcttcagttgcgacttccggctgctaaagttgggatttagccctatagaatgttggccacagtcaaagataaaagtgcttggaaaactcaggtgtataaataaaacctcagtctttaagtggtctgtgtgtaaagaacacctggttccaactcagcactgtccagcagaactttctgtgatgatgaaaccattctgtattgtctaatacagtagccaccagccatatgttactctggagccattgaaatgttattagtgcacctcaggaactgaattttaaattttattcaatttttgttaattcaagtttagccacacatgactagggctactgtatggaacaacacagtttgaaggtacagtcttaatgtgtaaaatagatatattaagcctataaagtgacggtttttcaaacggagaacaaagccagagtactgccatgcttgatggaagtttatctcaatggttaaagggtncaggggggcactggcttangaaggttngattaccagttttttg

SEQ ID NO: 6886 - DNA, 537 bp, Homo sapiens
  misc_feature (461)..(461): "n" may be a, t, c, g, other or unknown
  misc_feature (536)..(536): "n" may be a, t, c, g, other or unknown
gaacgaccaaatcaatgtttattataagtaagtggaccaagtgtggtggtcctacctgtaaattccagcactttgggaggctgaggcaggagacctcatctctacaagaaataaaaaattaggtgggcatggtggtgcacgcctgtggtcccagctactcagaaggctgaggcaggaggatcgcttggccccgagaagtcgaggctgcaatgagccataatcgtgccactgcactccagcctgggtgacagagccagaccccgtaatagttgggcaccaagtttaagatttattaattttctcctctcagtataggcagcaattcaccattttctttcagttccttcacaatatccaatcctcccaccagctcccctttcacatacagctgagggtatgttggccaatttgagtaagcttttaatccttgccgaacttcttcatcctccaatatatcgaangttcatattcaacaccagtctattagtatttccgaattggttgtgaatcccatttgcttccggtggttcctttana

SEQ ID NO: 6887 - DNA, 555 bp, Homo sapiens
  misc_feature (431)..(431): "n" may be a, t, c, g, other or unknown
  misc_feature (466)..(466): "n" may be a, t, c, g, other or unknown
  misc_feature (469)..(469): "n" may be a, t, c, g, other or unknown
  misc_feature (507)..(507): "n" may be a, t, c, g, other or unknown
  misc_feature (532)..(533): "n" may be a, t, c, g, other or unknown
  misc_feature (554)..(554): "n" may be a, t, c, g, other or unknown
ggggagacagtctctcattctgtcacccaggctggagtgtagtggcacgatctcagctcattgcaacctctgcctcctgagttcaagcgattatcctgcctcagtctcccgagtatctgggattataggcatgcaccaccgtgcccagctaattttcatacttttagtagagacggggttttaccatgttggccaggctggtctcaaactcctgacctcaagtgatccactcatctcagcctcccaaagtgctaggattacaggcatgagccactgcacccagcctccagatgcattttcaaagatggttcatttgtagtacttttttcccccgttttttgaaagagggcgtctccctctgttgcccaggctggagtacagtggaacaagcaaagctcgctataacaactcttgggcccaaagtgatcctnccgcttcagccttccaaaagtgctggggattacangcnccgaagccaccgtgccccgggcacgcccttactttttnaatctggcatttctttaaggggtanncttggagtcctttcccctttna

SEQ ID NO: 6888 - DNA, 544 bp, Homo sapiens
  misc_feature (460)..(460): "n" may be a, t, c, g, other or unknown
  misc_feature (498)..(498): "n" may be a, t, c, g, other or unknown
  misc_feature (518)..(518): "n" may be a, t, c, g, other or unknown
  misc_feature (526)..(526): "n" may be a, t, c, g, other or unknown
aaagacagggcctcgctctgtcacccaggctggagtgcaatggctccatcccagctcactgcagcctggacctcctggactcaagcgatctattctcttgcctcagcctcacaagtagctggtactacaggcatgtgccatcatgtccggctaattttttttttttttttgtagggaaagggttttgccatgttgaccagactggtctcctgggctcaagcaatcccccctcctcagcttgccaaagtgctgggattacaggtgtgagtcactgcaactagttacttacaatgcttacctgacgaagtccctatccaatttaaacacttcaaaggctatggataattttttttaaaatccccactacaacctcaggaaaaaaactgacaaaagaaatactcaggagtttcacaattaaaggaagcctcaaaacatggggaaaagatatgcaacctcatanggggatcagaaaatgcaaactaaaactggaaccaaatnccatttataacttccaaaangccgaaantcaaaattcagatacctg

SEQ ID NO: 6889 - DNA, 548 bp, Homo sapiens
  misc_feature (296)..(296): "n" may be a, t, c, g, other or unknown
  misc_feature (443)..(443): "n" may be a, t, c, g, other or unknown
  misc_feature (475)..(475): "n" may be a, t, c, g, other or unknown
  misc_feature (486)..(486): "n" may be a, t, c, g, other or unknown
  misc_feature (497)..(497): "n" may be a, t, c, g, other or unknown
  misc_feature (503)..(503): "n" may be a, t, c, g, other or unknown
  misc_feature (536)..(536): "n" may be a, t, c, g, other or unknown
  misc_feature (547)..(547): "n" may be a, t, c, g, other or unknown
agaaacagggtctcgctttgtcacccaggctggaatgcagtggcatgatcatagctaactgcaacctcgaacttctgggctccagcaaccctcccacctcagcttcccaaatagccaggaccacaagtgtgtatcaccacacctggataatttttattttttaattttctgtagagacagggtctcattatgttgcccaggctggtctcaaactcttggcctcaagcagtcctcccaccttggcctcccaaagcactagaatcacacataagccactgcacctggccttttaatgntttttataagtacactgaaaaagaagtcaaaaactgtggcaataggttgggattaaagatagaaaaaattgggccaggtgcagtggctcacacctgtaatcccagcacttttgggaaggccaaggcgggtggatcacccgaggtcanggagttcaagaaccaacctgggccaacatggngaactcatctntactaaagatncaatanctgggcatgatggggcacacctggaatcccatnttttaacaagna

SEQ ID NO: 6890 - DNA, 555 bp, Homo sapiens
  misc_feature (381)..(381): "n" may be a, t, c, g, other or unknown
  misc_feature (410)..(410): "n" may be a, t, c, g, other or unknown
  misc_feature (495)..(495): "n" may be a, t, c, g, other or unknown
  misc_feature (505)..(505): "n" may be a, t, c, g, other or unknown
  misc_feature (521)..(521): "n" may be a, t, c, g, other or unknown
  misc_feature (527)..(527): "n" may be a, t, c, g, other or unknown
  misc_feature (546)..(546): "n" may be a, t, c, g, other or unknown
aagttctcttaagtcaagtaaaacagaaatggcactttctttttagggttctcccacacagctgcactgtcttccttagccagcagaggacacccttcagcttacaaagactcaccgctttcttctggatgaaaatttgtgcatccttcaggtggccggcaatgttctcacacagacgtttcctctgttcctcattcagcacgttcacatagaatgcccgcacctgctcagagaaaagagcaagtgcagagaattgaatcaccagtttatcaccaacaaaattcacctactacaacacttaggaaatcaatgataaaaaaaactttagaagttaagaataattttaaattttaaatttgggttgtgtccttcactttttgntttaagcaaaataagtaaaattcatttgntaatagctcatacctgctttctaataatatcctttataggaactgctataaatctcttataaatagatctacaatttaaaacctnaccacattcntaatctggccaggctnaaatgngccagctggctttgaaggnaacctaacc

SEQ ID NO: 6891 - DNA, 550 bp, Homo sapiens
  misc_feature (425)..(425): "n" may be a, t, c, g, other or unknown
  misc_feature (454)..(454): "n" may be a, t, c, g, other or unknown
  misc_feature (505)..(505): "n" may be a, t, c, g, other or unknown
  misc_feature (532)..(532): "n" may be a, t, c, g, other or unknown
agcaataaggtcttatcatgcctaggctggtctcgaactcctggactcatgcaatcctaatgccttggccttccagtgctgggattacaggcgtgagccactgcacccagcttgaagatggcagttttcttgtatgctcacacagcacaaagtgacctcgctctagttccttccttttcttataaggactcgatctcatcggcgagccccaccctcacgatctcacctaagcctagtcacctcccaaaggccccacctcctaataccaccctcctgggggtcagggtttcaacatataaactttggggggggacacaaacatgcagtccttaacaccatcgtcatggagatggaggccacagacctaccaacacccataacctcaagggcactggtggggacagaggggtcttacccagcactgncatgtggcagaagttctccaacattatgnctctgtagaagccttcaggcagcacttaagaattggcacttctctgggganggcactacccatcttaaggccacaagnttctggaacaacaaaact

SEQ ID NO: 6892 - DNA, 557 bp, Homo sapiens
  misc_feature (513)..(513): "n" may be a, t, c, g, other or unknown
cctccaaatttcaaaaagttttattttgaaagaatgagagaaataaaacagagaggtatcaattaccaagaacaattacactgaagaaaacacaataataagtactcttcccacacaaccccccccatttccccatccctggcacaataatattaaaaccaccaaagcacacctaacaaggaaaaacaacagtacgtaatgaaaaaagcaaatgtccatactgctcagtccaactaacccttatgaaatgtccttcccccagctaaaccctacccactggaatgataaagaaatgtagagacaaccctaggggagacttggaactctgcttatactagcaaagctcagtgaagaatcagtaagagtagtgaatctgtttggcagtgaaacactggatatagcttctttttcaaattttggatgattgcagagaacaggtagagtttgaggctcacagacttctaacagggctggatccctgttcccttaaccgtaacagtggagcagctggcnaatcctgggttggctggctgaaaatagtggaagtgaggcacctt

SEQ ID NO: 6893 - DNA, 555 bp, Homo sapiens
  misc_feature (478)..(478): "n" may be a, t, c, g, other or unknown
  misc_feature (499)..(499): "n" may be a, t, c, g, other or unknown
ccaaaaggagagttgtgtctataaaatgcatgactagtttatgtagctgataaaatgtctttggtaatggtttttcgagaagtctctgaaaagttccaagaacagtagcactatttgagtcactcaatgaccatttaaggggattactttgaatggaatgccagaggcatttcaaactccatatggctcaaactgaactcatcatttccaccataaaccaagccgtcttcccctgtctctctgcaaggggtggcccactgctcacccaatcttcaaggtcagaagtaagggccatctttggctctttccacaccctcccctaggctgccacagtgactgtatcactgcatcctgtgaattttgccccataagtgatacttgaatttatctccttttccccacccaactcttactgccttcacttaatccaagccctcagcatctcttacctggtctactggaatggcgcataatttgnctctctgcatccaactctggnctcttctcaaatccatcttttaaggtggcccaagggtcaaacatgccaattgacat

SEQ ID NO: 6894 - DNA, 540 bp, Homo sapiens
  misc_feature (510)..(510): "n" may be a, t, c, g, other or unknown
  misc_feature (527)..(527): "n" may be a, t, c, g, other or unknown
  misc_feature (537)..(537): "n" may be a, t, c, g, other or unknown
aaagagacagggtcttgctgtcacccaggatggactacagtgaaggatcatgggtcactgtaaccttgagctcaagggggtcaagtgatcctcccctcccatctcagcttcccaagtagccaggactacaggctcatgccactatgcccagctaattttttatttttttgtagagacagggtctcgttatgtcgcccaggctggggattctctcaaagatggtattacaagcatgagccatcacgcccggccaagttatattctttagttgctcagtccgtaacccttggagtcgtccttgacccttcttctacctgactgctctcaaaagtctagaatctggtcatttcgcactaccgccactattactaccctgattcaagtcacctcgacctttaacctggataaatgcagtcaatggcctactaacaactcttatttctgcacctgctgcatacagtcaacatagcaatcagatcttttaaaacacaagttagatcaactcactgnttactcaaaaccaactnattcaaaggncca

SEQ ID NO: 6895 - DNA, 544 bp, Homo sapiens
  misc_feature (308)..(308): "n" may be a, t, c, g, other or unknown
  misc_feature (314)..(314): "n" may be a, t, c, g, other or unknown
  misc_feature (466)..(466): "n" may be a, t, c, g, other or unknown
  misc_feature (494)..(494): "n" may be a, t, c, g, other or unknown
  misc_feature (515)..(515): "n" may be a, t, c, g, other or unknown
  misc_feature (522)..(522): "n" may be a, t, c, g, other or unknown
  misc_feature (525)..(525): "n" may be a, t, c, g, other or unknown
  misc_feature (535)..(535): "n" may be a, t, c, g, other or unknown
  misc_feature (537)..(537): "n" may be a, t, c, g, other or unknown
gagccacctcgccaggctaccaagtctcattttcctggtgacctgttcaaaacagagtcaaaatggcaaatttaagacatcctcctttatacaggactctttcaacacagtatagctcttttttttttttttttttttgagacggagtcccactctgttgcccaggctggagtgcagtggtgcgatctctgctcactgcaacctccgcctcccgggttcatgccattctcctgcctcagcctcctgagtagctgggactacaggcgcccgccaccacacccggctaattttttgtatttttagtaganaatggntttcaccgtgttagccaggatggtctcaatctcctgacctcgtgatccgcccgcctcggcctaccaaagtgctaggattacaggcgtgagccaccgcacccggccagctcttcttaagagacccttggtggggtgtggtagctcacacctgnaatctctgcattttgggtgtcaaggcanaaggaacttccgacctcgggngaactgnccncttgggcttncnaagggtg

SEQ ID NO: 6896 - DNA, 499 bp, Homo sapiens
  misc_feature (449)..(450): "n" may be a, t, c, g, other or unknown
  misc_feature (456)..(456): "n" may be a, t, c, g, other or unknown
  misc_feature (458)..(458): "n" may be a, t, c, g, other or unknown
  misc_feature (462)..(462): "n" may be a, t, c, g, other or unknown
  misc_feature (466)..(466): "n" may be a, t, c, g, other or unknown
  misc_feature (478)..(478): "n" may be a, t, c, g, other or unknown
ctgtgagaaggagtttcgctcttgttgcccaggctccagtgcaatggcgctatctcagctcactgcaacctccgcctcctgagttcaagcgattctcctgtctcagcctcctgagtagctgggagtacaggcgtgctttaccacgcccagctaatttttgtatttttagcagagatggggtttcatcatattggtcaggctggtcttgaactcctgacctcaggtaatccacccgctttggcctcccaaggtgctgggattacaggcatgagccactgcacccggccaactatttctttttgttgttgttgttcatggttggcaaaactctggccaaggtgtggccaaaccacaattcaacaagtcccgtctgcttgcctacgttgagaacttggcataaagggtagaaaaaggagagccaggcatggtggtgcgtgcctgtagcctanncaggangntaangcanggattgcttgancccaggagttcaagggcacag

SEQ ID NO: 6897 - DNA, 556 bp, Homo sapiens
  misc_feature (503)..(503): "n" may be a, t, c, g, other or unknown
agatggagtctcactctgtcacccaggctggagtgcaatggcacgatcttggctcactgtaacctccacctaccaggttcaagcaattctcctgcctcgcctcctgagtagctgggactacacgcgtgtgccaccaagcccagctaatttttgtatttttagtagagatggggtttcaccatattggtcaggcttgtctcgaactcctgaccttgtgatccgcctgccttgacctcccaaagtgctgggattacaggtgtgagccaccgcgcccggcccattcttcctaaagataagaaacgcctgtagcacaaaagcaaaggcctctttttatttggaaatattggggccaaataaacataataaaatactccatgactcagaaatatccttctttatgctgtggcaaatgcaaatgtcttgttcacatggccagccaccagccatgttggatgcccctttatgcatttcacctctaacgcacgtacacgctatactgactnttccagtagatgacgggccactattcatgccaacgtcttaaggcctggcatgt

SEQ ID NO: 6898 - DNA, 556 bp, Homo sapiens
  misc_feature (517)..(517): "n" may be a, t, c, g, other or unknown
  misc_feature (548)..(548): "n" may be a, t, c, g, other or unknown
gtttgagacagagtctctctctgccacccaggctggagcgcagtggcacgatctcggctcactgcaacctctgcctcccaggttcaagcaattctcctgcctcggcctcctgagtagctgggactataggcgcctgccaccatgcccggctaattttttgtatttttagtagagatgaggtgttagccaggatggtctcgatcttccgacctcatgatccgcctgcctcggcctcccaaagtgctaggattacaggcgtgagccaccgtgcctggcccacttctattttcttagttgcaaagtgtgaacctgattaactagagaaggactttgtaatgcttatgctaaaatgaacacaataaatagctgaactccagttttggtttcaagatgtataagcaactaagcaaaaatcactatatctgttttgaaaaccaacatattcttttaagtatttctttttttgtaaaggaataattttatttctaatggtaaacttctaagtcaaaccatcttnttctgaacccaaacatgcatactattcttgnttcttggg

SEQ ID NO: 6899 - DNA, 555 bp, Homo sapiens
  misc_feature (539)..(539): "n" may be a, t, c, g, other or unknown
ctttgtggctaatgctgtttgtgtgtttctatgaaatctttgcctagctcaggtccaggaaatattcttctatattttcttctagaaacttttgagcttaagattttatatttaggtctatgtgccatctataattacttttgtgtgtatggtatgaagtatcaagatttatttttttcctatatggataccaagttttctaggtctggtggttaaaacaattttcctttctccattacatcactttggtgcctttttggaagatcaattggccatatctgcgtggatctagttctggactccgttctgttcttttagtctatttgtttatcctctcactatcctaaataatgtcatttaaaagtaagcctaacactgtgctgctgtcactgtccacccaaatttgatgggcaaatttaggtagaaaatgattctttctgtgaactttcaagcttctgatacaagctgcaatatcatggattaattacatgacagcataggataatgaatgagaaaaagcccttgggaaccaaccaatntgaatttgaatccttt

SEQ ID NO: 6900 - DNA, 560 bp, Homo sapiens
  misc_feature (428)..(428): "n" may be a, t, c, g, other or unknown
  misc_feature (463)..(463): "n" may be a, t, c, g, other or unknown
  misc_feature (480)..(480): "n" may be a, t, c, g, other or unknown
  misc_feature (529)..(529): "n" may be a, t, c, g, other or unknown
  misc_feature (550)..(550): "n" may be a, t, c, g, other or unknown
caatcaatcttttttatttaaaaatccacctaaaaattcacttctgggttttagtttttgtttaaaaagaagcaaatatttaaaagcatcaaatgttactagtctacaattcatcttgttatgaacatttttagtttgaggattgggaaaataaacctattacattgattaggcacagtactatggccaatgggccagaaatcagggcacatctgtgtactcaggcaacagttagaggtctgaatggagggggtcatgcctcaactgtgggcactcctttctctatgccccctccaaaaattgttataagtctcaaatcagtacatgagattgtatgtaacttggttaaaaaacaactatacgtgctttctaaattatgttgcaaagccaagacagacgaatataattgtagcctcactacaacttgnggtcttaatatctatgtcacaggaccatgttatanggtgagacagaattatnccatccctttgggggtttcaaaaatctggttggaaggagtccatgactntaccatttcacattggaccanggttccaatt

SEQ ID NO: 6901 - DNA, 555 bp, Homo sapiens
  misc_feature (476)..(476): "n" may be a, t, c, g, other or unknown
  misc_feature (533)..(534): "n" may be a, t, c, g, other or unknown
  misc_feature (554)..(555): "n" may be a, t, c, g, other or unknown
gggaagtgctaacatgtatttattccacaaggtgggagatggggtgaggagatgatcaccagtaagacgtcaccaaatgagacactgcgaatcccacacagggcaagggggcagctacagggttcagctctgggcagggcttggccagggacagtgtggggaaaaagagatggggactgggagatgggacagcctcccatcgggggcaccccacagggcagggctgagacacatccttccggccagtgacatggggccaaacccacacccttctcatccctcgtccccatccaggtgagtaatgaagcagcaagcccaaggccacacagctaggtcagcatcgtcacacactccggaacgcacagccagacacacacacacacaccctgccacgcacagcacgcaggcacacacacaattgtgcatgcacacgcgttcatatattaactctgatttatatgtgcaccctaccaganggcaatcgaaaaaaatctctttagagaggaaacgactggctttttccttggcaaccnncaaaaacgtgggggggaaann

SEQ ID NO: 6902 - DNA, 553 bp, Homo sapiens
  misc_feature (503)..(503): "n" may be a, t, c, g, other or unknown
  misc_feature (528)..(528): "n" may be a, t, c, g, other or unknown
cagtatatagaaaatttaatatgaaatcacttaaaatatttcaacattaagaagtcttaattcagtgccttggcatgagacatttaaaagcatgtttgggtctaatctcaaattagttcaggggaacagaaatagctgaaaatttatgtatatgtgtatgtatatatatatatacacacacatctgtatatacatacatgtatatattcaaattatatacatataaagatatttgtagattcaagatatatagggattatatatctatatatattatatgtgtgtctatttatacagatatatatatatatatattcatctttctgtgtgtgtgtgtatatatatccacacacacatataaaatctactgttgcttagtggtggaattctctaattttactcatacgcatattttggaaagcttatctccaaaaggggcacattaatcgacatggaacagaacccttctcttctactttaattaatttcattttaaattaatnatttctattcttcccttttaactantaatagccccctttaagggtgggaa

SEQ ID NO: 6903 - DNA, 559 bp, Homo sapiens
  misc_feature (475)..(475): "n" may be a, t, c, g, other or unknown
  misc_feature (485)..(485): "n" may be a, t, c, g, other or unknown
  misc_feature (525)..(525): "n" may be a, t, c, g, other or unknown
  misc_feature (529)..(529): "n" may be a, t, c, g, other or unknown
  misc_feature (552)..(552): "n" may be a, t, c, g, other or unknown
ggagacagagtcttgctctgttgccctggctggagggcagtggcataatctctggtcaatgcaacctccacctcctgggttgaagtgcttctcctgcctcagcctcctaagtagcttggactacaggtgcgtgccactgcacccagcccgtaaggggtgctagctttggtctgggaaacagtgaaatgaaaaccacaagtcacaaaccacaaccaggcaaagttctgtggggccctccgatgcatccagagcacactgtgggtttgttatagtgaaacctgaaaggtcccatggagatgttgatcttcacagtcccaaagattctgttatatccatgagggatgcctccctttccccatattcctggaattgagtcctctgtgccatccagatttcaggggcacagtacaaggcacagccctataactgacacatgatgtaaatcatatatggaagatgttctgatgtccatganggtccaagancggctaaaaaattggactgattgaattccaagtggtgganaggnttccactagcattttggataaanctctcaa

SEQ ID NO: 6904 - DNA, 544 bp, Homo sapiens
  misc_feature (121)..(121): "n" may be a, t, c, g, other or unknown
  misc_feature (448)..(448): "n" may be a, t, c, g, other or unknown
  misc_feature (457)..(457): "n" may be a, t, c, g, other or unknown
  misc_feature (459)..(459): "n" may be a, t, c, g, other or unknown
  misc_feature (487)..(487): "n" may be a, t, c, g, other or unknown
  misc_feature (510)..(510): "n" may be a, t, c, g, other or unknown
  misc_feature (524)..(524): "n" may be a, t, c, g, other or unknown
  misc_feature (538)..(538): "n" may be a, t, c, g, other or unknown
ctctaatcttgtcttgacacttcatttcattaagtcaatcttctacctctgatatccttttttctgctagattgattcagctattgatacttgtgtatgcttcacgaagttctcatgctgngttttttagctccatcaggtcatttatgttcttctctaaactggttattctagttagcaatttctataatcttttttttaagatttttagcttccttgcattgggttagaacatgctcccttagcttggaggagtttattatccaccttctgaagcctacttccgtcaattcatcaaactcattctccgtccagttctgttcccttgctggcaaggagtgtgatctgttggaggagaagtgttctggttttgggaattttcagcctttttgcgctggtttttcctcatctgcatgggatttacctacctttgggctttgaaggtggngaccttcanangggggttctggctggaaggccctttcgntgaaggtgaagctattcctttcnggtccgtaagtttnccttctgaaagcangcttcc

SEQ ID NO: 6905 - DNA, 540 bp, Homo sapiens
  misc_feature (505)..(506): "n" may be a, t, c, g, other or unknown
  misc_feature (517)..(517): "n" may be a, t, c, g, other or unknown
ctttttaaactcctcaaactaccttcccacaaagccatttaagttaaatggtacatttacagactcacctacatgaaggatataacttaaaacatctgcttagacacatacgttctgttcagatataaaaaatgtggcaaaaatttttaaaaatataggaccactatattcttaaaatgtgtgttcttctgtgtgtgtgtgttcattcattcaagagatctttgactgcaattaggtagtcggtcctataaaggcttccttgtgtgacgataatttctaaaagtaaaatgctccagtgaatatttctgctaaataatcatatcttaaaattactttaaagaaattccaatccctcatgttacattaagcaataatgccagttttccataatatgccttagttgtaccaccttattcagggtcgacaattaattaggaagacaaaaagtataaatcgcgtgtttattaagtagcagacaaattcttggctggctcaacatattacnntaaagggggtnatttctaattttgaaataaatag

SEQ ID NO: 6906 - DNA, 545 bp, Homo sapiens
  misc_feature (472)..(472): "n" may be a, t, c, g, other or unknown
  misc_feature (488)..(488): "n" may be a, t, c, g, other or unknown
  misc_feature (516)..(516): "n" may be a, t, c, g, other or unknown
  misc_feature (534)..(534): "n" may be a, t, c, g, other or unknown
ccttttatttttattttttatttcattactgggtaacaatctacttctcagcttagaatgctatagaaagcctccacatttaatttaatcaaatctgaaacccaataagcttaaacaaagtgaatgtttttcaaagtgcataatttccaactcatccacttgcaatatttatccaattccagttcatcagcaagaaaataaaatgtacttggctataaaaatactgaggaatgttatcgaaaaggaaaggctatttggtagaagtaactacaaaaataattagtttaaatctttgtaaagctttaatgtaagaacatcagtacactttctttacataaaccttaaagcatgatcaataccaagatttcaaattttcaactttcaagtacttgaaaaagggttgcaacaaagtgtctcttcccaaaaaagcaagaacagtgatcatgcaggtgttaatctgcagacatctgangacactgggtatctgngttggctgcattctggcttcactggganaaaatggtaggccaggcnttacttttgaa

SEQ ID NO: 6907 - DNA, 547 bp, Homo sapiens
  misc_feature (441)..(441): "n" may be a, t, c, g, other or unknown
  misc_feature (457)..(457): "n" may be a, t, c, g, other or unknown
  misc_feature (495)..(495): "n" may be a, t, c, g, other or unknown
  misc_feature (517)..(517): "n" may be a, t, c, g, other or unknown
aatttcaacaggtttttggggaacaggtggtgtgtttggttacatggataacttcttcagtggtgatttctgagattttggtgcacccatcacccaagcagtgtacactatatccaatgtgtagtcttttatccttcacacccctcccacccttccccttgaagccccaaagtccactgtatcattctttctttttgagacggagtctcgctctgtcacccaggctggagtgcagtggcgtgatctcggctcactgtaacctcacctcccaggttcaagcaattctctgcctcagcctcccgagtagctgggattacaggtgcttgccaccagcttggtttttcattcctgagtctcttcatttagcataatggtttccaactccatctagattgctgtgaatgccattatttcgttcctttttatggctgagtagcattncacaagatatatatgncacgtttctttaatttgcttggtgaatggatggcattnggctaagttccatttttgcaantggcaaatggggctggtttaacaagggggg

SEQ ID NO: 6908 - DNA, 547 bp, Homo sapiens
  misc_feature (462)..(462): "n" may be a, t, c, g, other or unknown
  misc_feature (521)..(521): "n" may be a, t, c, g, other or unknown
  misc_feature (535)..(535): "n" may be a, t, c, g, other or unknown
  misc_feature (539)..(540): "n" may be a, t, c, g, other or unknown
ctcagttcaaaggtttaaaaagggagaacctttgctcttcttatagagattcaagtctgcatttctcttgattgaccacaagggacagactgaaaaaaaaaataatagcagaaagtatgcatgatgtaccttgggaaaggatagttccgtacagatcccctagacttggtggaagtcttggggcaaaccaaaatgaaattaagactacacgtctcaatatatagtgaaaagccttgagaaggaatgatcttgatgtcacaggaactttgtaattagtccactgggaaataattgtttacattttcaaataagtaaataaatagacaataatagtcgctggtcccataggagtagggattttgactcactctctgtaggaattttcttatatagtattgacctactatgaccctcaattcccatacactatcccccggcatattgatatctacaacccttggngggattggtgaatgaagacatttatattaccctggatgtaggtgccaattaaggaaaantggatctctgaccnctgnncaatgaa

SEQ ID NO: 6909 - DNA, 544 bp, Homo sapiens
  misc_feature (426)..(426): "n" may be a, t, c, g, other or unknown
  misc_feature (469)..(469): "n" may be a, t, c, g, other or unknown
  misc_feature (477)..(477): "n" may be a, t, c, g, other or unknown
  misc_feature (509)..(509): "n" may be a, t, c, g, other or unknown
  misc_feature (523)..(523): "n" may be a, t, c, g, other or unknown
  misc_feature (528)..(528): "n" may be a, t, c, g, other or unknown
  misc_feature (544)..(544): "n" may be a, t, c, g, other or unknown
gtggcagaggggtccaggggggacaggggttggacacacctgtcaattccagtctgatggaaggccccttagaggcagctacccacacagagtgcagaggctgacaggctgacctgcctaagaaatctccctcagccgagacctaagggccttctagacacatgcacgccttgggatctgtctcctgggagctgtgacagattaatgggaaacagatgatgtgaggttcttatctgattaacccacagagctcattcttacctagaaaacagaaccacaggcagaaacaggtcacagacttggggtataaaggagaggaggttttttatttttatttttaaaggaccaagcactgggagtctcctgctgcaaggggagactcagtgtcaaacccatctcatgctgaggcttcagttggccactcangaacctttgcaacaaggatgaacatcttttggaagaatgaganatgggttncaaggctttttggagaatcagaggatcctggnattaaaagaaccgnaaatnggaaatggggatactn

SEQ ID NO: 6910 - DNA, 537 bp, Homo sapiens
  misc_feature (439)..(439): "n" may be a, t, c, g, other or unknown
  misc_feature (467)..(467): "n" may be a, t, c, g, other or unknown
  misc_feature (469)..(469): "n" may be a, t, c, g, other or unknown
  misc_feature (480)..(480): "n" may be a, t, c, g, other or unknown
  misc_feature (494)..(495): "n" may be a, t, c, g, other or unknown
  misc_feature (535)..(535): "n" may be a, t, c, g, other or unknown
ggagacggagtctcactcgatcacccaggctggagtgcagtggtgcgatctcggctcactgcagccttcgccttctgggttcaagtgattctcctgccttagcctctcgggtagctgggactataggcatgcgccaccacgcccggctaatttgttatgcaacttttagatggctcaagtcatggataaactgagactatttagactagagaactggatgggcttgacagtcttccatcaataccactattctcaatgggttctgacaagaaatgagctgcaaatgtctttaggttattgcctctgtctaggtccagaattgcatatattctacactgtttgaaggtaagtttgtacactttcaagatcagatgaataggctggcaattctaaaagttgaggattcctgtaataattgagaagccaatccaaaaatcgngccttgcaggaagcatccactttccagntncaagagctaanaggcaaatccaagnnttctggtcttcatgaaaggtggaacttaaatcccccaatngg

SEQ ID NO: 6911 - DNA, 545 bp, Homo sapiens
  misc_feature (431)..(431): "n" may be a, t, c, g, other or unknown
  misc_feature (545)..(545): "n" may be a, t, c, g, other or unknown
gtgggcaaagtaggaggcaaatggaagttgaaaaacaggctttgagtaacaactaattttgttagaatcatgaccctcattgagaacattcacctcccaaacattggtatacgcactgcagcctggtcattctaatttgattcaacatttaatcattattaatgcaagtaggggaagctcttaaaaataagtttctatcttcttaacttcctttaagacttcaagctaaaagggtctaaaattcctttaaatcactgtaagtcaaaatcgttttctgtgttgtcaaagagtcaccaatgatttgtttattgagcccttcctgtgtacaaacacggtggcaaacacacaatggtgtaaagcctcatccagtcatctttaaggagcttgcaagagaactgagatctctttgagtgcctatacaaccaatctgnttttcactttcaatacagtattcaataaactacatgagatatttggagctttaatacaaaataaggctttttggtacatgaattttgcccccattggaaggctaaatggcaggn

SEQ ID NO: 6912 - DNA, 499 bp, Homo sapiens
  misc_feature (72)..(72): "n" may be a, t, c, g, other or unknown
  misc_feature (77)..(77): "n" may be a, t, c, g, other or unknown
  misc_feature (111)..(111): "n" may be a, t, c, g, other or unknown
  misc_feature (129)..(129): "n" may be a, t, c, g, other or unknown
  misc_feature (136)..(136): "n" may be a, t, c, g, other or unknown
  misc_feature (152)..(152): "n" may be a, t, c, g, other or unknown
  misc_feature (220)..(220): "n" may be a, t, c, g, other or unknown
  misc_feature (226)..(226): "n" may be a, t, c, g, other or unknown
  misc_feature (358)..(358): "n" may be a, t, c, g, other or unknown
  misc_feature (424)..(424): "n" may be a, t, c, g, other or unknown
  misc_feature (442)..(442): "n" may be a, t, c, g, other or unknown
  misc_feature (467)..(467): "n" may be a, t, c, g, other or unknown
  misc_feature (476)..(476): "n" may be a, t, c, g, other or unknown
  misc_feature (480)..(480): "n" may be a, t, c, g, other or unknown
  misc_feature (483)..(483): "n" may be a, t, c, g, other or unknown
  misc_feature (497)..(497): "n" may be a, t, c, g, other or unknown
ggctccatttgttttaattggacccttttcagcctggggctccccccagcccccaggctacggcctggaggngtctntggccagccacagcatccagctgctggctcccanatctgtccagttgcccanagggaanaagggcgggtgggcanaaggaaggggctggagacagatcatcagccttcccacccaccccgggtggggccctccctgtctccanaaaggnggcccaggggcgccagtctagccaccccagaaatatccaaggcactggcgggggggcaaccccttacagccagccccacccggctatgtggctgttgtgtgcctgttggtcaaacgcccggccacccggctntgagggccatcagtgggggctggcctgggcccttcagctgccccgttctttaactgcaaaaggttncttgggcccgccggcaancttcttacttggaatctgaatcttntacaatcantacnaanggccttttccattngg

SEQ ID NO: 6913 - DNA, 528 bp, Homo sapiens
  misc_feature (192)..(192): "n" may be a, t, c, g, other or unknown
  misc_feature (421)..(421): "n" may be a, t, c, g, other or unknown
  misc_feature (471)..(471): "n" may be a, t, c, g, other or unknown
  misc_feature (505)..(505): "n" may be a, t, c, g, other or unknown
gagacggagtctcgctctgtcaccaggctcgagtgcagcggcgcaatctcggccccctgcaaactccgactcccaggttcaagcgattcttctgcctcagcctcccgagtagctggaattacaggcacgtgccaccacgcccagctaatttttgtatttttggtagagacggggtttcaccatgttggccanaatggtcttgatctcctgaccttgtgatccgcctgcctcggcctcccaaagtgctgggattacaggcatgagccaccatgcctggcctggtctctacttttaattgtcacagccttaattcctcttcctgtaaaatatatatagtttcctattgacactgtaatacattgccacaaattacataacttaaaacaacacagatttattttctgacagttctggaggtcanacatcctaaaatcaaggtgttggcaggactgcgttccttctaaagctcangggagaatctgggggctgcattttcagcttttanaaggcccttgcattctttgggtt

SEQ ID NO: 6914 - DNA, 557 bp, Homo sapiens
  misc_feature (502)..(502): "n" may be a, t, c, g, other or unknown
  misc_feature (537)..(537): "n" may be a, t, c, g, other or unknown
  misc_feature (546)..(546): "n" may be a, t, c, g, other or unknown
  misc_feature (555)..(555): "n" may be a, t, c, g, other or unknown
ggagacggagtctcactctgtcgcccaggctggagtgcagcggcacgatctcagttcactgcaacctccgcctcccgggttcaagcgattctctgcctcagcctccctagaagctgggattgcaggcatctgccaccacgcccagctaatttttgtatctttagtagagatggggtttcaccatgttggccagattggtcttgaactcctgacctcatgatccacccgcctcggcctcccaaagtgctgggattacaggcgtgagccaccgcgcccggcccagctctagactgttttaaagggcaccctttccagttactttttcccttttaacacacggtgggagttcaaatctccaaaagaggtttccatggggtcagtgggacgaaagctccttgccacctctagtgaaacgcggtccttgacactagcacggcagaccagatggagtggacactgagctctgacacgcaagcccagggaacccggggaaggaacttgnatgaacttacaggcaaaccgtagcagactgggaanaagtttgangggtaccgnaa

SEQ ID NO: 6915 - DNA, 553 bp, Homo sapiens
  misc_feature (213)..(213): "n" may be a, t, c, g, other or unknown
  misc_feature (395)..(395): "n" may be a, t, c, g, other or unknown
  misc_feature (442)..(442): "n" may be a, t, c, g, other or unknown
  misc_feature (455)..(455): "n" may be a, t, c, g, other or unknown
  misc_feature (494)..(494): "n" may be a, t, c, g, other or unknown
  misc_feature (499)..(499): "n" may be a, t, c, g, other or unknown
  misc_feature (513)..(513): "n" may be a, t, c, g, other or unknown
  misc_feature (515)..(515): "n" may be a, t, c, g, other or unknown
  misc_feature (531)..(531): "n" may be a, t, c, g, other or unknown
  misc_feature (551)..(551): "n" may be a, t, c, g, other or unknown
gtaaagacagaatcttgtttcactatgttaccaggctggtcttgaactcctagctttaaatgatcctcccaccttggcctcccagagcactgggattaaaggtgtaaaccaccacacctggccttcagaggttctttatatattctgatacacatctttaatcccttgtaaatgctgggaatttctgtttttttaactcattctgtggcttgnctattcattttcttaatgctgtcttttgatgagcaaaaactatgaataagacctattcatcaaattttcttttgagattagtgctgtgtcctgtccaacaaatccttgctcagttttaaaagatttcttcatgtaagctctgctatggtttaagtttatttctagataagtgatctttttgntaattttctgaatgggtttttctcttccactatactttataattagntattggtcagatnaagaaaaactatagcccgggcctggtggctcatgcctgnaattncagcactttgggangnccaggcggccggacanctgggaacaggagttgggancc

SEQ ID NO: 6916 - DNA, 558 bp, Homo sapiens
  misc_feature (486)..(486): "n" may be a, t, c, g, other or unknown
  misc_feature (495)..(495): "n" may be a, t, c, g, other or unknown
  misc_feature (521)..(521): "n" may be a, t, c, g, other or unknown
  misc_feature (524)..(524): "n" may be a, t, c, g, other or unknown
  misc_feature (552)..(552): "n" may be a, t, c, g, other or unknown
gacagtcttgctctgttgcccaggctggagtgcaatgataggatcttggctcaccgcaacctcctcctcctgggttcaagcaattctctgcctcccgagtagctgagattacaggcacgctccatcacgcctggctaattttttgtattttaagtagagatggggtttcaccatgttggccaggctggtctgtaactcctgacctcaagtgatctcaagtgatctgcctgtttttgcttcccaaagtgcaggaattataggcatgagccaccgtgcccagtcagaaaacacatttttaaagaacaatattcaaggacataatataaaaagtataatttgtcagaatcagaaacttctgaagtatcaaacactgcatttcaggcttagtcattcagttaatcttttacatgaaaatcatttttacaatcagagctaattttttgcaaagtaatctcactaatttttaacccaaatttgatattctgncccagatcngaaaaaggtgagaatactgaaattgnatntaaaagggtgactaatcattgactaagnggacta

SEQ ID NO: 6917 - DNA, 548 bp, Homo sapiens
  misc_feature (505)..(505): "n" may be a, t, c, g, other or unknown
  misc_feature (531)..(531): "n" may be a, t, c, g, other or unknown
cctgggacggagtctggctttgtcgcccaggcaggaatgcagtggcaggatctcggctcactgcaagctccgcctcccaggttcacgccattctcctggctctgtctcccaagcagctgggaatacaggtgcccgccaccacgcccagctaatttttttgtatttttagtagagacagtgcctcaccatgttagccaggatattctggatctcctgacctggtgatccgcccacctcggcctcccaaagcgctgggattactggcgtgagccaccgtgcccggccgaaaatcagttaactcttcttagacccaatagagaattgaggttcagggcaaactgctgctcccaaaactggagagagatgtgactacagaaaaccacagctacgggtatcacaaaccccagcaagagaaacaaacagctggagccagtatccataggaacactgtaatgtaaattgcttggaggttcaacgtggactagcttgagaattaaaagctcangggatggcaagctggctgggggaaanaccgaggaactttctgg

SEQ ID NO: 6918 - DNA, 564 bp, Homo sapiens
  misc_feature (460)..(460): "n" may be a, t, c, g, other or unknown
  misc_feature (472)..(472): "n" may be a, t, c, g, other or unknown
  misc_feature (543)..(543): "n" may be a, t, c, g, other or unknown
  misc_feature (563)..(563): "n" may be a, t, c, g, other or unknown
gcttttgacactttatccgtttttatttaaaaacatgctaaaaacatggtgttccataaagccaggaccaggatgaaggaacgcacagatacggcaatgcaagcagaaagtgcatctgaaaccaacaagcgtgctcaccctgctctccctcccgtgctgcccgggggcaggcaggtgggcaaggagggggcaggaagccccccaggcctcacctcctgagtccccaatcagggcagggaggccaggccccaccctggactattgactcactgcagtggggaggaggaaagtgtggggcacgggaacacaagggctggccggactctgagaagctgagggacaaagaatggaccccaagcacctcacgcccagctcccatcctatgccacgtcccttgctagttagcaccttcaccagtgggtggccagggctggaaaaggaaggggacagatgtcctctntttccacccatnccttaaccttaagggaaaaaaagtcaaacccttaaggaaatcaccccagtaaaaagttccaaatcgaaatntaaccttaacttatttgagna

SEQ ID NO: 6919 - DNA, 560 bp, Homo sapiens
  misc_feature (473)..(473): "n" may be a, t, c, g, other or unknown
  misc_feature (502)..(502): "n" may be a, t, c, g, other or unknown
  misc_feature (537)..(537): "n" may be a, t, c, g, other or unknown
  misc_feature (548)..(548): "n" may be a, t, c, g, other or unknown
aagtctgggaattgatttagggttattcacactttcaatttttccaagtaagaatattaagaacaaaaagtaccataattccactaaaatagctgaaatgtaaagacagaatcaactactgatacacacaacagcatggatgaaattcaaaagctttttttttttttttttttgagacatgatctcactctgtcacccaggctggagtacagtggtgcaatctcagtttgatgtaacctctgtctcctgggctcaagcaatcctcccacctcagtctcctgagaagctgagactacaggtgtgcaccaccatgcccagctaatttttttcatatttttttggagacagggtttcgccatgttgcccaggctggtctcgaactcccagactcgagcaatctgcctgcctcagcctcccaaagtgctgggattacaggcgtgagccaccacatccagcctcaaaaacttttttgnaagtaacagaagtctgttgtgaaaggccntataattctacctattgaacattctagaaaaagcngacttttaatngggaacccatcc

SEQ ID NO: 6920 - DNA, 557 bp, Homo sapiens
  misc_feature (509)..(509): "n" may be a, t, c, g, other or unknown
  misc_feature (551)..(551): "n" may be a, t, c, g, other or unknown
gagatggaatcttactctgttgcccaggctggagtgcagtggcgcaatctcagctcactgcaagctccgcctccggggttcacccattttcctgcctcagtctcccgagtagctgggactataggcacccgccaccatgactggctaattttttgtatttttagtagagacgaggtctcatagtgttagccaggatggtcttgatctcctgacctcgtgatctgcccgcctcggcctcccaaagtgctaggattacaggcgtgagccaccacgcccggcccacaatactttaattttttaaaagcaccttttgtatgtggaacttgtcaaaagccctgcaaaagtgtgaagaattttatctatgctccctttctaactctcaccatttatcattgacttttacgtacaaaaaactatttaataccttcttatgtctgtttcaaaaaataatttaagtgaatcttctgaatccttttctaagaccatggaaaataatttcatcttttggntacctttttcacccggaaatatctttctggaacatcttttanggggag

SEQ ID NO: 6921 - DNA, 561 bp, Homo sapiens
  misc_feature (534)..(534): "n" may be a, t, c, g, other or unknown
  misc_feature (540)..(540): "n" may be a, t, c, g, other or unknown
  misc_feature (554)..(554): "n" may be a, t, c, g, other or unknown
ggtagagacagggtcttgctatgttgcctgggaaagtctcaaactcctggcttcctgctttggttccccaaagtgttggaattacaggcataagccaccgtgccctgccattgttaatattaaatgtacttcactgaatcctaattttttggaaaactgatcagaagacactatctatgtatcacatatgcatatataaatatccacaatcaccataatttgtgtattttactaaccagtttaatacagttttctggctgtatgagagtcaaaaatcacataaaaagcttcataaacatatcaaaataatcttttgattgcattagggaacgtaaataaaagagttcctggagatattaagaaattcctggagactcccttctgggaaaagcacagaatagtagaaaaggcagtggggctatgagttaggtgctggagttctagtcttggctccctaactactggcttgacagcaacttgaacatattcaaatctctttaagctttagtttctctctataaaatgaagaatgcngattanggaactctattagnccccacc

SEQ ID NO: 6922 - DNA, 554 bp, Homo sapiens
  misc_feature (550)..(550): "n" may be a, t, c, g, other or unknown
gttgttgttgtttgtttgtttgttttttacactgaggcatggtctctctgtgttacccaggctggagtacagtggctattctcagttacaatcacagctcactgtagccttaaactcttagctcaagcaatcctcctgccttagcctcctgagtagctgggactataggcatgtgccactatactcagcttagactgctatttttaatcttaaattggctgttatataagcaggtcttaccttatatacaaacttcttaaaggctgagctattttacaatagctaaatacaatagcaccaagttgagtcctaagcatataaaagaacatggatattttttgaatggatctgaattttacatatatataataattgtgtcatttactattttaaaaacattatgtgattacattttcagcatataagctaatgacattaatctaggcataacatctaacaaagaaatggtaagcagtggcaacataaacacaatttatatcctaattcataggactttatttttattcctgaaaaaccattaaacattggncaaa

SEQ ID NO: 6923 - DNA, 557 bp, Homo sapiens
  misc_feature (495)..(495): "n" may be a, t, c, g, other or unknown
  misc_feature (531)..(531): "n" may be a, t, c, g, other or unknown
  misc_feature (548)..(548): "n" may be a, t, c, g, other or unknown
  misc_feature (554)..(554): "n" may be a, t, c, g, other or unknown
  misc_feature (556)..(556): "n" may be a, t, c, g, other or unknown
ctttttgagacggagtttcactcttgttgcccaggctggagtgcaatggtgtgatctcggctcactgcaacttccgcctcccaggttcgagcagttctcctgcctcagcctcccaagtagctgggattacaggtgcctgccaccatgcccagctaattttttgtatttttagtagagacggggtttcaccatgttggccaagctggtctcaaactcctgacctcaagcgatccacccaactcaacctcctaaagtgctgggattacaggcatgaatcacaaggagattttccccccttatgctcagcgcttctccttgctgctgccatgtaaagaaggatgtgtttgcttccccttctgccatgattgtaagtttcctgaaacctccccagccatgctaaactgtgagtcaattaaacctccttccattataaattacccagtctcaggtatgtctttattagcactgtgagaacagacttaaatacaatattgncatggcatatgacagcactgactaaaagaaaagccncttatttacagaatctnccttcntnt

SEQ ID NO: 6924 - DNA, 556 bp, Homo sapiens
ataacatatttaatttaatgcataaggtataatgaactggttcagtttaacacaattacgtaagatttttaatattatgaacaacctgtttggttaacaagatagcagctataaaactataatgtttagtttgtttctcctgcagactcagaaaataaatgttttctttttgctttgcatttataaactttttgcaactcaaaaaatctctttcagtattcaattttaattaatctagcctaaagtataatactcagcaatctgtactattctgactttaaaatcatatcaaatattaataacatatatgctcttaagaaagtacctttctttgtaaatacaactgacaaaatattcagcaaagtgtgtacaatagtgccttgtatacatgtgtctttctagagctacttcagtataatttaacaatcattgcacaatagcagatgtataatagtttccatataaactattatctaagctgtaaaatatggacatagtcagcaaatcatttctgagaaaaggcatagatggttatttccaactatctcttttaggg

SEQ ID NO: 6925 - DNA, 561 bp, Homo sapiens
  misc_feature (533)..(533): "n" may be a, t, c, g, other or unknown
  misc_feature (540)..(540): "n" may be a, t, c, g, other or unknown
  misc_feature (545)..(545): "n" may be a, t, c, g, other or unknown
  misc_feature (547)..(547): "n" may be a, t, c, g, other or unknown
  misc_feature (561)..(561): "n" may be a, t, c, g, other or unknown
aaatccaagtcaaagaataactcagctctttacagttatttaaatctgaaaactatttccctgaaaatgaaatttctaagtaatatacgaatcaacttaactagactgaaacatttaggctgatcttactttatcctttatctcagtatcttacctaacggttctatatttcaaagcctgacagatttgtttggctggcatgatctgaccacttcctttctatcgagaaatacaattttctcttttgttgctgaaagatttctgttcacgcgtatgaacgtgggtccgtttacagattttgaagtgtaaatgttaacatggagataatgcaggtcagtattttacatcttattagatatctatataaagaagataagatagccgggtacaatggcccatgcctgtaatctcagcactttgggaggacgagatgcaaggattgcttgagtccaggagtttgagaccagcctgggcaacatagtgagaccccattatttttcctttttttcttttgagacagagtctcactctgncactcangctanantgcaatgggcgtgn

SEQ ID NO: 6926 - DNA, 470 bp, Homo sapiens
  misc_feature (453)..(454): "n" may be a, t, c, g, other or unknown
  misc_feature (457)..(457): "n" may be a, t, c, g, other or unknown
  misc_feature (462)..(462): "n" may be a, t, c, g, other or unknown
  misc_feature (468)..(470): "n" may be a, t, c, g, other or unknown
aaatggagtctcactctgttgcccaggctggagtacagtggcacgatcttggctcactgcaacctccgcctcccgggttcaagtgattctcctgcctcaacctcccaagtaggtgggactacaggtgtgcgccaccacacctggctaatttttgtatttttagtagagacggggttttgccatgttggccaggctggtcttaaactcccgacctcaggtgatccacccgcctcagcttcccgaagtgctgggattacaggcatcagccaccgtgcccggccaaaacttctttctaatctatggaattgggtctgagaactaggtatgctctacattttcacacaaaaagaattaaggatatggattctacaaaacatgaacatcctagagatagtggaaaaaacaaattcccagtcgtactcatttatcatacttctagttctttctgagggnntanggggnaagggnnn

SEQ ID NO: 6927 - DNA, 499 bp, Homo sapiens
  misc_feature (423)..(423): "n" may be a, t, c, g, other or unknown
  misc_feature (426)..(426): "n" may be a, t, c, g, other or unknown
  misc_feature (447)..(447): "n" may be a, t, c, g, other or unknown
  misc_feature (463)..(463): "n" may be a, t, c, g, other or unknown
  misc_feature (471)..(471): "n" may be a, t, c, g, other or unknown
  misc_feature (477)..(477): "n" may be a, t, c, g, other or unknown
  misc_feature (488)..(488): "n" may be a, t, c, g, other or unknown
gagacagagtctcgctctgtcgcccgggataccgatctaggctcactgcaagctccgtctcccaggttcactccattctcctgcctcaacctcccgagtagctgggactacaggcgcccgccaccacgcccagctaatttttgtatttttagtagagatggggtttcaccgtggtagccaggatcgtctcgacctcctgacttcgtggtctgcctgcctcggccttccaaagtgctgggattgcaggtgtcagccacgaccacgcccggctaaccccagccctttctaagagcagaaaaatggatagatttgatgagagaatcttatgagaatggtacatgaatttggatgtaaaatcaggttacaaattaaagaggctttaaaagcaatgaataaataaacacagccctgttaggctattanganggccttggcaatgagaaaaantaaatattgaattaanggataagnatttcnggatttttggnaattcctgggc

SEQ ID NO: 6928 - DNA, 488 bp, Homo sapiens
  misc_feature (158)..(158): "n" may be a, t, c, g, other or unknown
  misc_feature (375)..(375): "n" may be a, t, c, g, other or unknown
  misc_feature (430)..(430): "n" may be a, t, c, g, other or unknown
  misc_feature (435)..(435): "n" may be a, t, c, g, other or unknown
  misc_feature (443)..(443): "n" may be a, t, c, g, other or unknown
  misc_feature (466)..(466): "n" may be a, t, c, g, other or unknown
  misc_feature (468)..(468): "n" may be a, t, c, g, other or unknown
  misc_feature (473)..(473): "n" may be a, t, c, g, other or unknown
  misc_feature (486)..(486): "n" may be a, t, c, g, other or unknown
gagacggagtctcactctgtcgcccaggttggagtgcagtggcgcaatctcagctcactacaagctccgcctcctgggttcacgccattctcctgccctcagcctcgggagtagctggcactacaggcggccgccaccacgcctggctaattttttgnattttttagtagagacggggtttcactatgttagccaggatggtctcgatctcctgacctcatgatccgcccacctcggcctcccaaagtgctgggattacaggagtgagccaccgtgcccggccaacattaaggagttattacagtgctggtgtgatcacggtatcaataagttgggttggttttttttaaaaagagtcatatttttaaaatatgnactaatttacagatgaaacggtatgacaactaggattgcttccaaataatctggnggganaagagccnggagttaccagaatagccctgangngaaanaatgctgctgggnga

SEQ ID NO: 6929 - DNA, 567 bp, Homo sapiens
  misc_feature (445)..(445): "n" may be a, t, c, g, other or unknown
  misc_feature (488)..(488): "n" may be a, t, c, g, other or unknown
  misc_feature (500)..(500): "n" may be a, t, c, g, other or unknown
  misc_feature (524)..(524): "n" may be a, t, c, g, other or unknown
  misc_feature (529)..(529): "n" may be a, t, c, g, other or unknown
gttttattccttctgaaccacatactttgttctttttgtttattactcatatacttaaagagcagtggtgaaaaaggcccttagaaataatttcatctactgccctcaggaaatctgaagcagatctgcaggcatatcttatctttggtttgtagcttctaccctccttacaatcccatacatttaaaattccaatgtataagtcttgctggcttcattacaatccacctcagaataattagacacagagcaaattgtgggataatccaaccttagttatattttcttctcagtccatgagacaaaaaaggattcaaacaaaataaatacatgcttgacaaaaatgggacaaaagaagaaacaaatgaaaggaataatgaacctataaattttcaaaatctataaacattgaactaagacttgatgtacttgatatacctgctgncctaaaattgactttcatttctcacaattaatcgcctttctgnttcgacaaggtnctaaaatctacacaatttttcagnactgngtaaacctatccctactaaaagaaattttcctcgaaga

SEQ ID NO: 6930 - DNA, 554 bp, Homo sapiens
  misc_feature (5)..(5): "n" may be a, t, c, g, other or unknown
  misc_feature (44)..(44): "n" may be a, t, c, g, other or unknown
  misc_feature (190)..(190): "n" may be a, t, c, g, other or unknown
  misc_feature (417)..(417): "n" may be a, t, c, g, other or unknown
  misc_feature (458)..(458): "n" may be a, t, c, g, other or unknown
  misc_feature (470)..(470): "n" may be a, t, c, g, other or unknown
  misc_feature (509)..(509): "n" may be a, t, c, g, other or unknown
  misc_feature (527)..(527): "n" may be a, t, c, g, other or unknown
  misc_feature (543)..(543): "n" may be a, t, c, g, other or unknown
  misc_feature (549)..(549): "n" may be a, t, c, g, other or unknown
  misc_feature (553)..(553): "n" may be a, t, c, g, other or unknown
ctttncttttttttttttttttttgagacagagtctcgctctgncacccaggctggagtgcagtggcgagatcttggctcactgcaagctcctcctcccgggttcacgacattctcctgcctcagcctcccgattagctaggactacaggcccccgccaccgtgcctggctaattttttgtattttttantggagacggggtttcaccctgttagccaggatggtctctatctcctgacctcgtgatccgcccacgttggcctcccaaagtgctgggattacaggtgtgagccaccgcgcccggccagaatatcatattttcctactgttttccactccatttggcaaaagcctacaattctttggcactgtattctactcagtgtgtaattacaataattggcattaagataagtnggacggctgatattctatttaatttggaccccagggaaaanagaaaggtggtnaagaaacacttcaaaaaaagctttctaaggcatattttntgaataacctccggttgnggattccccaacttgntttaangggna

SEQ ID NO: 6931 - DNA, 532 bp, Homo sapiens
  misc_feature (446)..(446): "n" may be a, t, c, g, other or unknown
  misc_feature (462)..(462): "n" may be a, t, c, g, other or unknown
  misc_feature (473)..(473): "n" may be a, t, c, g, other or unknown
  misc_feature (480)..(480): "n" may be a, t, c, g, other or unknown
  misc_feature (482)..(482): "n" may be a, t, c, g, other or unknown
  misc_feature (500)..(500): "n" may be a, t, c, g, other or unknown
  misc_feature (529)..(529): "n" may be a, t, c, g, other or unknown
gagactgggtgtcaatctgtcgcccaggctagagtgcagtggtgcaatcctggctcattgcaacctccacctcccaggctcaagtgatcctcccgcctcagcctcccaagtagctgggactacagacgcacacacaacccactacgtgccaaccactgttatgtgctgtgcatatgcaagttttggttcggttactttaaataacctataatactgagcacacaactgccactcgtctccagggctctttggaacccaaaattcagagattgctaggaataatttacccccaaagtcaaataaaaccagttagtcaacattttttggatagtcaatttcagtaaacacttccctgtcttactatctatgaaagacattatgatacagttcatcaaatctcttgcaaacatcacgatagacgtggacttctggcattccctaaaggngccatgtatgacttgngctggggtganccatggngnccatgggcattacccttncctttggaactggtacaaacatgggggcnaac

SEQ ID NO: 6932 - DNA, 556 bp, Homo sapiens
  misc_feature (373)..(373): "n" may be a, t, c, g, other or unknown
  misc_feature (405)..(405): "n" may be a, t, c, g, other or unknown
  misc_feature (473)..(473): "n" may be a, t, c, g, other or unknown
  misc_feature (477)..(477): "n" may be a, t, c, g, other or unknown
  misc_feature (485)..(485): "n" may be a, t, c, g, other or unknown
  misc_feature (529)..(529): "n" may be a, t, c, g, other or unknown
  misc_feature (538)..(538): "n" may be a, t, c, g, other or unknown
  misc_feature (540)..(540): "n" may be a, t, c, g, other or unknown
  misc_feature (552)..(552): "n" may be a, t, c, g, other or unknown
gtaaagatggggatctcactctgtttctcaggttggtctcaaacttctgggctcaagtgagccttccaccttggtcttccaaagtgctgggattacaggtggcagccactgtccctgacccaggatcacatcttaattcgcctttgtatacccacacagcacctccacacacacgtggcaggtgatggggtttccagaaagtttgctgaaggagtagaaaatccactgtcattttcacggccaaagcctgacacctacagcttgagaaggaaggaattccttccccatgcccctcagcatatctcttgtacaggtccaagtgttcctattaatgctttgtggcttaaactttttattccttcaagttttttgnttcttctcttccctggaacaagagtcttaagngatttcactagtcaaacaacgtaatgacacaatactacaacccacaggtatctactatctacaggggncctnaccttttngcacttgaggaccagtttatgaagacagtttttctatggaccanggttggggntngggggaaggttnggga

SEQ ID NO: 6933 - DNA, 557 bp, Homo sapiens
  misc_feature (484)..(484): "n" may be a, t, c, g, other or unknown
  misc_feature (488)..(488): "n" may be a, t, c, g, other or unknown
  misc_feature (495)..(495): "n" may be a, t, c, g, other or unknown
  misc_feature (533)..(533): "n" may be a, t, c, g, other or unknown
  misc_feature (543)..(543): "n" may be a, t, c, g, other or unknown
  misc_feature (554)..(554): "n" may be a, t, c, g, other or unknown
aatggctgaacaatacattccacagtttatttttttcttcaacttttaagttccggggtacatgtgcaggatgtgcaggtttgttacatagataaacatgtgccatggtgctttgctgcacagatcaacccactacctaggtagtaagcccagtatccattagctattcttcctgatgctctccctccccccacctttccccaggacagacaccagtgtgtgttgtttccccgaccaaccccacgtgtccatgtgttctcattgttcaactcccacttatgaatgaaaacatgtggcgtttggttttatgttcctgcattagtttgctgaggataatgccttccagctctatccatgtccctgcaaaggacatgatctcatttcttttcatggctgcataagtattccatggtatatatgtaccacatttctttatccagctaccattgatgaaccattgggttggattccatgtccctgctantggngaatagngctgcaatggaacataagttttcctggtcttattaaanaaattttctnttgccaaagtntaa

SEQ ID NO: 6934 - DNA, 559 bp, Homo sapiens
  misc_feature (431)..(431): "n" may be a, t, c, g, other or unknown
  misc_feature (450)..(450): "n" may be a, t, c, g, other or unknown
  misc_feature (453)..(453): "n" may be a, t, c, g, other or unknown
  misc_feature (522)..(522): "n" may be a, t, c, g, other or unknown
  misc_feature (555)..(555): "n" may be a, t, c, g, other or unknown
gcctatgttaatgtaaatatttcaaatcttaccatccaggaaaaaaaaaaaatctccaaattgcactgtaaccagggagatataagaatctggtcttaggtgtggggagtactcttccattaataaacaaaaggcctactgtattattaactaagagaaagtataatgtgaatcatgttaacattctaaaataacagaaagttaggaccatactagcaatgtgaactgtgcctgtttgaaaatttaaatactcaggcactaagcattagcctacctgaaactctaggatgaagtctagtgctgtattctttcttagaaaatagcaacacagagtaatagtaaataaacccaggtattcaccagttaaaactgtgaattgaagtgtctcagtagtagatatttatcatgaagaggttgatgccaagtggcanggaataggttaatcattangantggagctcaaaatatggcagcctcatcagaaagactattattattctctaaggttaataagttggggancagttaaggaagccaaaattttccccccaaaangggg

SEQ ID NO: 6935 - DNA, 551 bp, Homo sapiens
  misc_feature (489)..(489): "n" may be a, t, c, g, other or unknown
  misc_feature (500)..(500): "n" may be a, t, c, g, other or unknown
  misc_feature (511)..(511): "n" may be a, t, c, g, other or unknown
  misc_feature (538)..(538): "n" may be a, t, c, g, other or unknown
  misc_feature (540)..(540): "n" may be a, t, c, g, other or unknown
  misc_feature (543)..(543): "n" may be a, t, c, g, other or unknown
  misc_feature (551)..(551): "n" may be a, t, c, g, other or unknown
cctgagacggagtctcgctctgtcacccaggctggagtgcagtggtgtgatttcagcttactgcaacctccacctcttgggttcaagctattctcctgcctcagccacctgagtagctgggattacaggcacgtgccaccacacccagctaatttttgtatttttagtggagacgggggtttcaccatgttgcccaggctggtcttgaactcctgacctcaggtaatcccctgccttggcctcccaaaatgctgggattacaggcgtgagccaccgcacccagcccttcatgtagtctttacctcaaaaactcttccaattcagaaatgaggtaagtatatcaatggctacaaggaaagaatgggtaggttttgcaagggaaaaacatactactgaggctcaaaagggaaggggatatctcatgaagaaaggaatgatcaggaaagtttgtgtgaaaaaaggaggaatgtccaagaatggccctggcanaaggagaaaantttaattcaanttttaattcaagtttaaaaaacttcangnggnttaatggn

SEQ ID NO: 6936 - DNA, 542 bp, Homo sapiens
  misc_feature (531)..(531): "n" may be a, t, c, g, other or unknown
  misc_feature (538)..(538): "n" may be a, t, c, g, other or unknown
  misc_feature (542)..(542): "n" may be a, t, c, g, other or unknown
gctaaaataattaaggtcatcacatttcctttccagtctatttcaacctaattccatcaatttttgttttcatgacttatattagttgattctaatagaggtgcaatgttctctgcacagaacccaaatgcaggacaggctattatgttctgcatgccagtcaaattaccaggcattctttttcttaacatttatttcagtttcaggggtatgtgcacaggttgtttttatacataaattacatgtcatgggggtttggtgtgcatattattttgtcagccagataataagcatagtacctaacaggttgtttttcaatccttagcttcctcccacccacctccctcaagtatgccctggtgtatattgttctcttctttgtgtccatgtgaattcaatgtttagctcccacttacaagtgagaatatgtagtgttcattttctggtcctgaattagtttaagtttcttagaataatgggcctccatcttatccatgtgctgcaaaggatagaatctcaatctttttatgntgggtanaatn

SEQ ID NO: 6937 - DNA, 541 bp, Homo sapiens
  misc_feature (108)..(108): "n" may be a, t, c, g, other or unknown
  misc_feature (371)..(371): "n" may be a, t, c, g, other or unknown
  misc_feature (432)..(432): "n" may be a, t, c, g, other or unknown
  misc_feature (486)..(486): "n" may be a, t, c, g, other or unknown
  misc_feature (505)..(505): "n" may be a, t, c, g, other or unknown
  misc_feature (515)..(515): "n" may be a, t, c, g, other or unknown
ggcgaaagtgactagaattggtctatgctaaagaaagaaagaaatacaacatcataccattattttagttggaagagccgcaccaaaaatcatgacaaaaaaaattgngtaaccataagaaaatccagtggcttgttgttgttgatgatgttaatgatctctggctaaaaattcaagtaaaagagtcaaactgcttaaagcattaaaaaagcacagcagtgtaaggtctgcaatgatttgaaaaacactaagaacactcttcaatgtttcctcatttgcagactatcaaacatgatctttgaagtcaaggattacatctacgttcttttaccaatcttgaatatatattctgttacaatatagtaatgacncaaagggatgtcacagacaaaaaggcaaactggcatgtaattaaaaaggttacttttagancatatggatctaattctggattaaaaaaatcttccaatttttaaaatttaaatncctcctaatatattttacnttaaaactgnggttaccatttttaccaaaaatttgg

SEQ ID NO: 6938 - DNA, 549 bp, Homo sapiens
  misc_feature (454)..(454): "n" may be a, t, c, g, other or unknown
  misc_feature (473)..(473): "n" may be a, t, c, g, other or unknown
  misc_feature (490)..(490): "n" may be a, t, c, g, other or unknown
  misc_feature (494)..(494): "n" may be a, t, c, g, other or unknown
  misc_feature (496)..(496): "n" may be a, t, c, g, other or unknown
  misc_feature (503)..(503): "n" may be a, t, c, g, other or unknown
  misc_feature (549)..(549): "n" may be a, t, c, g, other or unknown
gagacaaggtctcactctgttgcataggctggggtacagtagcacgatcacagttcactgaagcgtcgacctcctgggctcaagcaatcctcccagatcagccttgcaagtagctggcacatgccaacatgcccagataacttcttaatttctgatacagactgggtcccactatgatgcccatgctaagatttcttttttaaatgctagaaatggatgttgaagttaatatccctttcagtatttatggaaaggatcatatgttctttttttaatatggtagtattgaattaacagatttcctcattttgaaccatctttatacttccaatacgaccctctcttgtgcatagtccattattcaaagtgctcgcagacactatatggtaaaattttacactaaaatttaacattaatattcctacatataattctataggtttatgaaagctgncagcaattaaaaaatattnactttcacttttgaganaatngnaaattcncatggagttgtttgaaaaaaggggagaccccttttccctttacccn

SEQ ID NO: 6939 - DNA, 487 bp, Homo sapiens
  misc_feature (308)..(308): "n" may be a, t, c, g, other or unknown
  misc_feature (341)..(341): "n" may be a, t, c, g, other or unknown
  misc_feature (356)..(356): "n" may be a, t, c, g, other or unknown
  misc_feature (361)..(361): "n" may be a, t, c, g, other or unknown
  misc_feature (363)..(363): "n" may be a, t, c, g, other or unknown
  misc_feature (420)..(420): "n" may be a, t, c, g, other or unknown
  misc_feature (428)..(428): "n" may be a, t, c, g, other or unknown
  misc_feature (439)..(439): "n" may be a, t, c, g, other or unknown
  misc_feature (442)..(442): "n" may be a, t, c, g, other or unknown
  misc_feature (462)..(462): "n" may be a, t, c, g, other or unknown
  misc_feature (475)..(475): "n" may be a, t, c, g, other or unknown
  misc_feature (478)..(478): "n" may be a, t, c, g, other or unknown
ggagataggtctcactctgttacccagggtagagtacagggacacgatcacagctcactgcaaccttgaccccctgggctcaggtgatcctcccacctcagccacctgagaagctggggctatagccgtgtgccaccacacctggctgatttttgtactttttgtagagacggggtttcttcatgttgccaagatggacaatggacagtttaaagactcacaggaagcatgagtttcccattccctagaatatattacttcctctggctgacagtgttacgtttttcagagagaaaaaaaaggatatncagaaaaagggaaaaatttaaatattacatganggaagaccctaaagngattntntcaaaagctaaaatgtcagaatctggaatggacattttaccccattgggaaggatantattaaangttggttgacnatnccggaaaaatttgaatgctnccaggttgtactnggnaatgtaaaa

SEQ ID NO: 6940 - DNA, 550 bp, Homo sapiens
  misc_feature (339)..(339): "n" may be a, t, c, g, other or unknown
  misc_feature (426)..(426): "n" may be a, t, c, g, other or unknown
  misc_feature (457)..(457): "n" may be a, t, c, g, other or unknown
  misc_feature (472)..(472): "n" may be a, t, c, g, other or unknown
  misc_feature (486)..(486): "n" may be a, t, c, g, other or unknown
  misc_feature (501)..(501): "n" may be a, t, c, g, other or unknown
  misc_feature (519)..(519): "n" may be a, t, c, g, other or unknown
  misc_feature (542)..(542): "n" may be a, t, c, g, other or unknown
  misc_feature (548)..(548): "n" may be a, t, c, g, other or unknown
gagacagtctcactctgtcacccaggctggagtgcagtggcatgatctcagctcactgcaacctccgcctgccgggttcaactgcaacctccacctcccgggttcaaatgattctcctgcctcagcctcccgagtagctgggattacaggcgtccaccaccatgcctggctaattttgtatttttagtagagatggggtttcaccatggtggccaggctggtctcgaactcctgacctcaagtgatccacccacctcgccctcccaaagtgctgggattacatgatgtgagacaccgtgcctggtggaaagaggaatcttggctgggaccctagcatcntctagggaacagagaggttgtgattaagaggtatctggatgaaatcttggtgaaaggaagcacttgtttttaatcccaccatggttnttcatatgcatacaaccatcctcaaacattntgcccatcagcagancttctaaaaaggtngacatacccactggntatccccttcttggcaantttaaaccaagccttgccccggnaatggnaa

SEQ ID NO: 6941 - DNA, 550 bp, Homo sapiens
  misc_feature (87)..(87): "n" may be a, t, c, g, other or unknown
  misc_feature (175)..(175): "n" may be a, t, c, g, other or unknown
  misc_feature (263)..(263): "n" may be a, t, c, g, other or unknown
  misc_feature (358)..(358): "n" may be a, t, c, g, other or unknown
  misc_feature (418)..(418): "n" may be a, t, c, g, other or unknown
  misc_feature (498)..(498): "n" may be a, t, c, g, other or unknown
  misc_feature (523)..(523): "n" may be a, t, c, g, other or unknown
  misc_feature (540)..(540): "n" may be a, t, c, g, other or unknown
  misc_feature (544)..(544): "n" may be a, t, c, g, other or unknown
  misc_feature (546)..(546): "n" may be a, t, c, g, other or unknown
ctttttttttttttttttttctttttgagacagagtctgttgcccaggctggagtgcagtggtgcaatctcagctcactgcaacctntgcctccagggctcaggtgattctcctgcctcagcctcctgaatagctgggactacagacaggtgccaccacacctggctaattttgngtttttagtagagatggggtttcaccgtgttggccaggatggtctcaaactcctgagctcaggtgatccacccgcctccgcctcccanagtgctgggattacaggcgtgagccaccatgcccagccactgtgggttttcttaatgtatgggtagaggtggctttactattagccagtgtgaanagtccttattcttgtgctttggccactatccctgcactcccatcctgggaacatacctgngtttaggcttcaggccaaacatttcatggcaaacctttggtttatctttttttccaaatatttggttgctaatgattggncccagaactttcatataaaatgggnaatccagaaaagaaccncccntntgct

SEQ ID NO: 6942 - DNA, 535 bp, Homo sapiens
  misc_feature (21)..(21): "n" may be a, t, c, g, other or unknown
  misc_feature (428)..(428): "n" may be a, t, c, g, other or unknown
  misc_feature (461)..(461): "n" may be a, t, c, g, other or unknown
  misc_feature (471)..(471): "n" may be a, t, c, g, other or unknown
  misc_feature (482)..(482): "n" may be a, t, c, g, other or unknown
  misc_feature (488)..(488): "n" may be a, t, c, g, other or unknown
  misc_feature (523)..(523): "n" may be a, t, c, g, other or unknown
  misc_feature (531)..(531): "n" may be a, t, c, g, other or unknown
  misc_feature (534)..(534): "n" may be a, t, c, g, other or unknown
gagacacgagtctcgctctgncatccaggctggagtgcaatggtgtgatctcggctcactgcaacccccgcctcctgggttcaagcgattctcctgcctcagcctcctgagtagctgggattacaggtgcacgccaccacgcccagctaatttttgaatttttagtaaagatgggatttcaccatattgatcatgctggtcttgaactcctgaccttgtgatccgcccgccttggcctcccaaagtgctgggattacaggcatgagctaccgagcccagccctaaaagacttctttataaggagccatattgctttggggagaccgaaggctgctgagggcctcagggcagggttgatatgcacctgccagcacgccaccataacatcttcatggaaccttaacactttcttaaaagtgctccacctncttttttttgacccttaaagaagagaccaactnttagtactgngtggcaactgngcctgnccttttacatgggcaggggactgggtgacacattnccccaaanggnc

SEQ ID NO: 6943 - DNA, 551 bp, Homo sapiens
  misc_feature (473)..(473): "n" may be a, t, c, g, other or unknown
  misc_feature (524)..(524): "n" may be a, t, c, g, other or unknown
  misc_feature (527)..(527): "n" may be a, t, c, g, other or unknown
  misc_feature (531)..(531): "n" may be a, t, c, g, other or unknown
  misc_feature (536)..(536): "n" may be a, t, c, g, other or unknown
  misc_feature (544)..(544): "n" may be a, t, c, g, other or unknown
  misc_feature (551)..(551): "n" may be a, t, c, g, other or unknown
gagatggagtttcgctcttgttgcccaggctggagtgcaatggcacgatcttggctcaccgcaacctccgcctcctgggttcaagcaattctcctgcctcagcctcccgagtagctgggattacaggcatgcaccaccacgcctggctaattgtatttttagtagagacggggtttctccatgttgaggctggtctcgaactcctgacctcaggtgatcctcccgcctcggcctcccgaagtgttgggattacaggcgtgagccaccgtgcccagccacaagtaaatactttatcccctcatagaagcacacggttttactgcaattcagtagcttctcctttttttcttgagacagggtctcgctccgtcacccaagctggagtgcagtggcgcaaacacatctcactgcagcttcaacctcctgagctcaagcaatcctctgcctcagcttccaaagtgctgggattacangcgtgtgccaccaccctggccttaataatttctttttctttgaaaaaaggnctnactntggancccaactngggtgcn

SEQ ID NO: 6944 - DNA, 554 bp, Homo sapiens
  misc_feature (538)..(538): "n" may be a, t, c, g, other or unknown
ccttaaaacaggtactgagtataaaacaatatagaacaatatgagagggtcgctctctttcctcattttccccctttgagactctcactttttattagtgggagttctcactcttatttttgctacttatgtctttttgtgcaatagattgatagtgattcatatagtacacttgtgctgaagcattttggtgaactaaggtagcaatgaagctttttatcatttgtagaagtaaaagtagtaaacaagggagcagtaagcaggtttttattactattataactcctattataagagttttaaatcttcctattgctgggaactaatttttaaacatggatcctggattgagtccgtgccacacttgtatgggtacatgtgccagttttgttatatctttaactatatttttaactacttgcccttgatcacctgtgtgtagaaaacaattagtaaagttaaatttttcacaaacttctctttcagctgctacaagtagtcaagagctaggctattttgatagatagcatttctcatnagaagtctcctgctgg

SEQ ID NO: 6945 - DNA, 498 bp, Homo sapiens
  misc_feature (39)..(39): "n" may be a, t, c, g, other or unknown
  misc_feature (52)..(52): "n" may be a, t, c, g, other or unknown
  misc_feature (334)..(334): "n" may be a, t, c, g, other or unknown
  misc_feature (407)..(407): "n" may be a, t, c, g, other or unknown
  misc_feature (433)..(433): "n" may be a, t, c, g, other or unknown
  misc_feature (459)..(460): "n" may be a, t, c, g, other or unknown
  misc_feature (462)..(463): "n" may be a, t, c, g, other or unknown
  misc_feature (479)..(479): "n" may be a, t, c, g, other or unknown
ggaattcacaaaacttttattgatctgtttatcatgccnaaaaaagttgttnatttaaaattcaaattccacttgaaaaagaggcagacaagcgatagttgggatcccagcctgctcctggaggagctcctgtgtccacaaaaaagcacgcacattctacagctatgcgatttgctcactcggaattgcattttggaaaactcctcccagagtccccttgcagaacgccatttgtgtctttagttggttgtagctgggaaacaacaacagaaagaaaaggaactccatcctaagacttcttagaatatttttggttttgaaactactgaccctnaaggatctaccaccacccaacctagaatatatatctatatatatctcatatatatattctcactgaaaagcanatcattgtttatttcacttgctttgntgtcacatcggacccttagggatggnntnnggacacctggctcttncttcttcgtgggatcctgt

SEQ ID NO: 6946 - DNA, 549 bp, Homo sapiens
  misc_feature (497)..(497): "n" may be a, t, c, g, other or unknown
  misc_feature (502)..(502): "n" may be a, t, c, g, other or unknown
  misc_feature (518)..(518): "n" may be a, t, c, g, other or unknown
  misc_feature (522)..(523): "n" may be a, t, c, g, other or unknown
  misc_feature (537)..(537): "n" may be a, t, c, g, other or unknown
  misc_feature (546)..(546): "n" may be a, t, c, g, other or unknown
atttttttgagacggagtttcgctcttgttgcccaggctggagtgcaatggcgcgatcttggctcacagcaacctctgcctcctgggttcaagtgattcacctgcctcagcctcctgagtagctgggattacaggcatgcgccaccacgcccggctaatttttgtatttttagtagagacggggtttctccatgttggtcaggctggtctcgaactccggacctcaggtgatccacctgcctcagcctcccaaagtgctaggatcacaggcgtgagccaccgtgccgggcacgtttcctttaaagagcttttttttgtttattttttgagacggagtctcgctctatctcccaggctggagtgcagtggtgcgatctcagctcactgcaagctccgcctcctgggttcatgccattctcctgcctcagcctactgagtagctggggctacatgcgcccgccaccacactcggctaatttttttggatttttaagtanaaaanggggttcaccacgctngccnngatggcttgaactnctgacctcngaa

SEQ ID NO: 6947 - DNA, 545 bp, Homo sapiens
  misc_feature (442)..(442): "n" may be a, t, c, g, other or unknown
  misc_feature (473)..(473): "n" may be a, t, c, g, other or unknown
  misc_feature (542)..(542): "n" may be a, t, c, g, other or unknown
aagtttcaaattatttattcattcaacaaacatgtcagagagaaatgaacagtctagtagcaaatatttcatagagaaatggacgtatcattccaactcaccacgccccaaacttcctgtggctcactccatcttttgcccctctagggagcttcggtgatgtggatctgccttggggcaggaaaggggaaggggaggtcaggcctagtggctcacgcctgtaatggcagcactttgggaggcagagtcatgtggatcacctgaggtgaggagttcaagaccagcctaaccaacatgttgaatccctgtctctaaaaatataaaaattagccgggtatggtggcaccgtatctgtaatcctagctactctggaggctgaggcaggagaatcgcttgaacctgggaggcagaagttgcagtgagcccgagatcatgccactgnacttcacctgggggacagagcaagactccgnttcaaaaaaaaaaaagttggggggaagaacaaatgatggaggtggagagggaaccttgttggagccacnaaa

SEQ ID NO: 6948 - DNA, 554 bp, Homo sapiens
  misc_feature (355)..(355): "n" may be a, t, c, g, other or unknown
  misc_feature (379)..(379): "n" may be a, t, c, g, other or unknown
  misc_feature (413)..(413): "n" may be a, t, c, g, other or unknown
  misc_feature (442)..(442): "n" may be a, t, c, g, other or unknown
  misc_feature (471)..(471): "n" may be a, t, c, g, other or unknown
  misc_feature (521)..(521): "n" may be a, t, c, g, other or unknown
  misc_feature (533)..(533): "n" may be a, t, c, g, other or unknown
  misc_feature (539)..(539): "n" may be a, t, c, g, other or unknown
gagatggagtctcgctctgtcacccaggttggagtgcagtggcgcaatcttggctaactgcaacctccacctccctagttgaagcgattctcctgcctcagcctcctgagaagctgggactacaggcatgcgccaccacacctggctaattttttggtgtttttagtagacatggggtttcaccatgttagtcaggctggtctcaaactcctgacctcaggcaatctgcccgccttggcctccaaaaatgctgggattacaggcgtgagcgaccgtgcctggccaaaattctttcacacatacgtgttacaaacctgcgtaactccaactctcacttcacgattaacggaccctncaacttttaacatttctccaccgntctttaagaaacctgacccttcacgcaaaaaatnctgtggccatgaattctaagactttatcnaatggtgcttcgcttcacattctgaccantacttttaagaaggaaaaattaaagtttagccaatatattctgaggcctntaacttaataantcaggnattattttaagggcc

SEQ ID NO: 6949 - DNA, 558 bp, Homo sapiens
  misc_feature (407)..(407): "n" may be a, t, c, g, other or unknown
  misc_feature (457)..(457): "n" may be a, t, c, g, other or unknown
  misc_feature (500)..(500): "n" may be a, t, c, g, other or unknown
  misc_feature (522)..(522): "n" may be a, t, c, g, other or unknown
  misc_feature (536)..(536): "n" may be a, t, c, g, other or unknown
  misc_feature (556)..(556): "n" may be a, t, c, g, other or unknown
  misc_feature (558)..(558): "n" may be a, t, c, g, other or unknown
cactgttggttgccttactttaatgctgacctagcagccccgacaggaagctttaacataaagccttgaccctgagaagcatgggtgcgtcttgtcgtgagcaggttcatggctgtgctccatcctcagcccgctgatttttggtcttttgtcctttgatccagcagttcccacgtggatgttgtactgcttctgtccttgatgttgatgccgtgggcagtcaggccccggcgcagggtgtcgcatgcttccagcaggggctgcctttctaggagctgctgccgccgggcgtcccccgtggcctcgggcatggccagcgcaaactgccggaccttctgccggaaccgcaccagctcgtccaccacaccatgcaaggtagcctcgctgccgctcctgaaacgtactgntgatttgccagaaaaaattccaacagtttcaaaaaaactgttcaaagtangagatgatggcacccaaacacagcaggacttctcggccctttnaggttcctttaaggaacgcctnagctgcccattccncgtgggggttcaagggccantn

SEQ ID NO: 6950 - DNA, 526 bp, Homo sapiens
  misc_feature (46)..(47): "n" may be a, t, c, g, other or unknown
  misc_feature (56)..(57): "n" may be a, t, c, g, other or unknown
  misc_feature (60)..(60): "n" may be a, t, c, g, other or unknown
  misc_feature (89)..(89): "n" may be a, t, c, g, other or unknown
  misc_feature (113)..(113): "n" may be a, t, c, g, other or unknown
  misc_feature (147)..(147): "n" may be a, t, c, g, other or unknown
  misc_feature (201)..(201): "n" may be a, t, c, g, other or unknown
  misc_feature (230)..(230): "n" may be a, t, c, g, other or unknown
  misc_feature (338)..(338): "n" may be a, t, c, g, other or unknown
  misc_feature (379)..(379): "n" may be a, t, c, g, other or unknown
  misc_feature (385)..(385): "n" may be a, t, c, g, other or unknown
  misc_feature (429)..(429): "n" may be a, t, c, g, other or unknown
  misc_feature (453)..(453): "n" may be a, t, c, g, other or unknown
  misc_feature (478)..(478): "n" may be a, t, c, g, other or unknown
  misc_feature (486)..(486): "n" may be a, t, c, g, other or unknown
  misc_feature (491)..(491): "n" may be a, t, c, g, other or unknown
  misc_feature (497)..(497): "n" may be a, t, c, g, other or unknown
  misc_feature (510)..(510): "n" may be a, t, c, g, other or unknown
aacttgaaagaacagttttagataaactgtggttattcagacttgnncatttggcnnatntattactgaaatgaatgaagtgagcctgncacttccaggaaaacaacacttgntgccaatgataaaatttgagttttcaagcaaaanttagcattttggaaaacatacatctgccatcctaagcttgacagcttctcaatnctgaagacttatctgatgagactagtggnaatattaagaattatgattttttgatatggtttgataaaatgagtcaattttcaggagatctgtacaatctaggtaactaatattttccaaatggccaatgacactgntttaaaagcaaaaaagtcattccaagtgcaaggtaaaccantggatnttatgtcattgagtacataaagttcacaatatgggctttgattncacattacaacttttaagacaacntcaattatcaaaagttactggttantcaaatcnggacnttccgngtttactgagaanggtttctaataccctt

SEQ ID NO: 6951 - DNA, 548 bp, Homo sapiens
  misc_feature (402)..(402): "n" may be a, t, c, g, other or unknown
  misc_feature (415)..(415): "n" may be a, t, c, g, other or unknown
  misc_feature (427)..(427): "n" may be a, t, c, g, other or unknown
  misc_feature (430)..(430): "n" may be a, t, c, g, other or unknown
  misc_feature (481)..(481): "n" may be a, t, c, g, other or unknown
  misc_feature (510)..(510): "n" may be a, t, c, g, other or unknown
  misc_feature (524)..(524): "n" may be a, t, c, g, other or unknown
  misc_feature (536)..(536): "n" may be a, t, c, g, other or unknown
  misc_feature (547)..(547): "n" may be a, t, c, g, other or unknown
gagacgaagtcttgctctgtcgcccaggctggagtggagtgcagtagcgcgatctcagcccagtgcaagttccgcctcccaggttcacgccattctcctgcctcagcctcccaagtagctgggactacaggtgcccaccactacgcccggctaattttttgtatttttagtagagacggggtttcaccatgttagccaggatggtcttgatctcctgacctcgtgatctgcctgcctcggcctcccaaagtgctgggattacaggcgtgagccactgcgcctggcctatattcagaatcttttctatcacattccttaatgctgcaacgttggtatttggcacaggcttttagcaccaaaataagacagaccatagttcaaccagcacgtgcaataccttgnaatgggtatggcnaaaaggtatgtncanacaggacaagcatggggaatatcacctgggaacatgggagaaatgacattntaagcccaatttctttcttaatggactanggcccacaacctgngttttacaaggnttcaggaaatnt

SEQ ID NO: 6952 - DNA, 549 bp, Homo sapiens
  misc_feature (446)..(446): "n" may be a, t, c, g, other or unknown
  misc_feature (481)..(481): "n" may be a, t, c, g, other or unknown
  misc_feature (498)..(498): "n" may be a, t, c, g, other or unknown
  misc_feature (526)..(526): "n" may be a, t, c, g, other or unknown
  misc_feature (536)..(536): "n" may be a, t, c, g, other or unknown
  misc_feature (541)..(541): "n" may be a, t, c, g, other or unknown
  misc_feature (543)..(543): "n" may be a, t, c, g, other or unknown
  misc_feature (547)..(547): "n" may be a, t, c, g, other or unknown
acagagacagggtctctctatgttgcccaggctggtctcagtgatcctcccaccttggcctcccaaagtgctgtgattaggcctacgttgtgtgtcactttcttaagagacctacgttgctaccgtgtctacagtagtctgtggctcaccccagcctctgcagccccactgccctctctcattacctggctttagtttctccctaacacttacctcacctgtgtaagaactccttcccatgagactgtgagctctgcggtacagggaccttaccttcctgtactgccgcaatttctatcatattccctgcctctagggcaatgcctggccacagcaggtgctccctaaacatttgccaagtgaactgtcccttaccgagtcctcctccatcacccccaagcctggctggtgacctggagagactcggggtagtggcaaggctgcanggatctggaactgcctgggccttgccactactgangcctggccattcgatgncttcctttgatctgaaagtactgggganccttaaaaanggctntngggnaa

SEQ ID NO: 6953 - DNA, 556 bp, Homo sapiens
  misc_feature (309)..(309): "n" may be a, t, c, g, other or unknown
  misc_feature (436)..(436): "n" may be a, t, c, g, other or unknown
  misc_feature (443)..(443): "n" may be a, t, c, g, other or unknown
  misc_feature (448)..(448): "n" may be a, t, c, g, other or unknown
  misc_feature (481)..(481): "n" may be a, t, c, g, other or unknown
  misc_feature (520)..(520): "n" may be a, t, c, g, other or unknown
  misc_feature (534)..(534): "n" may be a, t, c, g, other or unknown
  misc_feature (547)..(547): "n" may be a, t, c, g, other or unknown
aacagatgaggtcttggtatgttgcccaggctgatctcaaactcctgggctcaagcgatcctctagccttggcctcccaaagtgctgggattacaggcgtgaactgctgtacccagccagttctttactttaaaattggaaactttagatgttcattcattgccgttgatagttaaggtctgattcactaaaattcacaaagatgcttattttatgaattattcatcaatacttggcataagtacccgctggaaaatataattaggacaaatctcttgaaaacgagtactccattcttagaaaagcatnaacaaaacccaggctgtttcctccccacgtgaccccttctccagggaccttgccccaaagctccaattgtcaggatggggccagtgtggaccaacagcccctgagccctgccagaccaaacacaccnaacctgngaccncagaaggccgcccagccgggtcacaagcttggncaggggcttccaagtctggttacctagagaggcagttgncacgccttgaccanggtggccccatgngggacagaa

SEQ ID NO: 6954 - DNA, 570 bp, Homo sapiens
  misc_feature (446)..(446): "n" may be a, t, c, g, other or unknown
  misc_feature (454)..(454): "n" may be a, t, c, g, other or unknown
  misc_feature (514)..(514): "n" may be a, t, c, g, other or unknown
  misc_feature (553)..(553): "n" may be a, t, c, g, other or unknown
  misc_feature (555)..(555): "n" may be a, t, c, g, other or unknown
gcattccacatcccctatcactatcccacccaggagagctgaaattccctggctgaagcggtgcaaatttatttagcagctcctgatagtacttttattttatggttgccaagaaaacttctctcaccgactctccttgccaaaatgctcagacatgatacctggcagcgggtcagcttatagatgcacttagtgatgaaacacaagaaggccagaagtcttcaggcaaagacaccaggagacaacagacctttggtggctaagggtctcctgaccatagcgccttgctctgatagcacagactggatgctgcggccaacagtacacttggacctgacagtccaaagggcataaaacagccaacaagccaagtctcttccccagtgcagacagccaagtgcaagcttgacccacagaaaccactgggtcggctttgctttctggangcagaatncaaccagggaaatgaaagcttttctgatagccagtcacttaagggcaggaaggacaaccnggatcaaagaagccttggcagaattttgagagcccccancnggaacaggatggttt

SEQ ID NO: 6955 - DNA, 537 bp, Homo sapiens
  misc_feature (420)..(420): "n" may be a, t, c, g, other or unknown
  misc_feature (448)..(448): "n" may be a, t, c, g, other or unknown
  misc_feature (456)..(456): "n" may be a, t, c, g, other or unknown
  misc_feature (476)..(476): "n" may be a, t, c, g, other or unknown
  misc_feature (491)..(491): "n" may be a, t, c, g, other or unknown
  misc_feature (508)..(508): "n" may be a, t, c, g, other or unknown
  misc_feature (521)..(521): "n" may be a, t, c, g, other or unknown
  misc_feature (534)..(534): "n" may be a, t, c, g, other or unknown
ctttggagacagagtcccgctgtgttgcccaggctggattgcagtggcacaatcttggctcacttcaatctctacctcccaggttcaagagattcttctgcctcagcctcctgagtagctgggattacaggcacatgcctacacaccgggctaaggagtaaacattttagtaaccaagtggacactgaagatgttgagaactggtaaacaaacaatcaagcaagtaagaacagaaataacagcatttggcttttgagttaatgacaagaacactcggcatgggagcctgggtgagcaaatcacagatcttcaagcttctgtaagtggcctgcattgggggtcaccgtggtgagctacgtagcaccctggagttccacagtgcttctctgagacagccacagagatagaaggacagcttantgaggagtccccactaccccatcgaaangggacttncatgaataataagtgcttgnacaaaactaactctnttctataactcttctgnttaaaaccttagncttttttagaatnaaa

SEQ ID NO: 6956 - DNA, 561 bp, Homo sapiens
  misc_feature (495)..(495): "n" may be a, t, c, g, other or unknown
  misc_feature (497)..(497): "n" may be a, t, c, g, other or unknown
  misc_feature (545)..(545): "n" may be a, t, c, g, other or unknown
  misc_feature (559)..(559): "n" may be a, t, c, g, other or unknown
ctctctctctttctttcttttctttctttctttctttgagacaggctacagtgtggttgtgtcacgcaggctagagtgcagtggtgcaatcaacagctcaccacagcttcgaccttccaagctcaagcaatcctcatgcctcaatctctggagtagctgggactacaggagtatgccaccgtccctggctaattttttaaacattttttatagagataaggtctcaccctgttgcccaggatggtctcaaactcctgggctcaagtcatcctcctgactcagcctatcaaagtgctgggattacaggcaagagccactgcacccagccttctttttgagtgacaggacttgggctaaagcacctttgacttagaagaataaaagtcagtcagcctccagaatatataaagagcacttacaactcaacaaaaaaagacaaacaaccaatttaaaaatgggcaaaggacttgaatagacatttctttgaagaagacncncaagtgggccatgggcccatgaaaatatgttaagggccttggcattangggaaagccaatcnaa

SEQ ID NO: 6957 - DNA, 558 bp, Homo sapiens
  misc_feature (455)..(455): "n" may be a, t, c, g, other or unknown
  misc_feature (466)..(466): "n" may be a, t, c, g, other or unknown
  misc_feature (496)..(496): "n" may be a, t, c, g, other or unknown
  misc_feature (509)..(509): "n" may be a, t, c, g, other or unknown
aagatgtgggacttttggccaggcacaatggctcaggcctgtaatcctagcactttgggaggccaaggcaggcagatcatcaggtcaggagatcaagaccatcctggctaacacggtgaaaccccatctctactaaaaatacaaaaaattagccgggcgtggtggcgggtgcctgtagtcccagctactcgggaggctgagggcaggagaatggcttgaacctgggagaaggagcttgcagtgagccaagatcgcaccactgcactccagcctgggtgacagagcgagactccatctcaaaaaaaaaaaagaaaaagatgtgggactttctctaaaccagtttctacaaagaaagattccagacaacaagcttcatttcaaagaaacctgtgtctgccttttctgtcgcaaaatgtagatctgggtagagtttcttttttttaaagctgcattgnactatctttanggaattcaaaacagggctaataatgggcanatatgcaatgcanatctgggctatacctgggatccccgttttggaaaatgccggaaatgggg

SEQ ID NO: 6958 - DNA, 562 bp, Homo sapiens
  misc_feature (358)..(358): "n" may be a, t, c, g, other or unknown
  misc_feature (399)..(399): "n" may be a, t, c, g, other or unknown
  misc_feature (434)..(434): "n" may be a, t, c, g, other or unknown
  misc_feature (444)..(444): "n" may be a, t, c, g, other or unknown
  misc_feature (463)..(463): "n" may be a, t, c, g, other or unknown
  misc_feature (477)..(477): "n" may be a, t, c, g, other or unknown
  misc_feature (503)..(503): "n" may be a, t, c, g, other or unknown
  misc_feature (542)..(542): "n" may be a, t, c, g, other or unknown
gagactgagtctcgctctgttgcccaggctggagtgtagtggcatgattttggctcactgcaacctccacctcctgggttcaagcaattctctgtctcagcctcccaagtagctgggattacaagtacctgccactacacccagctaatttttgtatttttagtagagacgcggtttcaccatcttggccaggctggtcctgaactcctgacctcgtgatccacctgcctcggcctcccaaagtgctgggattacaggcgtgagccaacacacccggctatttttttttttttttttaaggagacagggtctcgcctagagtgcagcgatgcaatctgatacaatcatacctcactgnagtctcaaagtcctgggttcaaagtgatcctcccatcttancctttgagtggctgggactacaggggcatgccatnacaccctggntcaaaatttaaatttttgnaaaaaaccggggtntaacaacgttgcccaagctggttttnaaactcctaagccttaaacgatcctatggcttaagcttnccaaactggtgggaatacag

SEQ ID NO: 6959 - DNA, 553 bp, Homo sapiens
  misc_feature (250)..(250): "n" may be a, t, c, g, other or unknown
  misc_feature (270)..(270): "n" may be a, t, c, g, other or unknown
  misc_feature (332)..(332): "n" may be a, t, c, g, other or unknown
  misc_feature (362)..(362): "n" may be a, t, c, g, other or unknown
  misc_feature (426)..(426): "n" may be a, t, c, g, other or unknown
  misc_feature (433)..(434): "n" may be a, t, c, g, other or unknown
  misc_feature (473)..(473): "n" may be a, t, c, g, other or unknown
  misc_feature (519)..(519): "n" may be a, t, c, g, other or unknown
  misc_feature (529)..(529): "n" may be a, t, c, g, other or unknown
  misc_feature (544)..(544): "n" may be a, t, c, g, other or unknown
  misc_feature (550)..(550): "n" may be a, t, c, g, other or unknown
agttagaaacagaattttatttttgaaaatagaaaaatcaaacaatatttttaaaatgcaatctattgatgtcatcatatttggtttggaatacctaagaatgcagtgactgaaatgtctgttctaaaaacataaacattttttgatatcagtaccaacccactttaatttatatgtgaataagagaacttcgcttgaaaaatacaaatatacatattcgagagcactaccaaattttgaagcttaatgnattcattgccaacgtactgncataactaaaagtcattttaaatgttttctaaacagggactgatgtggatatcaacaatggnttcatcctaaaactgagttttagcatttgnttaagtatatttacctatttagttaaagcccattacaataatctttcaccccattccttggggnttaaggnnaatttcattttttttagagatgggatcttgctatggtgncccccaatggatcaaaaacctgggcttcaaaaaaaacctcctgctnaacctcttgnccacttgggacttcnaggggngct

SEQ ID NO: 6960 - DNA, 396 bp, Homo sapiens
  misc_feature (100)..(100): "n" may be a, t, c, g, other or unknown
  misc_feature (277)..(277): "n" may be a, t, c, g, other or unknown
  misc_feature (299)..(299): "n" may be a, t, c, g, other or unknown
  misc_feature (302)..(302): "n" may be a, t, c, g, other or unknown
  misc_feature (328)..(328): "n" may be a, t, c, g, other or unknown
  misc_feature (331)..(331): "n" may be a, t, c, g, other or unknown
  misc_feature (366)..(366): "n" may be a, t, c, g, other or unknown
  misc_feature (377)..(377): "n" may be a, t, c, g, other or unknown
  misc_feature (387)..(387): "n" may be a, t, c, g, other or unknown
gaggcggagtttcgctcttgtagcccatgctggagtgcaatggcacaatcctggctcactgcaacctccgcctcctgggttcaagcaattctcctgcctnagccccccgagtagctgggatcacaggcgtctgccaccacgcctagctaattgtttgtatttttagtagagactaaaaatatacatgggatatttattggcccatgttgggccaactgttccatgttggacaggctggtcttgaactcctgacctcaggtgatccacccgccttggncttccaaagtgctgggttacangcntgagccattgcgcccaggccctctgnganttttttaaaagtggcaagggcttgctatttcaagntggccttgaantctggactcnagtgaccct

SEQ ID NO: 6961 - DNA, 316 bp, Homo sapiens
  misc_feature (76)..(77): "n" may be a, t, c, g, other or unknown
  misc_feature (94)..(94): "n" may be a, t, c, g, other or unknown
  misc_feature (98)..(98): "n" may be a, t, c, g, other or unknown
  misc_feature (226)..(226): "n" may be a, t, c, g, other or unknown
  misc_feature (256)..(256): "n" may be a, t, c, g, other or unknown
  misc_feature (265)..(266): "n" may be a, t, c, g, other or unknown
  misc_feature (268)..(268): "n" may be a, t, c, g, other or unknown
  misc_feature (282)..(282): "n" may be a, t, c, g, other or unknown
  misc_feature (304)..(304): "n" may be a, t, c, g, other or unknown
gccactctgtgttacttttcctgaagtcagaatcggttgaggcacacactggggcctgcaggcatcgagtgagccnngtggaggaacatgttgngtcngccgtttttgaatacccagggtgggagcttggccatctgcatccccacttcccatagcccaggcagagggacagagaaatggagtggggagcacagagcaggctccaacaagacaaattccctggtgncaaaccaccatgatccactctgactttggncacaaactnngntaaaaacaattctntacgttcactgttcccaagggncattctaaacag

SEQ ID NO: 6962 - DNA, 525 bp, Homo sapiens
  misc_feature (459)..(459): "n" may be a, t, c, g, other or unknown
  misc_feature (479)..(479): "n" may be a, t, c, g, other or unknown
  misc_feature (483)..(484): "n" may be a, t, c, g, other or unknown
  misc_feature (487)..(487): "n" may be a, t, c, g, other or unknown
  misc_feature (511)..(511): "n" may be a, t, c, g, other or unknown
  misc_feature (521)..(521): "n" may be a, t, c, g, other or unknown
gcatttcctctcctcatagagcaggtgtcttttcctctaagtggttgaaagagagctgttattcataagcaattatgtgggtgcttaaatgatatgatgtggccacatagtaaagtcaatgatgactcattcattaattccacaagtctttacggagtacccactctgagccaagtgcagggctggctacgtggtcaaccagtgctccccatctgtcctcttggggtttaaaacggactcaacaacaagcagatgttgcacaaattaatatatagtaattaattgtaacaaaagctaccaagagaagccctggatgctcagagaacataatggggagacttaattaagataggggtgtcaggacagactacagaaagaagaatggaaataatgtggcagggacaacagcagggagaataaaccattctttaatatcttaattatgaagacttcttcttncattcttctattagagtccnccannaanggtcataccagatgccatggcaanatgccttganatta

SEQ ID NO: 6963 - DNA, 461 bp, Homo sapiens
  misc_feature (455)..(461): "n" may be a, t, c, g, other or unknown
cccctctgactttgtgttttcaaataacttattttggagctcatggattctttcttctattggacccattctgccattgagagcctataatgaattctgtttagaaatttcattttttagttgcaagatttgatttccgtttttttatttttttcaatttctttgttaaatttctttgatacatttctgaattgcttttcagtcttatctcggaaatcactaagtttctttagaactgctattttcaatttttatcagacagctcacatattgccatcttgttaggatgagttactggtttcttgctttgttcatttggtgagatcacggttccctctttaggcatgttgcttatggatgtatattgatgtctttgcattgaagtattatttatttattccaatgttctctgactgggcttgttacaatttttttttttttttttgggaacggtnnnnnnn

SEQ ID NO: 6964 - DNA, 540 bp, Homo sapiens
  misc_feature (406)..(406): "n" may be a, t, c, g, other or unknown
  misc_feature (467)..(467): "n" may be a, t, c, g, other or unknown
  misc_feature (496)..(496): "n" may be a, t, c, g, other or unknown
  misc_feature (498)..(498): "n" may be a, t, c, g, other or unknown
aattaagagaacttttgggctaggcgcggtggctcacgcctgtaatcccagcactttgggaggctgaggccggggtatcatgaggtcaggagattaagaccatcctggctaacacggtgaaaccccatctctactaaaaatacaaaaagttagcctggcgtggtggtgggcgcctgcattcccagctacttgggaggcgtagaatcctccagttgaggagaatggcgtgaacccaggaggtggagcttaaagtgagccgagatcgcaccactgcactccagcctgggcaacagagcaagactctgtctcaaaaaaaaaaaaaagaaaaaaaagagagaatctttaaatacagagtctgaagtaactataacctagactctggcttcttgcacatctggtttactgnagttattcacagtctcatgaagtcccaatgcagggtgacaagtgacacctgagactatttncagggaagatccctgggcttcaagttccnangtgcgcccttacaatgtcaaagcagaacttgaccagcacttg

SEQ ID NO: 6965 - DNA, 549 bp, Homo sapiens
  misc_feature (435)..(435): "n" may be a, t, c, g, other or unknown
  misc_feature (444)..(444): "n" may be a, t, c, g, other or unknown
  misc_feature (490)..(490): "n" may be a, t, c, g, other or unknown
  misc_feature (529)..(529): "n" may be a, t, c, g, other or unknown
  misc_feature (535)..(535): "n" may be a, t, c, g, other or unknown
gacatggagtctcactctttctcccaagctggagtgcagtggtgtcggcggcttgggggtgcggggccgtggtggcagcctgtggggagagactagggttagcaaggacctcaacctggggttagtacccctgctacccacactgccctgacacgctgaccagggagaggacaggccaaggtcccagagagagcttctcaacccacacagaacgggggactcaggaggtggggcaccttcagggaagaatcacaggagccagggacaaggggatttattgagaaaggaacaaggccagggagaggttacacgaggggtcgagctgggggtgtgcggaagatggaggcatgctggcagatggaggaagcagggtgagtccatggacacatggacagatggctctggtccgcaaacttctgtggcactgcagcctangcattcctnctgcccatcgaggccgtattctggctacctgcaatggaatgaaaantggggcttggaaagcccaatcctgagtccttgcgtctgncttcangggatcttccttca

SEQ ID NO: 6966 - DNA, 533 bp, Homo sapiens
  misc_feature (497)..(497): "n" may be a, t, c, g, other or unknown
  misc_feature (533)..(533): "n" may be a, t, c, g, other or unknown
agagacagagtctcgctctcttgcccaggctggagtgcagtggcacaatcatagctcaatgcagccctgacctcctgggctcaagaagtcctccccgctcagcctccccagtagctgggactatcggcatgtgccaccatgcttggataattttttaatttttttgtagagatggggtcttgctatgttgcccaggctggtctcaaactctaggcctcaagcaatcctcctgcctcagcctcccaaagtactgggattacaggtgtgggccaccgtgcctggccaacatttctatattatttcatttcttttgaacatgtatagctttcataatctccatcttagaaaataattgagtcctcttaaccagtcctctggctcatgccagctcctggatgttgtgctgacatccagcatttgctcattcttgtggggctgtagggaatttcaaggtcaatgctgagctcttgaaacccaaggctacaaccctgggctgnacattacaatcactggggtgccttaaaaacactacn

SEQ ID NO: 6967 - DNA, 529 bp, Homo sapiens
  misc_feature (511)..(511): "n" may be a, t, c, g, other or unknown
  misc_feature (513)..(513): "n" may be a, t, c, g, other or unknown
  misc_feature (518)..(519): "n" may be a, t, c, g, other or unknown
  misc_feature (521)..(521): "n" may be a, t, c, g, other or unknown
  misc_feature (523)..(523): "n" may be a, t, c, g, other or unknown
  misc_feature (526)..(526): "n" may be a, t, c, g, other or unknown
aatctactactggacatcatggacagtacaaccaaatgattcatgcaaggaccagggtgaaaatctacctgtagtaacaatgtaataatacagtgatcttttcataaagattagctatgatccaggccactgatccaggccataagaatttcagtatccacatatgtaaaaggttttctacaacaatcctatgaactagttaatatcctcacatacacattttacttctgagaatgaggctttaagcagaaaaggtgattatttttatattgagagccatgtcgtcaacagcagatagatctgattatgtccaagtttaaagtaaacataaaaatatttataaacttcagcaaatttgatttatacagtaatgtaacacccgatggtgccgtttttactacaaaaatgtatttttgaaaattggtatttcacttaacttttttctgatagtcccaagattcttaaaggacatcataaatttctgggtgtgtgtgtgtgtgtgtgtgtgtgngntgtgnngngnggngtg

SEQ ID NO: 6968 - DNA, 543 bp, Homo sapiens
  misc_feature (250)..(250): "n" may be a, t, c, g, other or unknown
  misc_feature (434)..(434): "n" may be a, t, c, g, other or unknown
  misc_feature (454)..(454): "n" may be a, t, c, g, other or unknown
  misc_feature (460)..(460): "n" may be a, t, c, g, other or unknown
  misc_feature (486)..(486): "n" may be a, t, c, g, other or unknown
  misc_feature (518)..(518): "n" may be a, t, c, g, other or unknown
  misc_feature (529)..(530): "n" may be a, t, c, g, other or unknown
cttttttttttgagatggagtttcactcttgttgcccaggctggagtgcaatggcaccatctcggctcaccacaacctccgcctcccgggttcaagtgactctcctgcctcaccctccctagtagctgggattacaggaatgtgccaccatgcccggctgattttgtatttttagtagagacggggtttctccatgttgatcgggctcgtcttcaactcctgatctcaggtgatctgatccgtcctcctnggcctcccaaagtgctgggattacaggtgtgagccactgcgccgggccttctgctgtcttttttcattcaaatcattgatcttcggtgttcttggtgtgacgggtaatttttctgcagtatcctgggcattttggatattatgttagaagactgatcttgttaagtgttaaatctctatttgancaggctgtcaccctgtttanggttcngcgtgtacagcctggtctttttggangcttccggttccaatgacaatttgcttttcanaatgcttgctnnaatgctttttggt

SEQ ID NO: 6969 - DNA, 541 bp, Homo sapiens
  misc_feature (541)..(541): "n" may be a, t, c, g, other or unknown
gagacggagtctcactccgtaacccggattgcagtgcagtggtgcgatcttggctcactgcaacctccgtctcccgggtttaagcgatccttctgccttagcctccaaagtagctgggactattaggcgtgtgccaccacgcccggttaatttttgtattgttagtagagttggggttttgccatgttggctaggctggtctcaaactcctgacttcaggtgatccacctcccttggcctcccaaagtgctgggattacaggcgtgagccaccacgcccagcctgtaaatcttgacaaaattcccagaggcaaaattattagaaggctgggagccaggattaaaaaacataaaatccttggcttttccatttatttcacattgcctcttcttagaatccacttctacaccaaagcagttaaaatcaatgtggatttgtattttaatagaagggttatgggagtagtgggaaaggtagcaaataataactatggttattggatctactggtcctaacatttggacctatccaatcatttaan

SEQ ID NO: 6970 - DNA, 330 bp, Homo sapiens
  misc_feature (17)..(17): "n" may be a, t, c, g, other or unknown
  misc_feature (27)..(27): "n" may be a, t, c, g, other or unknown
  misc_feature (70)..(70): "n" may be a, t, c, g, other or unknown
  misc_feature (111)..(111): "n" may be a, t, c, g, other or unknown
  misc_feature (116)..(116): "n" may be a, t, c, g, other or unknown
  misc_feature (159)..(159): "n" may be a, t, c, g, other or unknown
  misc_feature (198)..(198): "n" may be a, t, c, g, other or unknown
  misc_feature (208)..(208): "n" may be a, t, c, g, other or unknown
  misc_feature (212)..(212): "n" may be a, t, c, g, other or unknown
  misc_feature (242)..(242): "n" may be a, t, c, g, other or unknown
  misc_feature (245)..(246): "n" may be a, t, c, g, other or unknown
  misc_feature (294)..(294): "n" may be a, t, c, g, other or unknown
  misc_feature (303)..(303): "n" may be a, t, c, g, other or unknown
  misc_feature (320)..(320): "n" may be a, t, c, g, other or unknown
  misc_feature (329)..(329): "n" may be a, t, c, g, other or unknown
gcttagtataccaattntatttattgntaaagaaagaagtcacttcacttagtaaagaccaatgatggcnggtagaaataaaaacatttaatctgggctgggtggagtggntcacncctgtaatcccagcactttgggaggctgaggcaagaagactgnttgaggctaggagttccaggcaagcctgggcaacatagngaccctcatntttncaaaaaattaaaaaattagttgggcatggnggnntatgcctgtagcccctggctattagggaggctgaggtaggaggactgnttgagtccnggaggtcaaggctgcantgagccaana

SEQ ID NO: 6971 - DNA, 539 bp, Homo sapiens
  misc_feature (343)..(343): "n" may be a, t, c, g, other or unknown
  misc_feature (464)..(464): "n" may be a, t, c, g, other or unknown
  misc_feature (482)..(482): "n" may be a, t, c, g, other or unknown
  misc_feature (490)..(490): "n" may be a, t, c, g, other or unknown
  misc_feature (494)..(494): "n" may be a, t, c, g, other or unknown
  misc_feature (519)..(520): "n" may be a, t, c, g, other or unknown
  misc_feature (531)..(531): "n" may be a, t, c, g, other or unknown
gagatttttagtagagatgggatttcaccatgttggccagactggtttcaaactcctgacctcaagcgatccacctgcctcggcctcccaaagtgccaggattacaggcgtgagccaccgcgcctggccacacaaggcattttggcattaacgtatcaagtcttaaaaatctgtatatcatttgtcccccaaatttcatttctagggatctgatgcaaagaaatagatcaaatatataaaaagcacgtaccagtacagtaataaaaaaatttgcagctgggcgtggtggctcatgcctgtaatcccagcactttgggaggctgaggcaggcggatcacgaggncaaaaaaaagttgtaaggaagtcctccataaatttaagaatccatttgattctttttatttttctgagatatggtctcactctgttgcccaggttggaggacagtggccccattgtgggtnactgcaatcttgacctgnttggcttnaagngaccttctggcttaggctccaagcnnattgggcttcngggccccc

SEQ ID NO: 6972 - DNA, 543 bp, Homo sapiens
  misc_feature (439)..(439): "n" may be a, t, c, g, other or unknown
  misc_feature (463)..(463): "n" may be a, t, c, g, other or unknown
  misc_feature (502)..(502): "n" may be a, t, c, g, other or unknown
  misc_feature (510)..(510): "n" may be a, t, c, g, other or unknown
  misc_feature (537)..(537): "n" may be a, t, c, g, other or unknown
  misc_feature (543)..(543): "n" may be a, t, c, g, other or unknown
gagacagggtctctcactctgtcacccaggctggagtacagtggctcgcttacggttcactgcaggcttaacctcccaggctcaagcaatcctcccaactcagccttcctagtacctgagactacaggcacatgccaccatgcccagttaatttttttgtagagacagagttttgccatattgcccaggctcatctccaactcctgggctaaagtgatccacctgcctcagcctcccagagtgctgggattataggcatgagccactacacccggcctcatatgacatttttaatggttaagatacaattaatttactgtgtgaccctggacaagttaactctgaatctcagtttaacctccaatagatcagggttacaggacccatcacttagagtagctatgaaagtgacaagagaaggctttgtaaaatactaggnatatataatgcttggcaatagtgnatggtttggaagtattcatgaattttaatcatttaaggnttaatggnaaattttctgggttaaacctacttatnttaaan

SEQ ID NO: 6973 - DNA, 535 bp, Homo sapiens
  misc_feature (220)..(220): "n" may be a, t, c, g, other or unknown
  misc_feature (247)..(247): "n" may be a, t, c, g, other or unknown
  misc_feature (391)..(391): "n" may be a, t, c, g, other or unknown
  misc_feature (408)..(408): "n" may be a, t, c, g, other or unknown
  misc_feature (517)..(517): "n" may be a, t, c, g, other or unknown
gaggcagagttttgctcttgttgcccaggctggaatacaatggcaagatctcggctcaccgcaaactccgccccccaggttcaagagattctcctgcctcagcctcccgagtagctgggattacagtcatgtgccactgtgcccagctaattttgtatttttagtagagatggggttactccatgttagtcaggctggtctcgaactcctgacctcaggngatccaccggcctcagcttcccaaagngctggaattacaggcatgagccaccgcgcctggccccaaatctcatcttgaatcgtactcctcctgtaagtcacacatgttgctggggggggactggtgggagataatttgaatcatagggtaggtttcccccatactggtctngggaaagggaaataagnctcaagagatctgaagggttttatcaggggtttccacttttacatcttcctcaatttctcttgccgcccccatttaaaaagggcctttaacttcccgcatggatttganggctccccagccatgggg

SEQ ID NO: 6974 - DNA, 533 bp, Homo sapiens
  misc_feature (434)..(434): "n" may be a, t, c, g, other or unknown
  misc_feature (477)..(477): "n" may be a, t, c, g, other or unknown
  misc_feature (504)..(504): "n" may be a, t, c, g, other or unknown
  misc_feature (532)..(532): "n" may be a, t, c, g, other or unknown
gagagagggtgttgctctgtctgcagtcatagctcactacagcctcgacctcccaggctcaagcgatcctcccacctcagcctcacaagtagctggaactacaggcatgcgccaccatgcccagccaatttttaaatttttagtagagacaaagcctcaccgtgttggccagttgaactcctgggctcaagcgatgctcccgcctcggcctcccaaagtgctgggattacgggtacaagccaccacactgggcctacttctttatcaaagaagcccttcctgaacaacacagaaacccccctagagggtccgtaatgagaaccgaacagaaaaacccccaactcaggtttgctgggcaatccttcttttccacagaagctggaccaggttctgttaccattaaaaaaatactggattcaatatttttaaagacnagaagggaaagagaacaggttcttgcaaagagaggtacagctngattctttcaagtcacacgaactccgngacttcggggccaaaccagccggcttang

SEQ ID NO: 6975 - DNA, 514 bp, Homo sapiens
  misc_feature (450)..(450): "n" may be a, t, c, g, other or unknown
  misc_feature (460)..(460): "n" may be a, t, c, g, other or unknown
  misc_feature (462)..(462): "n" may be a, t, c, g, other or unknown
  misc_feature (478)..(478): "n" may be a, t, c, g, other or unknown
  misc_feature (480)..(480): "n" may be a, t, c, g, other or unknown
  misc_feature (501)..(501): "n" may be a, t, c, g, other or unknown
  misc_feature (507)..(507): "n" may be a, t, c, g, other or unknown
gtttttccttttagtaagaaaaactttatcaaaaatttaaatatataaaataaggccagaggctgcactggaggccacttcccagtggtgcactgctgcgctgggtgtccctatgcagctagatacatgttaactgcatagagtaccataaaggagcccactggtgagcttcactgtcacctggccctgctggctggggcttccattgtctactgggtctgtccacaccccagattgccttgtggtcctttcccctggccaagaagataacagttttttaaaaatccccttctgatatggatgtgagcaagcagtggggttcagtttgggaccaagtagtgccatttacaaagagcatgggaagcacctccttaggaggggagcagggccatctccacgttgtcaggggccgcgcccgttgcctgccagaccctgggcccacttgtgcangcggctgtanantgggaagccctgggtntnacgggcaaagtagaccccggngaatgnatttcct

SEQ ID NO: 6976 - DNA, 541 bp, Homo sapiens
  misc_feature (488)..(489): "n" may be a, t, c, g, other or unknown
  misc_feature (504)..(504): "n" may be a, t, c, g, other or unknown
cgagatggagcttcctcttattgcccaggctggagtgcaatggtgcgatctcagctcaccacaacctctgcctcctgggttcaagcgattctcctgcgtcagcctcctgagtagctgggattacaggcatgcgccaccacgtccggctaattttgtatttttagtagagacagggtttctccacgttgctcaggctggtctcgaactcccaacctcaggtgatccacccgcctcggcctcccaaagtgctgtgattacaggagtgagccaccgcgcccggccattcttactttttctttagtttgtattattagtaaagacagggtttcaccattttggccaggctggtctcaaactgctgacctcaagtgatccgcccgcctcggcctcccaaagagctggggttacaggcgtgggccaccgtgcccagcctactatttaccatattggttcatccaaaaacattaaaccttatatttatttaattnntaattttttgagaanggggtttgccctttgttggccaagttggagtgcaaag

SEQ ID NO: 6977 - DNA, 541 bp, Homo sapiens
  misc_feature (338)..(338): "n" may be a, t, c, g, other or unknown
  misc_feature (452)..(452): "n" may be a, t, c, g, other or unknown
  misc_feature (454)..(454): "n" may be a, t, c, g, other or unknown
  misc_feature (457)..(457): "n" may be a, t, c, g, other or unknown
  misc_feature (488)..(488): "n" may be a, t, c, g, other or unknown
  misc_feature (490)..(490): "n" may be a, t, c, g, other or unknown
  misc_feature (496)..(496): "n" may be a, t, c, g, other or unknown
  misc_feature (523)..(523): "n" may be a, t, c, g, other or unknown
gactttaaaatgtttattctttaaaaaattagttgctttttatacagctatacaaagttcttaatgtttctttggcaatggaatataatggaattttacaactatataaaaaagttacctttgcctaagaaacagtatttactgtgtgtacatagttgactgacaaaattctctaccatccagcaccctaattaattgacgaaataagctacctcatattacaggattccccaaaagaaaggaggaaaaagacacacacatacacacacacacacacacacacacacacacacacacacaaccttctgtggctcaaaacacagtatcacggccctatntgcaggcaacttgcaattgccaaatacaatttagtgataaaaaaaaaaaacctttcaagtgatggaaaaaatacttgttaagtcccactgaagtactgctttaggttaactatncntangaaattacttaaacttctgcttttccaaatntnttaatngctcatggtttaaagatgagcctttcnaacccccaaaggtacctg

SEQ ID NO: 6978 - DNA, 541 bp, Homo sapiens
  misc_feature (375)..(375): "n" may be a, t, c, g, other or unknown
  misc_feature (404)..(404): "n" may be a, t, c, g, other or unknown
  misc_feature (417)..(417): "n" may be a, t, c, g, other or unknown
  misc_feature (444)..(444): "n" may be a, t, c, g, other or unknown
  misc_feature (453)..(453): "n" may be a, t, c, g, other or unknown
  misc_feature (459)..(459): "n" may be a, t, c, g, other or unknown
  misc_feature (532)..(532): "n" may be a, t, c, g, other or unknown
aatagagctgcatttttcttttttacgaaaatgaagatgtgcttttggctaccacacaaagccgttctcgcttatggttccacctttggggacgagcaggggtaaagcttattgggaatggcagcctcctccttggagccccaccctttgcgttttttggatcaagggagttaaaacagtttattgcctactgcatatgcagcaatgatttttcaatcacttattttttttgacaccaatcttgttcactgttataatttggactcttgttgactaagttcaatattcaagaattcttgtgggtacatcagaaaaactcggtggggaagaactattagaatgaactctagctgtaattcaccagggtagcaaganggttaagaagacagcagggaacccgtgangtactctgggttnaaggatcccagtcttttgaaaccacanggtggacanggcttnctcagcttaaggctggagcaaaatgggcaattctgaagctcatgtacttttgaaaatatttaagagtaccagnggctaaagc

SEQ ID NO: 6979 - DNA, 543 bp, Homo sapiens
  misc_feature (418)..(418): "n" may be a, t, c, g, other or unknown
  misc_feature (457)..(457): "n" may be a, t, c, g, other or unknown
aagaaggggaaaaataaagcaaacacttactgcattcatagatctgttccagcttatccacagaagaaagggagaaaaatttataaccggacttactaccaacagctagggacctgcaaaaaagccaaattcagaaataagagctgatacgtgcagacagtgacaatgtagaaaccagctcccacgttcccagcgagttcccagcaagttccccgcgtgccctccacaaatcagcacagagcaaatcatttcacactgtttgtatcaagtgcttggcacaggaagatgccacaaggtcaataaaatacagacaatattattacttaaatcctataaaacttttctgaggctggatgtggtggctcatgcctgtaatcccaacactttgggaggattgcccgagcccaggacaggaggntgaggcttgcagtgagcccaagattgatcctgctactgnacttccagcctgggagacggagcgagatactggctcaagaaaggaaaccaaaaacttttttgggagattaccttccggatagtact

SEQ ID NO: 6980 - DNA, 504 bp, Homo sapiens
  misc_feature (62)..(62): "n" may be a, t, c, g, other or unknown
  misc_feature (186)..(186): "n" may be a, t, c, g, other or unknown
  misc_feature (374)..(374): "n" may be a, t, c, g, other or unknown
  misc_feature (418)..(418): "n" may be a, t, c, g, other or unknown
  misc_feature (446)..(446): "n" may be a, t, c, g, other or unknown
  misc_feature (480)..(480): "n" may be a, t, c, g, other or unknown
  misc_feature (484)..(484): "n" may be a, t, c, g, other or unknown
  misc_feature (497)..(497): "n" may be a, t, c, g, other or unknown
  misc_feature (500)..(501): "n" may be a, t, c, g, other or unknown
ggagacggagtctcactctgtcacccaggctggagtgccgtggcacgatctcggctcactgngacctccacctcccaggttcaagcgattctcctccctcagactccccactagctgggactacaggcacgcaccaccatgctcagctaaatttttgtatttttagtagagacggggtttcactgngttagccaggatggtctcgatctcctgacctcgtgatctgcccgcctcggcctcccaaagtgctgggattacaggcatgagccaccgcgcccggccctgtgcattcttatttcatagttctctctccatcttcccaggtgtgcatgaactgttttgcaagtacaccccgtgaattttaaagaaatggnttacttttattagttactacatataatttttttaattggattgngaaagctttttaaaaagctgaacaatanttgggtactttatctactaaaggttaagggaatngatntttactcccaatnaanngaa

SEQ ID NO: 6981 - DNA, 511 bp, Homo sapiens
  misc_feature (166)..(166): "n" may be a, t, c, g, other or unknown
  misc_feature (463)..(464): "n" may be a, t, c, g, other or unknown
  misc_feature (477)..(478): "n" may be a, t, c, g, other or unknown
  misc_feature (482)..(482): "n" may be a, t, c, g, other or unknown
  misc_feature (491)..(491): "n" may be a, t, c, g, other or unknown
  misc_feature (500)..(500): "n" may be a, t, c, g, other or unknown
cccgggtcccttccgcctgggttcacgttcacgtttattcaaacaacagagccgactcgggcgaggtctgggagcggcgggcgggcagtgtcgcctcctgggctctgctgacccctggtggtggggtcggcccaggctgggacctagcccagcccctctcggccgntgctgaccgccatcccccacaccgccttctggagcccgcagagggaggcaggggcgtccccggggacagctcaggcggccacagttgggggcggggagcatcagcctgtgcggagctgggagcctgggaagcaggaggccagagggtggccccttcggttaagtgtctggggagcggcccgggagcccagaggggtcgtcgggggaagcgcggggcacgtgctcgcaggtgatgaggtgggtgggcagcgcctgggtgtcgtggaaaatgaccaaaatctgggcttggcaaaagcannccacggggctttnntaanccaagaacncctgggccngaaccccaaaa

SEQ ID NO: 6982 - DNA, 534 bp, Homo sapiens
  misc_feature (458)..(458): "n" may be a, t, c, g, other or unknown
  misc_feature (495)..(495): "n" may be a, t, c, g, other or unknown
  misc_feature (511)..(511): "n" may be a, t, c, g, other or unknown
  misc_feature (514)..(514): "n" may be a, t, c, g, other or unknown
  misc_feature (521)..(521): "n" may be a, t, c, g, other or unknown
  misc_feature (526)..(526): "n" may be a, t, c, g, other or unknown
aaagtaaaggcaatgacctaagctaatccagggaaaaatctgtagctcctgtaacacagcctcctattgaagaattcagtgctgattaggacctgtctcatccaaaggtttatcactagaattaccagaagaccgagtagcatgtatacctttattctaatctcctgaaaaaatttagaaggctatgcttaagaaaatgttggtagtagatgtaataataaatcaatacattcaagtttaggcccatatagattcccaactagtgatcagttccttgcttcttagagtaactgagcaaatatatgatgaaaagcaatgtataaaattctatccaagaacaaatttgtgatgttcaaaaacaatcctttgttatattgacaatatagatttaaatatagctttatataataagtttgtcagggtaaagtcagaaaggatgtgaactgagaagactgcanaaagtttctggtaagggaaaaaatccacttctttaantggtatccccaaggtnaangggttcnaaagncattcttt

SEQ ID NO: 6983 - DNA, 541 bp, Homo sapiens
  misc_feature (463)..(463): "n" may be a, t, c, g, other or unknown
  misc_feature (484)..(484): "n" may be a, t, c, g, other or unknown
  misc_feature (498)..(498): "n" may be a, t, c, g, other or unknown
  misc_feature (501)..(501): "n" may be a, t, c, g, other or unknown
  misc_feature (523)..(523): "n" may be a, t, c, g, other or unknown
gatctctttatttttatttttttttttttttctctctttacacggcaacagggactttgcagatgtggttaaggtaacagatttttagatgaggggattatcctggattatcgggtaggctcaaaataattacatgatcctttaaaagcagagaacatttcccgacgaaagtcagagagatgaggcctcgtgagaaggattccacacactcacactctcgctggctctgagatgtaggtgcccttgtgcaagaatcagagagaggctgcaaggagccagtggcagttcccgccgacagcccgcagggaagcagggacctcagtccatcaggcaaattgaactgaattccgccaacaaggcgcagaggcctggaaacagatgcttcattagagcctctaggagggagtacagcctggccaacaccttgatttcagccctgtgaggcttgaagcccacacaccancccgggcccactggacttttnacctacagaactgnganggagtaatttgctatttttaanccggtaaaagggggctaa

SEQ ID NO: 6984 - DNA, 541 bp, Homo sapiens
  misc_feature (444)..(444): "n" may be a, t, c, g, other or unknown
  misc_feature (458)..(458): "n" may be a, t, c, g, other or unknown
  misc_feature (496)..(496): "n" may be a, t, c, g, other or unknown
  misc_feature (512)..(512): "n" may be a, t, c, g, other or unknown
  misc_feature (514)..(514): "n" may be a, t, c, g, other or unknown
  misc_feature (526)..(526): "n" may be a, t, c, g, other or unknown
  misc_feature (541)..(541): "n" may be a, t, c, g, other or unknown
gagacggagtctcgctctgtcgcccaggctggagtgcagtggcacaattacagctcactgcaagctccgccccctgggttcgcgccattctcctgcctcagcctcccaagtagctgggaatacaggcacccgccaccatgcctggctaatttttttgtatttttagtagagatggggtttcaccgtgttagccaggatggtcttgatctcctgacctcgtgatctgcccacctcggcctcccgaagtgatgggattacaggcttgagccactgcgcctgttcccaggaagctcagagtctctcacaggccttttcagttcctggggctctcatatttcctcattctcccagactcctctgaccctactcttctcaggttcttactgctcctgtgggaaatcagaaagagcagccagcagacaacaccaactgagatgaatgccnctggaatggcacangtcagtatggcaagaaataccatgggctaatggtcaanaccatggtatgaaagncncaatggggtggngaaattcacttcccn

SEQ ID NO: 6985 - DNA, 539 bp, Homo sapiens
  misc_feature (488)..(488): "n" may be a, t, c, g, other or unknown
  misc_feature (490)..(490): "n" may be a, t, c, g, other or unknown
  misc_feature (513)..(513): "n" may be a, t, c, g, other or unknown
  misc_feature (519)..(519): "n" may be a, t, c, g, other or unknown
  misc_feature (526)..(526): "n" may be a, t, c, g, other or unknown
  misc_feature (539)..(539): "n" may be a, t, c, g, other or unknown
gagatggagtctcgctttgttcccccaggctggagcgcagtggcgcgatctcggctcactgcaagctccacctcctggggtcacgccattctccagcctcagcctcctgagtagctgggactacagatgcccgccaccacgcccggctaattttttgtatttttagtagttagccaggatggtctcgatctcctgacctcgtgatccgcctgccttggcctcccaaattgctgggattataggcatgagccactgcgcctggcccaagaagctaattttcatatggaacatatgaagaagaacacttgatgtttactaggggacagtcatcatgcttgcacagcaattttaataagttaactctaggaattatgaaacaagcgccaaaaagcagtgacatcatcacagagtcataggctgctgttatagctgggaggaaacatgggtgtcacctacttcaacactttaatttccgagatgtggcactnanaccattcggaaagtaagaagacnttcctnatgcggnaaaactaattagn

SEQ ID NO: 6986 - DNA, 534 bp, Homo sapiens
  misc_feature (460)..(460): "n" may be a, t, c, g, other or unknown
  misc_feature (488)..(488): "n" may be a, t, c, g, other or unknown
  misc_feature (507)..(507): "n" may be a, t, c, g, other or unknown
  misc_feature (534)..(534): "n" may be a, t, c, g, other or unknown
cattgaaactccactgaaaatgccatgggtggtttatggcaacttttacatgagtctagcaaaaggaaagaatgtgtcacctcttttctatcacaattgggggcttaagaatgcaggggtggatgtatcaacccccagaaagttacaagtttaagccaggaattctggccaggcaatcatttttagtaatacccttgagcttatgggagtggaagtttgtatttttttttttccaaagtacattactactaatgataatagttttcattagttctagtcactgggcttagcgttttccatattttaccctcatagcaacctatgaaacctgtgtaggaattgacatttgatgacaaggtctgttcaaatccagcacccatgtgttacttaccactctttataattttttaaaagagatttctccttctgaatccctatttttttttgaatggccgaatangaaaaattaaaatctgaaaagctcttanaaaatctggttcaatattngaacctagaaatggctggttcaaggan

SEQ ID NO: 6987 - DNA, 541 bp, Homo sapiens
atttcaaagaaaatgtaaaagccctcaaaaaggcttttatttatttttgttgtttgtttgttattgagacaggatctcaccctgtcacccaagccacagggcagcggcattatcacagctcattgcagtctcaactccccaggctcaagcgatcctcccacctcagcctcccaagtagctgggactacaggtgtgtgtgccgctgtgcccagcaaattttaaaaaaatttttttgtgatagatacagggtttccctatgttgcccaggctggtctcaaactcctgggctcaagtgaccctcccacctcagcctcccaaagagccgggaccacaggtacaagccactacactccactaaaaaaggctttaaaaattagaatcatcacagtataatttccatatatagaaattatttaaatccccaaaaattacctttcttttttctcatacagggggcatgtggcttatgtaggaacctcaagaaactaatggatatttgcttttggaatccattaactgggccaatggtttagccagttga

SEQ ID NO: 6988 - DNA, 536 bp, Homo sapiens
  misc_feature (500)..(500): "n" may be a, t, c, g, other or unknown
  misc_feature (510)..(510): "n" may be a, t, c, g, other or unknown
  misc_feature (527)..(527): "n" may be a, t, c, g, other or unknown
aaaaatgcctggaaatcacttgctagttacagagatacatctcaaagcataacaagtttattggtatcatcagctacctcctctctcggtttctgaaaggggaagatggtggaggagtgagtaggggtatatgcgaacactaaactcatctccagccagatgctctttgtaactgccaccatctcaaacctgtcctagtaattaatcactatgttaggagaacacaaatgtttgtaaaacgcggtcgccatcatcatagctacaatacagcagtgtagccctcctgttttctacaaaaataactggcatctatttaatacttcggtgtgtataaaaacagaaaacaaacctaacaaaatggaggcagtcttattagaatattatcaataaataatattgccataatattgtcataataagtgtcaattcacacttggaccatacagttcctttgtccagactaaattctctatacctccttcttaccctgaccacttcancaaccctgantggccacagtcagtgtnaaaacccat

SEQ ID NO: 6989 - DNA, 533 bp, Homo sapiens
  misc_feature (433)..(433): "n" may be a, t, c, g, other or unknown
  misc_feature (436)..(436): "n" may be a, t, c, g, other or unknown
gagatggattcccgctctttagcccaggctggattgcagtggcacaatcttggctcactgcaagctccgcctcccaggttcactccattctcctgcctcagcctcccgagtagctgggactagaggcacctgccactgcgcccagccaattttttgtattttttttagtagagacggggtttcaccgtggtctcgatctgacctcgtgatccacccgcctcggcctcccaaagtgctgggattacaggcgtgagccactgcgcccggcctaattttttttcaaggtttttaacttatttgcctttggttcaaacttcctcctttagctcggagtagtttgatcttctgaagccttcttctctcaactcgtcaaagccattctccgtccagctttgttccattgctggtggggagctgcgttcctttggaaganganaggcgctctgattttaaaagtttccgggttttctgctctggtttttcccaacttgggggttatctacctttgggcttatgaaggggaaggaccaaag

SEQ ID NO: 6990 - DNA, 540 bp, Homo sapiens
  misc_feature (51)..(51): "n" may be a, t, c, g, other or unknown
  misc_feature (506)..(506): "n" may be a, t, c, g, other or unknown
  misc_feature (523)..(523): "n" may be a, t, c, g, other or unknown
cacttttttttgaggcagggtctcgctttgtcgcccagactggagtgcagnggcgcaatcacggctcactgcagcctcaagcgatcctcccgccccagcctcccgggtagctgggactccaggcccgcgccaccacgccctgctcctctctcctccaattcttgatcgggctggacgtgggccagcggggtggggcgggtttaactccgtgtctggaatgctccgctgccctacccctcaaacatccctttaaatggtggtgctaggaaaggacgagggcccggtgggtttactccctctggctgaactacacctgatagatacctcaggggcgtttcccaaggggatggatttagatcaagttagcaggaggaatggtggctgtcacaattttttatattcacgtaaggatcgctccctcagaaatcgccaatattggcttccccaagaaataacctcatttccttttttaacctaaagccgtattattcttgccactttttttnaatctataaaaactggngttaaattttttggttt

SEQ ID NO: 6991 - DNA, 530 bp, Homo sapiens
  misc_feature (342)..(342): "n" may be a, t, c, g, other or unknown
  misc_feature (424)..(424): "n" may be a, t, c, g, other or unknown
  misc_feature (464)..(464): "n" may be a, t, c, g, other or unknown
  misc_feature (466)..(466): "n" may be a, t, c, g, other or unknown
  misc_feature (497)..(497): "n" may be a, t, c, g, other or unknown
  misc_feature (528)..(528): "n" may be a, t, c, g, other or unknown
gagacagaatttcactcttgttgcccaggctagagtgcaatggcacgatctcgcctcaccgcaacctccatctcctgggttgaagcaattctcctgcctcagcctcctaagtaactgggattacaggcatgcaccacctcacccgtctaattttgtatttttagtagagacggggtttctgcatgttggtcaggctggtctcgaactcccgacctcaggtgattcacccacttcggtctcccaaagtgctgggattacaggcatgagccactgtgtctggcctttttttttttttttttttttttttgctaatgtaaaagatcatagaatatcagagatagngaacattatcatttccataaatgtacattttccacacgctgagtactatctaaattttctattgataaactctgaccacttnttcaggcaattcatggacttactttagcattatcattaangntgaaaggtctagaaccattaggaacaagggnccatttttacccaggtacttaactggtgggngg

SEQ ID NO: 6992 - DNA, 563 bp, Homo sapiens
  misc_feature (470)..(470): "n" may be a, t, c, g, other or unknown
  misc_feature (473)..(473): "n" may be a, t, c, g, other or unknown
  misc_feature (490)..(490): "n" may be a, t, c, g, other or unknown
  misc_feature (517)..(517): "n" may be a, t, c, g, other or unknown
  misc_feature (559)..(559): "n" may be a, t, c, g, other or unknown
aaagatttggggttgtagtagacagctgtacattttttgcaatccagcatctaagcatccttcttacctggggtactgtgagcatctgcacagcggcagcgtccttccactgtagaagctgaaaggcccagatactccttctgcccttggcaatgaagacacacagtgccaaccagaagtttgcatcttaagtgtggtgactcacagacacagggacaatcaagaaatcagtctaacagcagcggaggaatcataacatcttatgtagatttcatctttttatgagcctggcttatttcaactttcctgtccatttagtgagctaccagatagctttctaataaaaattttctgcttaggccaggcacggtgcctcacgcccgtaatcccagcaccttgagaggccaaaggcgggtggatcacctgaggtcaggagttcgagaccagtctgccaacatggagaaacctgnctntactaaaaattccaaantagcaggatgtggtggtgcatgcctgnaatcccagttgttcaggaggccgacccaggaaaattggttgnaccc

SEQ ID NO: 6993 - DNA, 557 bp, Homo sapiens
  misc_feature (526)..(526): "n" may be a, t, c, g, other or unknown
  misc_feature (556)..(556): "n" may be a, t, c, g, other or unknown
actgtgatttatcatcaaggactttattctcttggccactttgcagtcatgctagaagtttccagaatccctagtgcatatggtgtgcaaaagtcaaaacgtaagaaaagaaaactcctcccttgagagtgaagtctacagaaatgcaggccagaaaggtgtaaggtgttattccagtctgccgccgctaaggccgttgggatcgacgcgaaagatctcaatagtactaagaaccaaaaccagtcaacagttctgtgaggaagtctgacgcacggaatagtaggacttttcacacacaaaggacaaataaaccaagagttaattttggctaccaaactgcaatttggttttctaggtcattttcccccaactatttaaaaagaaacattagtgctacacatatgcaactttaagatgctggattctcctatcaagttgcactgagaaacaagtgaaataagcccctcggactggccgtcacctgccagacgtcacatccatttcttggatttccattggcacagcngggaataattccaatagggctgaagtaacnc

SEQ ID NO: 6994 - DNA, 564 bp, Homo sapiens
  misc_feature (553)..(553): "n" may be a, t, c, g, other or unknown
  misc_feature (562)..(562): "n" may be a, t, c, g, other or unknown
aactgagtcatcttttttccattccattcatgaaagcaacataagaaagccaagagtgaaaggggtaaaagatcacagtataaaggtcttcggtgtgtccttcaaagatttacacaacattgtcctaaagggaagtcacagcagcttagctgtttctcacagatcagagaggatggtggggcagccaggagtcatcagtaaacccaggtgagcagtgcaggactgaatgtcgctgtccacttgcaggtgggagtccatgtggagggtgctccttcttgtttctcattgggacggtgactgtgtatagtggaaagcacagagccaatgagggacaggatggctgtggtggagggaagacagtgcagggctgctctgtctctctgtcctgtcccgttaggactggtgggccaccacaggtttcgcgaaggtgtggctggccattcctttcctcgcgttggggtttctccgtgtcagcgagcctcggtacactgatttccgatcaaaagaatcatcatctttaccttgacttttcaggaattactgaactttcttntcaaaaaanag

SEQ ID NO: 6995 - DNA, 559 bp, Homo sapiens
  misc_feature (453)..(453): "n" may be a, t, c, g, other or unknown
  misc_feature (478)..(478): "n" may be a, t, c, g, other or unknown
  misc_feature (553)..(553): "n" may be a, t, c, g, other or unknown
  misc_feature (559)..(559): "n" may be a, t, c, g, other or unknown
cttgagacagagtcttactctgtcacccaggctggagtgcagtgccatgatctcagatcactgcaacttctgcctcccgggttcaagtgattctcctgcctcagcctcctgagtagctgggattacaggcgtgcaccaccatgcccggctagtttttgtatttttagtagagacggggtttcaccatgttggtgaggctggtctcgaactcctgaccttgtgatccgcctgccttggcctcccaaagtgctgggattacaggcatgagccactatacctgacctaggggttgagttcttgatttgattctctgcttggttgctgtcgttgtaaagagagatactgatttgtgtacactagtcttgtatccagaaactttgctgaattcttttatcggttccaggagctttctggaagagtctttagggttttcaaagtaaacaatcgtattgncagcaaacagtgacccgttgacttnctctttactgatttggatgccgtttaattctttctcttggctgatgctctggctaggactttcaaggctatgttnaaaagn

SEQ ID NO: 6996 - DNA, 562 bp, Homo sapiens
  misc_feature (501)..(501): "n" may be a, t, c, g, other or unknown
  misc_feature (522)..(522): "n" may be a, t, c, g, other or unknown
  misc_feature (549)..(549): "n" may be a, t, c, g, other or unknown
cttttttgagacagggtctcactccatcacccaggctagagtgtaatggcatcatcacagctcactgcagcctcaacctctggggctcaagcaatcctgctgcctctgcctcccgagtagctgggactaggtgcacaccaccacacctgattaatttccacattttttatagagacggggttttgccatgttggccaggctggtcttaaactcctgggctaaagcaatccacccgcctcagcctcccaaagtgctgggattacaggcgtgagccagcacgtccagcctgcttatctcttattgtgcctaattcataaattaaactttattataggtatgtatgaaacaaaacatagcatatatacagtttggtactatatgtggttttcagacatccactggggattttggaatatactgctgtacaggacacataaggaaatgcataggagataaagttagagaaaatgtccattataagtgggtctgcatttcaaggtnaagcattcggctttatcctgnggacaattaaagaattaggaaatcttntgatagaatagga

SEQ ID NO: 6997 - DNA, 549 bp, Homo sapiens
  misc_feature (373)..(373): "n" may be a, t, c, g, other or unknown
  misc_feature (489)..(489): "n" may be a, t, c, g, other or unknown
  misc_feature (500)..(500): "n" may be a, t, c, g, other or unknown
  misc_feature (514)..(514): "n" may be a, t, c, g, other or unknown
  misc_feature (522)..(522): "n" may be a, t, c, g, other or unknown
  misc_feature (535)..(535): "n" may be a, t, c, g, other or unknown
  misc_feature (539)..(540): "n" may be a, t, c, g, other or unknown
ggaacaagacagagtcttgctctgtcaaccaggctggagtacagtagcgtaatcccggctcaatgcaacctccgccccctgggttcaagcaattctcctgcctcagcctcctgagcagctgggactacaggtgcccgccaccacatccagccaactcctgtatttttagcagagacggggcctcaccatgttggccaggctggtctcacactcctgacctcgtgatccacctgcctaggcctcccacagtgccgggaccacaggcatgagccaccgcacccggccaggcattgatttcttaaacaggacacaataagcagtaaccataaaggaaaagattgataaagtatatttcattaaaattaagatactntggccgggtgcagtagctcatgcctataatcccaacacttcgggaggccgaggcaggtgtatcacttgagcccaggaattcgtatcgggctatgcaacatgggaaaaccccatgtntagtaaaaatnccaaaaacagtgancatgggantggctctgtaggnccannttctttggg

SEQ ID NO: 6998 - DNA, 562 bp, Homo sapiens
  misc_feature (148)..(148): "n" may be a, t, c, g, other or unknown
  misc_feature (313)..(313): "n" may be a, t, c, g, other or unknown
  misc_feature (535)..(535): "n" may be a, t, c, g, other or unknown
  misc_feature (554)..(554): "n" may be a, t, c, g, other or unknown
caatgttcattgcagctttatttgtaacagcaaaatactaaaaacaaaacaaaaatcctaactgattaaatgacatcattaggaaatggctaaaggtgttattgcacatccatgcaatggcctttttccttttaagccagtgattctnaactgggcacaattttgcccgatctagcaatgtctggagacactttggttgtcacaacagtggaagaaggtatgccatagcacctaatgggtagaagccagggatgctgctaaccctcctttgatgcacaagacagccctccacaatgaagtatattcagtgcanagggtccttgacttatgatgggattacatctcgataaacccattgtaagttgaaaatattaatgtttatgagaacccatggacacagggaggggaacatcacaaactggggcctgtcggcgggttgggggcaaggggagggagagcattaggacaaatacctaatgcatgtggggcttaaaacctagatgacaggttgacaggtgcagcaaaccaccatggnccatgtatatctatgcatnatacctgg

SEQ ID NO: 6999 - DNA, 561 bp, Homo sapiens
  misc_feature (383)..(383): "n" may be a, t, c, g, other or unknown
  misc_feature (449)..(449): "n" may be a, t, c, g, other or unknown
  misc_feature (466)..(466): "n" may be a, t, c, g, other or unknown
  misc_feature (495)..(495): "n" may be a, t, c, g, other or unknown
  misc_feature (508)..(508): "n" may be a, t, c, g, other or unknown
  misc_feature (523)..(523): "n" may be a, t, c, g, other or unknown
  misc_feature (525)..(525): "n" may be a, t, c, g, other or unknown
  misc_feature (549)..(549): "n" may be a, t, c, g, other or unknown
gagacggagtttcactgttgttgcccaggctggagtgcaatggcgcgatctcagctcactgcaacctccgcctcctgggttcaagcgattctcctgcctcagcctcccgagtagctgggattacaagcatgcgccaccaaacccagctaattttgtatttttagtacagatggggtttctccatgttggtcaggctggtctcgaactcccgacctcaagtgatctgcccgccttggccttccaaagggctaggattacaggcgtgagccaccatgcagggcaaatttttctatttttttagagacagagtctccctctgttgcccaggttggagtgcagtggtgttaccatagctcactgcagacttggcctcctgggcttangcaatcttcctgcctaatctctcaaaggaactggaagtgcaagccccgtggctggctaatttttgnatttttggttgaagaangggtctcaaactcctgggcttaagaaaancttctggcttggnctctgaatagctganancccaggtttgtgccacatacctgnttaaaattcgtt

SEQ ID NO: 7000 - DNA, 558 bp, Homo sapiens
  misc_feature (351)..(351): "n" may be a, t, c, g, other or unknown
  misc_feature (370)..(370): "n" may be a, t, c, g, other or unknown
  misc_feature (478)..(478): "n" may be a, t, c, g, other or unknown
  misc_feature (538)..(538): "n" may be a, t, c, g, other or unknown
  misc_feature (541)..(541): "n" may be a, t, c, g, other or unknown
  misc_feature (557)..(557): "n" may be a, t, c, g, other or unknown
gatagagtctcactctgcccaggctggagcgcagtggcgcgatctcagctcgctgcagcctccacctcccgggctcaaagtaattctgcctcagcctcccgagtagctgggattacaggcactgccaccacacccagctaattttggtatttttagtagagacagggtgttcaccatgttgcccaggctggtctcaaactcctgacctcaggcgatctgcctgcctttgcctcccaaagtgctgggattacaggtgtgagccactgtgcccagcctcattctattttttttgagacagggtctcactatgttgcctaggctggagtgaagtgtctattcacaggccactgngaatattcgatcctcccgnctcagcctcttgagtagccgggattacaggcaccagcatcaacaaagactgtaaaagattttcaatgaatcaaggaaagaatcttaactagttgtttgagctgagttncatatggactaaaaatgcatgaaaactgctggatcttaactggttacagcagttccttanggnataatctgggtgaccnc

SEQ ID NO: 7001 - DNA, 385 bp, Homo sapiens
  misc_feature (7)..(7): "n" may be a, t, c, g, other or unknown
  misc_feature (23)..(23): "n" may be a, t, c, g, other or unknown
  misc_feature (189)..(189): "n" may be a, t, c, g, other or unknown
  misc_feature (240)..(240): "n" may be a, t, c, g, other or unknown
  misc_feature (303)..(303): "n" may be a, t, c, g, other or unknown
  misc_feature (359)..(360): "n" may be a, t, c, g, other or unknown
  misc_feature (365)..(365): "n" may be a, t, c, g, other or unknown
  misc_feature (376)..(376): "n" may be a, t, c, g, other or unknown
  misc_feature (378)..(378): "n" may be a, t, c, g, other or unknown
  misc_feature (381)..(381): "n" may be a, t, c, g, other or unknown
ccttcgnatgccacctttattgngtttccccaactcctgggccccatggtaaactggccacatggctactgggctcctggccttcctagggctagcagctggtgggcaaacactctgccctgctggagagctgccaggccatgcccgggcacaggctagtggggctcctggctcagtcctgatagcagngccagggaggcgtaaagtgcacacatgcggccctgggcctgcggctcccancacacgtggggagtgtcctcccccagctgtaggccacactcgtccagcaagacccaggccggngctccttcgccccaactgttccccagaagcccggggggcagggacatggtgctgcnntcctnccacggggcantntgntcaa

SEQ ID NO: 7002 - DNA, 548 bp, Homo sapiens
  misc_feature (81)..(81): "n" may be a, t, c, g, other or unknown
  misc_feature (101)..(101): "n" may be a, t, c, g, other or unknown
  misc_feature (233)..(233): "n" may be a, t, c, g, other or unknown
  misc_feature (398)..(398): "n" may be a, t, c, g, other or unknown
  misc_feature (448)..(448): "n" may be a, t, c, g, other or unknown
  misc_feature (458)..(458): "n" may be a, t, c, g, other or unknown
  misc_feature (467)..(467): "n" may be a, t, c, g, other or unknown
  misc_feature (489)..(489): "n" may be a, t, c, g, other or unknown
  misc_feature (499)..(499): "n" may be a, t, c, g, other or unknown
  misc_feature (515)..(515): "n" may be a, t, c, g, other or unknown
  misc_feature (539)..(539): "n" may be a, t, c, g, other or unknown
gagacggagtctcgctccgtcgcccaggctggagtgcagtggcgtgatctcggcccactgcaagctccgcctcccgggctnacgccattctcccgcctcancctcccgagtagctgggactacaggcacccgccaccacgcccggccaattttttgcacctccagcagagacggggtttcaccgttttagccgggatggtctcgatctcccgacctcatgatccgcccgcctnggcctcccaaagtgctgggaccacaggcgtgagccaccgcgcccggccaaattaggggattcttatcaggaagagaaagcagcacgaggagggctcacaaagggaagtgaggctcactagaacagccccaggcataaattgcaggggaaacctgaaatcaactgntcctaacccaaaacaggcacgttcgtcaagcatgaaccagcagcaagaancttctttggnattcagtcncaaggatctaatctaaattcanggaccttggnaggctattgccatggngactggtaaaatctaggaaatcancccttgctt

SEQ ID NO: 7003 - DNA, 553 bp, Homo sapiens
  misc_feature (488)..(488): "n" may be a, t, c, g, other or unknown
  misc_feature (541)..(541): "n" may be a, t, c, g, other or unknown
  misc_feature (548)..(548): "n" may be a, t, c, g, other or unknown
  misc_feature (553)..(553): "n" may be a, t, c, g, other or unknown
ggcagtgcccaagcagaatagaaaagtcacatcaccaagataatgaatgaaaagatgtattagagtatttctgtgggagggcccatgcaggaaagttgcatcaccatgttgttggacccagagatatgttgaaataaatgattccagccaggtgtcgtggcacctgcctataagctcagcactgtgggaggctaagacagtcaaatcacctgaggtcaggagtttgagaacagcctgaccaacatggagaagccccgtctctatcaaaaatacaaaattaggtgggagtggtggtgcatgcctgtaattccagctactcaggaggctgagccaagagaattgcttgaacctgagaggtggaggttgtggtgagctgacatggtgccattgcactccaacctaggcaacaagagcaaaactccatctcaaagcaattaattaattaattaattaaaagaaatcatgatgcatgcagagctcagcagganaagagagtacagcatgtaggtgatggaccccctaatgcccattacaatttccntagcacncccan

SEQ ID NO: 7004 - DNA, 567 bp, Homo sapiens
  misc_feature (553)..(553): "n" may be a, t, c, g, other or unknown
  misc_feature (556)..(556): "n" may be a, t, c, g, other or unknown
  misc_feature (566)..(566): "n" may be a, t, c, g, other or unknown
gcttcacagtggtttaatatgaacagagttgaatatgacattgtctgacagaagaatgaacagtttgctgaataaaagccccgagtcaggatatatatacacagcagaaatggggcctcagactctcagcacttgtgcacaatgaaagaggaaatcgtttttaaaaaatgtctataacagaggatacaaatcaaaaaggcagcaacaacaacattggcgaggtgggaaagggagcagagcctctcattaggggctgcttagcccctggcgcaggctcagcagctggagagctgtctcagggaacttcaacatttagatgggttccaaatcctatgtcaaaatacaatcctaatctctctgatcagggtcagtcagaatcagcaatccttttccacagtgccctgcatagaaaactccaatctttccatgatagggagtctaagcaaagagcccccacctttcacctggcaccaaagttaacttactcttaccccaccactttgggacaagacgtttggccccagcaacaaaccaaccccttcaagacaggaanccngattgttgcng

SEQ ID NO: 7005 - DNA, 566 bp, Homo sapiens
  misc_feature (523)..(523): "n" may be a, t, c, g, other or unknown
  misc_feature (556)..(557): "n" may be a, t, c, g, other or unknown
  misc_feature (561)..(561): "n" may be a, t, c, g, other or unknown
  misc_feature (566)..(566): "n" may be a, t, c, g, other or unknown
gtttctttttgagatggagtcttgctctgtctcccaggctggagtgcagtggtgcgatcttggcctactgcaaactccacctcctgggttcaagcgattctcctgcctcagcctcctgagtagccgggattacaggtgtgtgccaccacgcccagctaatttttgtgtttttagtagagacggggtttcgccatgttggccaggctggtctcaaactcgtaacctcaagtgatccacccacctcagcttcccaaagtgctgggatgacagacgtgagccaccatgcctggtcatgttttctgtttttttttaagacagggtctcactctgttgcccaggcaggagtgcagtgtcacagtcatggctcactgcagcctcaacctcctgggctccagcaatcctcctccttcctcagcctctagagtagctgggaccaaaggtgtacgccaccacacctagcttattaatttttgtagggacaagggtctggatctggtggctaagctgggctttaaactccggncctaaacgatccttcttcccgggtttcctggannggtngggan

SEQ ID NO: 7006 - DNA, 557 bp, Homo sapiens
  misc_feature (163)..(163): "n" may be a, t, c, g, other or unknown
  misc_feature (461)..(461): "n" may be a, t, c, g, other or unknown
  misc_feature (515)..(515): "n" may be a, t, c, g, other or unknown
  misc_feature (526)..(526): "n" may be a, t, c, g, other or unknown
  misc_feature (533)..(533): "n" may be a, t, c, g, other or unknown
  misc_feature (557)..(557): "n" may be a, t, c, g, other or unknown
gaaacagagtttcgttcttgttgcccaggttggagtgcaatggcactatcttggctcactgcaacctccacctcccaggcaattctcctgtctcagcctcccaagtagctgggattacaggcgtgtgccaccacgcccagctaatcttttgtctttctagtanagacggggtttcaccatgttggtcacgctggtctcgaacccctgacctcagatgatccgccctccttggcctcccaaagtgctgggattacaggtgtgagccactgcgcctggcctcctaaactctttcttacacattttcacatcatcgccaagttctaaagagtcaacctctttagtcccttgaatttgcctctcctcctcttccttccctcagcttttgtgacaactctatttccttcctgacttggtgcgaaagattcccacctggtctccccctactttttcctttaatctgntcatcctacttctgttagaggattctctggtaaatcatttctctctcattcaangggtttgccanagctttncatttaactccttaagttaccatn

SEQ ID NO: 7007 - DNA, 564 bp, Homo sapiens
  misc_feature (488)..(488): "n" may be a, t, c, g, other or unknown
  misc_feature (498)..(498): "n" may be a, t, c, g, other or unknown
  misc_feature (556)..(556): "n" may be a, t, c, g, other or unknown
  misc_feature (564)..(564): "n" may be a, t, c, g, other or unknown
aatttaaaccagtgccgtgttaggcaaggtaaaagagtattaactcagtactgcccttgaggggaccactgtctagagacataggctaaggatgcctggaaaatgaaatcacagctgtgcttcttgcaaattactctcttgagtacgtaattctgtctcctcatctaactggggcagcttccaaggcagaagagacaaggcctctccaatggaatgagtatttcctccaggtctcctccatctccacaactcaggtcagggtttcaggactaagcaggtgtttgggctgtgctcagggccaataagtagtctctgctgaacacttgccaagaagccaggtcagttctaacacccctctgcaggaatgaccagttcaatgaaaaaaatcaagcatgctgcaatccatctaatcacaaccaggcttcgtctccaccctgacttccccatgcttggcccttccaacccaagtgctaattgggaaccactgnacacaactgntaaccccacatgggttgggaaggtcttaaagcaccaaaggcttgactgggcatcgggnggggggtn

SEQ ID NO: 7008 - DNA, 551 bp, Homo sapiens
  misc_feature (75)..(75): "n" may be a, t, c, g, other or unknown
  misc_feature (112)..(112): "n" may be a, t, c, g, other or unknown
  misc_feature (195)..(195): "n" may be a, t, c, g, other or unknown
  misc_feature (256)..(256): "n" may be a, t, c, g, other or unknown
  misc_feature (316)..(316): "n" may be a, t, c, g, other or unknown
  misc_feature (356)..(356): "n" may be a, t, c, g, other or unknown
  misc_feature (461)..(461): "n" may be a, t, c, g, other or unknown
  misc_feature (480)..(480): "n" may be a, t, c, g, other or unknown
  misc_feature (494)..(494): "n" may be a, t, c, g, other or unknown
  misc_feature (496)..(496): "n" may be a, t, c, g, other or unknown
  misc_feature (519)..(519): "n" may be a, t, c, g, other or unknown
  misc_feature (527)..(527): "n" may be a, t, c, g, other or unknown
  misc_feature (533)..(533): "n" may be a, t, c, g, other or unknown
gccagctctttatagaagggttggcctttattgactctggtaaaatgaccctcagttgaagggggggggggtcanagtctgaaaaacacaagactatactgactcttcactntagccttcttactcactctactattttctacaaactccctcagtaactgaccaaagatcagccttatgttcatgctatttcanaaagaaatgaaaaacattcagagaagtggagataagaataatcttgctgatgtggaaaggntctatcttgcttttgattacagccaagctcaagtttcttgaaccacttatgccacctggnggccagcccagataacactaataaaacctaaaattcatgngttaatatctcaatctggattggattataacaaatcatacaggaagttgtggcaacatgggttgaaagagttgattataccagcctcgctctcaatactttttgngacgtaaccaatttttagnttttgggaaaaatntnttatcaaagaaaacaatccaaangtttggcnctttcnaaaaaatttccttttacc

SEQ ID NO: 7009 - DNA, 566 bp, Homo sapiens
  misc_feature (453)..(453): "n" may be a, t, c, g, other or unknown
  misc_feature (504)..(504): "n" may be a, t, c, g, other or unknown
  misc_feature (508)..(508): "n" may be a, t, c, g, other or unknown
  misc_feature (534)..(534): "n" may be a, t, c, g, other or unknown
  misc_feature (547)..(547): "n" may be a, t, c, g, other or unknown
  misc_feature (559)..(559): "n" may be a, t, c, g, other or unknown
atgtcaagaaggcctcatgtttcttggacccatcctcctcattttctcatcccaggcttctccgagatactgtttatgctgaggaataagcatattctggcttactgttcacagtggagggagtttctccccttctagataagtttttatcccaccagtgttctgcttccccagtagagactgtgttaagaaaagaggcaaatttgctttctcagactgcacagagcatctcattattttgtgaagccccatggccacctatttctgagacatggggcatggcggaagccagagttattcttggctgtagattttattcatccttttccaccttgatttcaatgaatgagttcaagtcaggacagcaggttttgtggggttggtcaaaagatggggagccaggtgcattctcatcccctccctcatcttcctcttcttggaaattaggattgnaaaagttctggtggaaggagctgggcttcagcagaaggcagtctgtctganggangcccatacacacggttggcttttggngcctgcttaaagntagcatccaggnggagcaa

SEQ ID NO: 7010 - DNA, 564 bp, Homo sapiens
  misc_feature (375)..(375): "n" may be a, t, c, g, other or unknown
  misc_feature (460)..(460): "n" may be a, t, c, g, other or unknown
  misc_feature (485)..(485): "n" may be a, t, c, g, other or unknown
gttttgtttttgagatggagtcttgctctgttgcccaggctggagtgcagtggcatgatcttggctcattgcaacctgcctcagcctcccgagtagctgggattgcaggcacgtgccattacccccggctaatttttgtattttttagtagagatggggtttcaccatgttggccaggctggtctcgaactcctgacttcaggtgatctgcctcccaaagtgctgagattacaggcatgagccactgcacccagcctgaggctgcatctttcttggggcttctcccagtgaccccttccaggtacttccagacaccctccttggttccttgacaaggctctttctgatgcccttcccagcccagaaccccacctncagaaggcaggcaggggtgcaggcagcagccgggccaggtgcccacctgtgttttccagcaatgtcttgggtgtgttgggtcggntaatgatttccaccaagttgttgangaccatctgcacataaggctgcatctctgccctgggggacacccagtcagagccctgaaaagccccgcaaccacagggg

SEQ ID NO: 7011 - DNA, 565 bp, Homo sapiens
  misc_feature (496)..(496): "n" may be a, t, c, g, other or unknown
  misc_feature (516)..(516): "n" may be a, t, c, g, other or unknown
  misc_feature (541)..(541): "n" may be a, t, c, g, other or unknown
  misc_feature (543)..(543): "n" may be a, t, c, g, other or unknown
gagaagtttgtctctgtcctgggctccttacccattgaccatttgctgtccacctactgggcggatgttctggcctgagtcaaccctctgtcccactctgtcacccaggttggaatgcaatagtgtgatctcgactcactgcaacctccacttcctaggttcaagcaattctcctgcttcagcctcctgagtagctgggattataggcacacgccaccacgcccagctaatttttgtatttttaatagagacggggtttcatcttgttgtttaggctggtcttgaactcctgacctcaggtgatccacccgcctccaactcccaaagtgctgggactacaggtgtgagccaccacgcccagctgacctcagtcttataaccacaaggaattgaatttggcaaagcccagcactgctatcaccctgattttggccttctgaaaccataggcagtgaactgaggtgagccatgccagacttctgacctaaaagagctntaagccaaaaaagggggtgncttaactctacattggggtaacttncncagcaatggaaaacttattttt

SEQ ID NO: 7012 - DNA, 566 bp, Homo sapiens
  misc_feature (499)..(499): "n" may be a, t, c, g, other or unknown
  misc_feature (531)..(531): "n" may be a, t, c, g, other or unknown
  misc_feature (562)..(562): "n" may be a, t, c, g, other or unknown
  misc_feature (565)..(565): "n" may be a, t, c, g, other or unknown
ctttcccacagagttaagcacaaaggaaaacatttcaataaaggatcatttgacaactggtggattttctggtgtggcgtcttccttgagggagctagctcctttgtggggtggtcagtggggtcagggtggcagaacctgtggagaagtaacaagcaccttgtcgtgggtaacaaaactgccctgtatgggctgggctgagctcagaaaggaagcctttctttccttttttttttttttgagacagagtttcgctcgttgcccaggctggagtgcaatggtgcaatctcggctcaccacaacctctgccttctagattcaagcaattctccagcctcagcctcctaagtagctgggattacaggcacgtgctaaaagacagtgtttctccatgttggtcaggtcaactcctgacctcttgatacgcctgcctttggcctcccaaagtgttgggattataggcatgagccaccatgcctggccaggaagcactttttgnagactatcatgaagcctttctaagaaatgctntaacaaaaccggaacacatggggaagtgtanctnt

SEQ ID NO: 7013 - DNA, 566 bp, Homo sapiens
  misc_feature (478)..(478): "n" may be a, t, c, g, other or unknown
  misc_feature (505)..(505): "n" may be a, t, c, g, other or unknown
  misc_feature (537)..(537): "n" may be a, t, c, g, other or unknown
  misc_feature (548)..(548): "n" may be a, t, c, g, other or unknown
  misc_feature (562)..(562): "n" may be a, t, c, g, other or unknown
agtttgtagcaattactctttattccaatattataataatcctcactctataatcataacctaggaaaaaccaggccatacagatataggagctgaggggacatagtgagaagtgaccagaagacatgagtgtgagccttctgttatgcccagacagggccaccagagggctccttggtctagtggtaacgccagcatctgggaaaacgcctgttgccaagtagaccgtggtctagcagtagcgtcagtgccaaggaaaaatacctgctacttagcagaccgggaaagggagtgtccctttccctgggggagtttagagaagactctagtcctccacctcttgtggagggcctgacatcagtcaggcctgcccgcagttatccaggggcctaaccgtctccctgtgatgctgtgcttcagtggtcacgctcctagtctgctttcgtgttccatcctgtcacctggctttgccttttanatagcagtagaaaaattagtgaaagtnctaaaagtcttttgatatgccgaaataatggngtaagctgctntcttttttcctttntttt

SEQ ID NO: 7014 - DNA, 565 bp, Homo sapiens
  misc_feature (548)..(548): "n" may be a, t, c, g, other or unknown
  misc_feature (551)..(551): "n" may be a, t, c, g, other or unknown
gagacagagtcttgctctgtcgcccaggctggagtgcagtggtgcaatctcagctcatgcaacctctatctcccaggttcatgccattctcctgcctcagcacccccagtagctgagttaacaggtgcgcaccaccacgcctggctaatttttgtatttttagtagagagagggtttccccaggttggccaggctggtctcgaactcctgacctcaagtgatccacctaccttggcctcgcaaagttctgggattagacgcatgagccaccgcacccagccccactttccctattttacacatgaggagactgaggctttgggaggtaattaatttgctctagctcacacaggtagcaactagtggactggaattggaacccagtcagtcttgattccagacccaagttattataccacccctcgcccagaagttctcatgtgggctacacttcaagagttaagtcttgtttgaatctccagcatctagtataatgcctgacacatattgaaaactcaaatgcttattgattgaatgaatgaatgaanggnccaatggaccaatg

SEQ ID NO: 7015 - DNA, 562 bp, Homo sapiens
  misc_feature (530)..(530): "n" may be a, t, c, g, other or unknown
  misc_feature (547)..(547): "n" may be a, t, c, g, other or unknown
  misc_feature (552)..(552): "n" may be a, t, c, g, other or unknown
  misc_feature (557)..(557): "n" may be a, t, c, g, other or unknown
gaggcggtgttttgctcttgttgccccggctggagtacaatggcatgatctcggctgaacactacctccgcttcccgggttcaagtgattctcctgcctctgcctcctgagtaggtgggattacaggcatgcgccaccatacctggctaattttgtatttttagtagaagcgggggtttctccatgttggccaggctggtcttgaattcctggcctcaggtgatctgcctggctcggcctcccaaagtgcacccggccaacacgtgttttttcaaatgagttaataataatgttaagtgctttaaaagctcttaagatgtcatatgtgtgaagtatcatatttattgtgtcacaatgaatggagttatataactattataacaaacacaatgggcccttctaagagttactctgtttcattgagagttctctatctgtttaagtagcacctggtaggaagtttcccaacttacctgagacttgaagtaaagtttcttgtggggtggcaagtcatctgcagaagccaatgnctaaatgcatgaatgtntgccnaaaanaaggc

SEQ ID NO: 7016 - DNA, 577 bp, Homo sapiens
  misc_feature (344)..(344): "n" may be a, t, c, g, other or unknown
  misc_feature (529)..(529): "n" may be a, t, c, g, other or unknown
  misc_feature (562)..(562): "n" may be a, t, c, g, other or unknown
  misc_feature (574)..(574): "n" may be a, t, c, g, other or unknown
  misc_feature (576)..(576): "n" may be a, t, c, g, other or unknown
caatctttttttttttttttttagacagagtctcactctgtcgcccaggctggagtgcagtggcaagatctcagctcactgcaaactccacctcctgggttcaagcaattcttgtgcctcagcctcccgagtagctggaattacaggcgtccaccaccatgcccagatagtttttgtatttttagtagaggcagagtttcaccatcttggccaggctggtcttgaactcctgacctcgtgagccacctgcctcggcctcccaaagtgctgggattatagacgtgagccaaaacgcccgtcctggctcttgactttctatcagttaaggtgaaaaggaaaacatntcgcagcacctgtgtgaaaaaccaacacatttttccagaagcaggaactgctaactgctctgtggtagaccaagtggtctggctttgatccagatggctggtacacctggacacatatgtctttgacttcctctgtaagtgaaaccccagggggtgaaaacaggactttcaacacctaatcctgnaataattttaacttccaggtgatttactatttncagaaacttttngna

SEQ ID NO: 7017 - DNA, 572 bp, Homo sapiens
  misc_feature (516)..(516): "n" may be a, t, c, g, other or unknown
  misc_feature (533)..(533): "n" may be a, t, c, g, other or unknown
  misc_feature (535)..(535): "n" may be a, t, c, g, other or unknown
  misc_feature (538)..(538): "n" may be a, t, c, g, other or unknown
  misc_feature (563)..(563): "n" may be a, t, c, g, other or unknown
  misc_feature (570)..(570): "n" may be a, t, c, g, other or unknown
aagtaaaaacagggtctcactttgctgctcgggatggtcttaaactcctgactacaagcaattcccccaccttggcctcccaaagtgctaggattacaggcatgcgccaccacacccagcaaatttcttgtctttttgtaaaactcaattgaaagtattccatcttgacattctgacagttctgatgttgtgcaagcatgcaggcttcattcaactctgctgtcggacgtggccacaccctcctttgaaggaagaggggtacagcaggccaagatgctcggcagcctttcctttccagtcctcttttgcaattaagtaaattcctttaatttttaaaaaattcagtttattgagagatgacatatatggtaaaatgcacccatctgaagtgtagagttcaatgagttttgacaaacataacatcaagccacaatgaagatacagaatattctcatcatgcccagaaagttcccttgtacccactggtagggagtctttccttcacacccaacccangcaacacagacatgccntntgnccctatggataagtttaacttctanaaatgcnaa

SEQ ID NO: 7018 - DNA, 244 bp, Homo sapiens
  misc_feature (208)..(208): "n" may be a, t, c, g, other or unknown
  misc_feature (226)..(226): "n" may be a, t, c, g, other or unknown
  misc_feature (232)..(233): "n" may be a, t, c, g, other or unknown
  misc_feature (236)..(236): "n" may be a, t, c, g, other or unknown
  misc_feature (239)..(239): "n" may be a, t, c, g, other or unknown
  misc_feature (241)..(241): "n" may be a, t, c, g, other or unknown
gagacagagtctcgctctgtccccaggctggagtgcagtggcacgatctcagctccctgcaacctccgcctcccaggttcaagtgattctcccgcctcagcctcccaagtagccgggaccacaagcacctgccaccacacccggctaatttttttgtatttttaatagagatggggtttgaccacgttggccaggctggtcttgaacncccgacctggagaactgnccacgnnggncgncnaaa

SEQ ID NO: 7019 - DNA, 569 bp, Homo sapiens
  misc_feature (493)..(493): "n" may be a, t, c, g, other or unknown
  misc_feature (525)..(525): "n" may be a, t, c, g, other or unknown
  misc_feature (547)..(547): "n" may be a, t, c, g, other or unknown
  misc_feature (549)..(549): "n" may be a, t, c, g, other or unknown
  misc_feature (563)..(563): "n" may be a, t, c, g, other or unknown
gtgatggagttttgctctttcttgcccaagctggagtgcagtggtgtgatttcagcacactgcaacctccgcctcccgggttcaggcgattctcctgcctcagcttcccgagtagctggcgcatgccaccacacccgcctaatatttgtattttttttttttttagagatggggtttcaccatgttgatcaggctgctctcgaactcctgaccttgtgatctgcctgccttggcctcccaaagtgttgggattgcaggcatgagccaccgctcccggccaaacatagtataactttctgcgcagtgtttttagttatctagaagaaagtctcctgccatgtaagtctttaatataatctgaaattaataatgttctctggaaacaaacaaaaaaatcttgcccacagacaatatttattcttatgagttgtcaatctccttagcaataatatgtcacaattttgtctgctgcaacagaagaaaaacaagctgnacacacaatacaaaatgccttaatttctgganggcccaaaagggccttcaatgncnctggaattaaggcnttggca

SEQ ID NO: 7020 - DNA, 573 bp, Homo sapiens
  misc_feature (477)..(477): "n" may be a, t, c, g, other or unknown
  misc_feature (481)..(481): "n" may be a, t, c, g, other or unknown
  misc_feature (484)..(484): "n" may be a, t, c, g, other or unknown
  misc_feature (564)..(564): "n" may be a, t, c, g, other or unknown
acaacaattcgtttgttttttataaaaaaaaaaaagaaaggaaaaaaccaaagaggcgaaatgaggactcactgggagagcgcggccaggctgcgtcttccatgcgatccggatccacccagcatgtccgcagttgggaaggggcggcggggcagagagatacggagacctggccaggccgggcggtcagggcgtgggctgggcccgcggaggggccatgtgatctgtggctgaaatgcacggtgcaggatgctcccgtgttctccctttgtgttaacacgttggtctgtccctgtgacgaaagtctgggcttgtcctcagccaaatctactcctcccaacccgttccctcctcacaggatcatcagagagctgattgttattttttactgtaatctctctaatagaagcccatcatgtttagcgatcagagagcactgattgcttcgggagttccagaaatgttattgctgggtantcanggncaggatctcaataagttttcctgatgaagactttatatgcttaacttccaataatttttccaaggtaagtaacttggtcnaaggaaaaa

SEQ ID NO: 7021 - DNA, 568 bp, Homo sapiens
  misc_feature (419)..(419): "n" may be a, t, c, g, other or unknown
  misc_feature (453)..(453): "n" may be a, t, c, g, other or unknown
  misc_feature (457)..(457): "n" may be a, t, c, g, other or unknown
  misc_feature (476)..(476): "n" may be a, t, c, g, other or unknown
  misc_feature (523)..(523): "n" may be a, t, c, g, other or unknown
  misc_feature (531)..(531): "n" may be a, t, c, g, other or unknown
  misc_feature (553)..(553): "n" may be a, t, c, g, other or unknown
  misc_feature (559)..(559): "n" may be a, t, c, g, other or unknown
  misc_feature (563)..(563): "n" may be a, t, c, g, other or unknown
  misc_feature (568)..(568): "n" may be a, t, c, g, other or unknown
gccatctggggtctctttgctttgctactagacctgacattccccagtcataaggtgggaagatttcatcacctggaaccagctacatcctggatccctggatgggtgacctttactgaaaggcctatgcctatgagctagacgcttcctgcagttcccctgggggcctgggtcttcagtatcaaaaatatctccttgggccatcacagagaccccctctccttgctgctatacccctcccctgaacatttagagtaaaaggattgtgctaagatggtatctcttgtgcttaatgccactgatgatgtgggacagacaagcccaaggtgcttcaaagaggatcaaggacatgagaattggtcccccttagttgtgggacaggattcagcactgcagattaggtcggacaatatcaaagnttccaacttccaagagaaatcaaagaatccttcnttanccaccctgaggcaccattngggcccttcttaaggaaactccttttttgccttgggctcaagcaagncctttggnccggggtacctttaaaaccctntagctntaanagtan

SEQ ID NO: 7022 - DNA, 556 bp, Homo sapiens
  misc_feature (385)..(385): "n" may be a, t, c, g, other or unknown
  misc_feature (428)..(428): "n" may be a, t, c, g, other or unknown
  misc_feature (443)..(443): "n" may be a, t, c, g, other or unknown
  misc_feature (501)..(501): "n" may be a, t, c, g, other or unknown
  misc_feature (509)..(509): "n" may be a, t, c, g, other or unknown
  misc_feature (511)..(511): "n" may be a, t, c, g, other or unknown
  misc_feature (537)..(537): "n" may be a, t, c, g, other or unknown
  misc_feature (544)..(544): "n" may be a, t, c, g, other or unknown
gagacaaagtttcacactgtcacccaggctggagtgcagtagcgcgatctcggctcaccgcaacctccgcctcccgggttcaagcaattctcctgcctcagcctcccgagtagctgagattacaggcacccaccaccacacccagctaattttttgtatttttagtagagacatagtttcaccatgttggtcaggctagtctcgaactcctgacctcatgattcacccgcctcagcctcccaaagtgctgggattacaggcatgggccaccgtgcccggcccagagtctttaagtgcctgtttttcacacaccgttgcctgctgtgccatcaatagaactgaaaatgcagcatttctttttctttctctctctctcgccttcctncctcccttactcccttcttcttcagcatgatctcggtcactgnaaccttcatctccangttgaagtaattcgcctgcttaagccacccaagtagctgggatacaggcatgcgggancacattcngntaatttggatttttaggtaagacggngtttatnaggtggtcaagg

SEQ ID NO: 7023 - DNA, 561 bp, Homo sapiens
  misc_feature (455)..(455): "n" may be a, t, c, g, other or unknown
  misc_feature (479)..(479): "n" may be a, t, c, g, other or unknown
  misc_feature (514)..(514): "n" may be a, t, c, g, other or unknown
  misc_feature (518)..(518): "n" may be a, t, c, g, other or unknown
  misc_feature (521)..(521): "n" may be a, t, c, g, other or unknown
  misc_feature (527)..(527): "n" may be a, t, c, g, other or unknown
  misc_feature (546)..(546): "n" may be a, t, c, g, other or unknown
  misc_feature (559)..(559): "n" may be a, t, c, g, other or unknown
aggcagagccttaatctgtcacccagtctggagtgcagtggcgcaatcttgactcactgcaacccccatctctcaggttcaagtgattcttgtgcctcagcctcccaagtagctgagattacacgcatgcaccaccacacctggttaatttttgtatttttagtagagatggggtttcaccatctcgcccaggttcatctcaaactcctggcctcaagtgatcttcccacctcagactcccaatatgctggaattattggcatgagccaccatgcccggctcaaaataatagttttgagaaaacgcagtgacctccaagatgacacagaaaacaaatttagaaatttatcagagaaatttaacaaagagattgaaataattttttaaaaatcaaacagaaatcttgggaattgagcaatacatttgctgggctaaaaaattaattacaggccctnaacagcaaaatgcattggacagangaaagaagtcagtgagccttaaagagaaacttttnaatntcncaggtngaggccaaggaagaaaaangaaaggaacccgntc

SEQ ID NO: 7024 - DNA, 557 bp, Homo sapiens
  misc_feature (368)..(368): "n" may be a, t, c, g, other or unknown
  misc_feature (457)..(457): "n" may be a, t, c, g, other or unknown
  misc_feature (507)..(507): "n" may be a, t, c, g, other or unknown
  misc_feature (521)..(521): "n" may be a, t, c, g, other or unknown
cctactagagcaaaccattcagaaaatgagtaccaaaggcattcattatgtaccaaatatggaagaaagtactaatatacattgtgcctctgtggacatcacactatgatcagttaaaaataggcacttggcttaaaactttaagaatttcccactgcaaaaggtatcagctctttaattttttttgaaacagtcttcctctgtctcccaggctggagtgcagcggcgtgatctcagcttactgcaatctccatctcctgggttcaagttattctcgtgtctcagcctcctgagtagttggggttatgggcacatgacatcacgctcggcttttttttttttttttttagatggagtctcgctgttgnccaggctggaatgcaatgggtacgatcttggctcactgcaacctccacctttgggttcaagcgattttcctgcctaaccttcccagtanctgggatacaggcgcccaacaccacgttggctaaattttggatttttggnaggcatgaggttcnccatgttggcaagctggtctcaactggcccgtttgg

SEQ ID NO: 7025 - DNA, 566 bp, Homo sapiens
  misc_feature (465)..(465): "n" may be a, t, c, g, other or unknown
  misc_feature (479)..(479): "n" may be a, t, c, g, other or unknown
  misc_feature (549)..(549): "n" may be a, t, c, g, other or unknown
  misc_feature (558)..(558): "n" may be a, t, c, g, other or unknown
  misc_feature (563)..(563): "n" may be a, t, c, g, other or unknown
cctttattttattcactgacatctctcagacctagaccagtgcctggcatatcctaggcatacattatattgaatgcatgaatttaaacatttaataattttaatttcatagttgtcttttaatatttgagatttttaccagatcttgcacattctgttgctactagaaaagccccttttctatgggcttgaaggatagaaaaatcttagcctgacttcactaaccagtataaatccagtggccccaggaaggctgggaacatcctatgtgatcatccttgattttggaccctaaaacgaaagctcaacttcacactcatctggaaacatctaatatcttttcaaacacatgtattttgttcccccaactagacatgaaacacattgacagaaattgcacaaagtattcagcacagtcctgaatacttcataaagacataaaacctggcttttgacggacttagngacatttttaaagngctaaggttactaagctcaagaattttcccccccaatcaaaacggggaactggggtatctggactaaggnccccggccnttaanaaa

SEQ ID NO: 7026 - DNA, 544 bp, Homo sapiens
  misc_feature (128)..(128): "n" may be a, t, c, g, other or unknown
  misc_feature (431)..(431): "n" may be a, t, c, g, other or unknown
  misc_feature (477)..(477): "n" may be a, t, c, g, other or unknown
  misc_feature (480)..(480): "n" may be a, t, c, g, other or unknown
  misc_feature (485)..(485): "n" may be a, t, c, g, other or unknown
  misc_feature (508)..(508): "n" may be a, t, c, g, other or unknown
  misc_feature (512)..(512): "n" may be a, t, c, g, other or unknown
  misc_feature (518)..(518): "n" may be a, t, c, g, other or unknown
  misc_feature (540)..(540): "n" may be a, t, c, g, other or unknown
ctgagacagaatctagctctattgccaggctggagtacagtggcatgatctcggctcactgcaaccaccgcctcccaggttcaagcaattctcctgcctcagcctcctgagtagctgggattacaggngcccaccaccatgcccggctaatttttgcatttttagtagagacaggctttcaccatgttggccaggctggtctcgaactcctgacctcaggtgatctgcccaccttggcctcccaaagtgctgggattgcaggtgtgagccaccgcacctggcctctatttttcttaaaaaaaaaaaggaaggatatggcaggagccattattcttattgtccagaagaacctgatactcagaatttatttatttattttaaaaaaagagacagtcttgctatgtgccccaacctggttttgaactcttggnctcagctgacaatttttttttttgagacagagttcactcttgtgcntangcttnaatacaatggcacggcttgtggnttancaaacntcaatttccaaggtcaagggancttt

SEQ ID NO: 7027 - DNA, 558 bp, Homo sapiens
  misc_feature (423)..(423): "n" may be a, t, c, g, other or unknown
  misc_feature (456)..(456): "n" may be a, t, c, g, other or unknown
  misc_feature (527)..(527): "n" may be a, t, c, g, other or unknown
  misc_feature (540)..(540): "n" may be a, t, c, g, other or unknown
  misc_feature (555)..(555): "n" may be a, t, c, g, other or unknown
  misc_feature (558)..(558): "n" may be a, t, c, g, other or unknown
ctgcttcccgagcaacatctgcgtgtcggtctgcttttattacctcccagactgagcccccgacctggcccagcctggcccgtccccaatccagtgggctggccaggccacctgcaccagggaggacagctgctggcagggactaataaacccttccacctggccatggtggtggtgttctctatggaccgaggccctgaaacgcgggcagggaggggcagagaacgcactggcttgggggtgggcaccagcctcagacccctcagcagctttgggccctcggccgactttcccaggcagtgcaggctagcccagtccaggagtgtgcagcctggcttgggtcgagctctgtcacatctggataagcaactgggggctgagagtcccagggcaagcctggcccaacaggtcaaggcgccacanggggccatcaggtccagctggcgcaagccgcangggaaggtctgctctgacctgggtgcttgcatgggtccttcaagttgcacacttgaccaagcaattccgangggtacaagcttnccaagacactgtcanttn

SEQ ID NO: 7028 - DNA, 566 bp, Homo sapiens
  misc_feature (516)..(516): "n" may be a, t, c, g, other or unknown
  misc_feature (563)..(563): "n" may be a, t, c, g, other or unknown
  misc_feature (566)..(566): "n" may be a, t, c, g, other or unknown
gcttagcttgtttccccctgtgtagaattgtaacagatccatgtgttccaattattttcttttttaggattatatttcacacatttgggggccctttttgtacaaatattggcatgtaataaggaaaaattgcccatgatgctgagataataccagtgtttttagtggtagaaaatattatttttttataaaccatatctaaatatcttgagataaaaattcccctttgactttttttcctctcccttgtttggcaaattccattttaaaattataaattgctaaaaaatgtcctttccatactatttctctcttccttgtactcatcctaagaagtcttaaatctggaacatttgcttttatcttatctatctgtttcctggctactagaaagaaatttttttagcactcatatcaccctaccatgaaggtctaaatgtaagatgactgtaggacttgaaacaaaaaaaaattaaaaaggatccacactcattcttgggattttgaagccaaagncttttcctaattcttaaaggatattggggatgggttaacttaaaagnggn

SEQ ID NO: 7029 - DNA, 560 bp, Homo sapiens
  misc_feature (429)..(429): "n" may be a, t, c, g, other or unknown
  misc_feature (451)..(451): "n" may be a, t, c, g, other or unknown
  misc_feature (462)..(462): "n" may be a, t, c, g, other or unknown
  misc_feature (467)..(467): "n" may be a, t, c, g, other or unknown
  misc_feature (485)..(485): "n" may be a, t, c, g, other or unknown
  misc_feature (499)..(499): "n" may be a, t, c, g, other or unknown
  misc_feature (526)..(526): "n" may be a, t, c, g, other or unknown
  misc_feature (530)..(530): "n" may be a, t, c, g, other or unknown
  misc_feature (556)..(556): "n" may be a, t, c, g, other or unknown
gcacttttttgtctgaagatttatccttcgctgctgcctttttcagcttcaattccacttttgcaggagcaggtttagctgacaactgcaccagtctcctcttgggctcttccttggtggccccttcagcagagctgaccttcctcttgggtatcctggcaatggggagggtgcatgccaggtgcctgcagagccacgagagcctttgcaaagctgggctgcccggacattttccacttttatccaccatggaagcaaaggattttgtgaacattttgctagtaaagccccatttccctaatgtcaagtaatggctcctgcaactaatcaggttaataattgcattatcatatttgtaaccacccagctcaaaatccactgaaattttcacttaaaggattttaaaacagattaagaaaaacactggtnccaaggttaagggtgaaaaatntcaagaatttnaatanggggacagaacaattttnggcaccaaaaatcncattaccaatgggaaccaaaaaccatntggntttcaaaaaggtcctttccatagtanaaaa

SEQ ID NO: 7030 - DNA, 557 bp, Homo sapiens
  misc_feature (497)..(497): "n" may be a, t, c, g, other or unknown
  misc_feature (528)..(528): "n" may be a, t, c, g, other or unknown
  misc_feature (539)..(539): "n" may be a, t, c, g, other or unknown
  misc_feature (555)..(555): "n" may be a, t, c, g, other or unknown
  misc_feature (557)..(557): "n" may be a, t, c, g, other or unknown
atctttccagttttatcaaaccccaagcatgttaaaaacagtctgagatggtcagtgagtccaaaaagcagatgaattcatcccgtgctaatcgcagggctaaggaaaagacccaactgaaaaagtttggaacagcaggcctggatgggtattagtttctcactccatccaataagcacaggtctctctccaacatgccaaaagccaggaactgaaaactacgcacggtgccgtgaagtcgttctggtctttgcagccaccgttgttcttcttggaggcacgtaactgcattacaggaaatcccaaaaggcagcatttccacgtagctctggcctccacctgcaattagagactccctccagaattcttccggtcgccgggtatgggaaaccaaaatggcttccaccaaaagaaagtaacatcttcatgctctgcgcaccggagatgaggccccgactcacctctgaagaaagcaaagcatgtgccctttagaatcnaaggttggactcttgaaaagtgtgtggtcangcatgtttcangggactggcttttaancn

SEQ ID NO: 7031 - DNA, 558 bp, Homo sapiens
  misc_feature (359)..(359): "n" may be a, t, c, g, other or unknown
  misc_feature (390)..(390): "n" may be a, t, c, g, other or unknown
  misc_feature (435)..(435): "n" may be a, t, c, g, other or unknown
  misc_feature (441)..(441): "n" may be a, t, c, g, other or unknown
  misc_feature (461)..(461): "n" may be a, t, c, g, other or unknown
  misc_feature (484)..(484): "n" may be a, t, c, g, other or unknown
  misc_feature (499)..(499): "n" may be a, t, c, g, other or unknown
  misc_feature (514)..(514): "n" may be a, t, c, g, other or unknown
  misc_feature (523)..(523): "n" may be a, t, c, g, other or unknown
  misc_feature (550)..(550): "n" may be a, t, c, g, other or unknown
  misc_feature (557)..(557): "n" may be a, t, c, g, other or unknown
gcacatgagaagtgtcacgtttaatgaagccagcttatcagcagggcggcggagcacacctgccccctcgcaggtgtgcctggctcgggctaaagtgcctgtgcagaacgaggctgcctggcggggttaggagtcggcgccctcgtcctcctcctcgggcaggatctccaggctgctgtcgggctgcggggctgtgtccgtggagggcggcggggtgggcggggcccgggtgggcgacagaggcagcggggaggcggtgggcgaggggctgtggggctctgcgggcggggccagccccaggatctcctgcacgttgtggggcaactcggggcaggcggttagctgcggtgcagggcctnggcgcgggtcaacacgtcctcacgcttaagnttcataggcaagcttcgtgatgggcttgaggatcttaattggagnccaaanccggacagcatggagggggncccttttcatgtccaagaatggncaaggccaccaacangtgcaaaattggggncaagggaanccttttcacaagaacttccacaagccnaaggacnt

SEQ ID NO: 7032 - DNA, 538 bp, Homo sapiens
  misc_feature (102)..(102): "n" may be a, t, c, g, other or unknown
  misc_feature (184)..(184): "n" may be a, t, c, g, other or unknown
  misc_feature (333)..(333): "n" may be a, t, c, g, other or unknown
  misc_feature (415)..(415): "n" may be a, t, c, g, other or unknown
  misc_feature (449)..(449): "n" may be a, t, c, g, other or unknown
  misc_feature (452)..(452): "n" may be a, t, c, g, other or unknown
  misc_feature (476)..(476): "n" may be a, t, c, g, other or unknown
  misc_feature (480)..(480): "n" may be a, t, c, g, other or unknown
  misc_feature (491)..(492): "n" may be a, t, c, g, other or unknown
  misc_feature (526)..(526): "n" may be a, t, c, g, other or unknown
atattatagcctcttttagctctttaagtcttctatgggtttaatgggaggctttagtggtgtatagagggtgtgtgtgtgtgtgtgtgtgtgtgtgtgtgngcgtgtgaaatggatttattttattctacaaatgaaatgaataaaatcacctgaaatggaacggaatggctacagcgagtgnccaaagaccacaaaactgtttcctgacatgtgcttagcatatttaaattgttctcacagtatcatcctgagagcagagagagcagtccaactgctccacaggactgcagagagggaaccaatccatctattttctcaataatggtgatnacagagatggaatgctgattgccaaatcccaaacacacacgggcctctcacccaaaggccatgatgcctttggcttaatacngaataaacccaatcctgtccaaacagcttctcanggngcatgtttttgaaaggggcaaaanatanctttttggggnnagcttttccaggatcccgacaaaacatgccctanaaactcactagg

SEQ ID NO: 7033 - DNA, 488 bp, Homo sapiens
  misc_feature (437)..(437): "n" may be a, t, c, g, other or unknown
  misc_feature (449)..(449): "n" may be a, t, c, g, other or unknown
  misc_feature (458)..(458): "n" may be a, t, c, g, other or unknown
  misc_feature (460)..(460): "n" may be a, t, c, g, other or unknown
  misc_feature (466)..(466): "n" may be a, t, c, g, other or unknown
  misc_feature (468)..(468): "n" may be a, t, c, g, other or unknown
  misc_feature (473)..(473): "n" may be a, t, c, g, other or unknown
gagatggagtctcactctgtcacccaggctgaagtgcagtggtgcgatcttggctcactgcaacctacgcttcccgggttcaagcgattctcctgcctcagtctcccaagtagccgggactacaagcgcgcactaccacacccaactaatttttgtatttttagtaaagacagagtttcaccatgttggtcaggctggtctcaatctcttgacctcgtgatctgcccggcttgacctcccaaaatgctgggattacaggcgtgagccactatgcctggccagattcatctactttttaagggagccaggattggtttcagttgcttggaactgagaagcctgactgacagtggtgactatgacttgcatgagaaataaaagatcactgactctaaaagcaatgccattaatcaggaggatttttctcagtgcacacnggccgttagtgnaaatggatnantaaatncntgagnttcaaaaaattagct

SEQ ID NO: 7034 - DNA, 570 bp, Homo sapiens
  misc_feature (434)..(434): "n" may be a, t, c, g, other or unknown
  misc_feature (449)..(449): "n" may be a, t, c, g, other or unknown
  misc_feature (455)..(455): "n" may be a, t, c, g, other or unknown
  misc_feature (492)..(492): "n" may be a, t, c, g, other or unknown
  misc_feature (495)..(495): "n" may be a, t, c, g, other or unknown
  misc_feature (498)..(498): "n" may be a, t, c, g, other or unknown
  misc_feature (547)..(547): "n" may be a, t, c, g, other or unknown
  misc_feature (555)..(555): "n" may be a, t, c, g, other or unknown
  misc_feature (559)..(559): "n" may be a, t, c, g, other or unknown
  misc_feature (561)..(561): "n" may be a, t, c, g, other or unknown
gagacagagtctagctctgtcgcccaggctggagtgcagtggcgcaatctcggctcactgcaagctccgcctcccgggttcataccattctcctgcctcagcctcccgagtagctgtgactacaggcgcccgccaccacacccggctaattttttgtatttttagtagagaggggggtttcaccgtgttcgccaggatggtctcgatctcctgaccttgtgatccacctgcctcggcctcccaaagtgctgggattacaggcatgagcctccgcacccggccataacttttcatttgctaaggtaaatacctaggagtgggactggtgggtcatatagtaagtatatgtttaactttataaaaggctgccaagtgttcttccagagtgactgcgtcattctccactcccaccagaaatgtgtgcaagttctagntactccacattcttncacatnactttggtcaaggtcaagtttttctattttagctganggnggngggggcttactaatgggttttttgggttgggtttttgggaaggcaaggncttacttntggnanccaggcagg

SEQ ID NO: 7035 - DNA, 563 bp, Homo sapiens
  misc_feature (450)..(450): "n" may be a, t, c, g, other or unknown
  misc_feature (472)..(472): "n" may be a, t, c, g, other or unknown
  misc_feature (500)..(500): "n" may be a, t, c, g, other or unknown
  misc_feature (522)..(522): "n" may be a, t, c, g, other or unknown
  misc_feature (529)..(529): "n" may be a, t, c, g, other or unknown
  misc_feature (535)..(535): "n" may be a, t, c, g, other or unknown
gagttcagcatgtattttaatgttgcaaaggaatgacaactcagcaagctgtagaaaatggcagaggagacggggtaataacagaagcaatgaagactcctggatgtacccaaggacaccctatggccagcagcttggtttctcccagaatcagtttacagacttgctcagcctgcgggagggcccagggatcatgcaggaagaaaacggaatacgcttgattctggaattggtcattttaagacacttttagtaagatggtttcatgtctacacccaagtcttgccaaccaagaagcatcaacgtgaacagctcagagacattcctgcacaggagagcagggaggaggcagtggaaaggtacctatgagcagcagtgcccgggggcgctggccaccttcctgcgcaccggatacccttccccgacccacaggggttcacttacaggttncccaccttgcagcaacagtgangctcaaagtcacccacacttcatacatncctttggtcataccctgcctgnatggggnttcggntacctacaaagcccacaaaggggcaacg

SEQ ID NO: 7036 - DNA, 547 bp, Homo sapiens
  misc_feature (450)..(450): "n" may be a, t, c, g, other or unknown
  misc_feature (463)..(463): "n" may be a, t, c, g, other or unknown
  misc_feature (485)..(485): "n" may be a, t, c, g, other or unknown
  misc_feature (506)..(506): "n" may be a, t, c, g, other or unknown
  misc_feature (511)..(511): "n" may be a, t, c, g, other or unknown
  misc_feature (519)..(519): "n" may be a, t, c, g, other or unknown
  misc_feature (547)..(547): "n" may be a, t, c, g, other or unknown
aatatctattatcatcctttattttgatcaaaacaaatcaattttttaaaaaatcttaggtttttttaagaagcagaaataatttccaaattgcctccagagacaatgattttatcctctgcagaagctggtcagaaccttcttgatcacagccccagttagatacagggaagagtggcgcttcctacagcttcagcggcctcagctcagctctgtgccccaaggccaaaccagctcatctccagccccatccatcctattcttgctgagtcaccagtctcatcatcttcagagccatgtccccttggtcagaaggaaccatatgaccagctttcagaatccagtagaaagcaaggttcttgtaggacttgacaaaagcagatgtttccaaagatttagggtcactgtcagggccttcacttcagctgactgaatttaaggcagtctggnccttcagtttcgnacccaggcttctgacccatggnatctacgatgagatccagtgnccttntacacggnacgtggatcctggctcagaacttgtccn

SEQ ID NO: 7037 - DNA, 557 bp, Homo sapiens
  misc_feature (475)..(475): "n" may be a, t, c, g, other or unknown
  misc_feature (477)..(477): "n" may be a, t, c, g, other or unknown
  misc_feature (480)..(480): "n" may be a, t, c, g, other or unknown
  misc_feature (528)..(528): "n" may be a, t, c, g, other or unknown
  misc_feature (534)..(534): "n" may be a, t, c, g, other or unknown
  misc_feature (537)..(537): "n" may be a, t, c, g, other or unknown
  misc_feature (553)..(553): "n" may be a, t, c, g, other or unknown
caaagtcaaatgaatttattcagaaaaggccttgcttggtatcagactaagaaaagcagccctgcccgccgccccccactccagaagggtcaatttacaaagacaggggcgcaggggagagctgggtggggaagacacagccaggccaggaggcttctgcaggccttgggcttccctgagggcctcgcggcttctggtggctgctatagtggccccacaggaggccagcactgtgggtcatgggtcacgggtcacgaagcagagcctgaggggagcccgcagcagctccggaggccccagcccctgcagcagggacaggaggaccaagacgccgacgggcactcctttccttaaggcttccagacttggcagaagactccacctctgcgtcctgcaactctgctgcctcccgcgccttggctggctcatcccttgtaggtcctgccggctggggcctggggtcttccatgggctntnggntggcttggccccttgaaggcctggccggccggggcctggggtttccanagggtnttnggtgggttggcccttnaggc

SEQ ID NO: 7038 - DNA, 538 bp, Homo sapiens
  misc_feature (440)..(440): "n" may be a, t, c, g, other or unknown
  misc_feature (480)..(480): "n" may be a, t, c, g, other or unknown
  misc_feature (482)..(482): "n" may be a, t, c, g, other or unknown
  misc_feature (508)..(508): "n" may be a, t, c, g, other or unknown
  misc_feature (526)..(526): "n" may be a, t, c, g, other or unknown
  misc_feature (531)..(531): "n" may be a, t, c, g, other or unknown
  misc_feature (537)..(537): "n" may be a, t, c, g, other or unknown
gagagagggtctcgctctgttgccaggctggagtacagtggcatgatcatagctcactgcagcctggatctccaggctcaagcaatcctcctgcctcagcaaccccaccgccccccaccaccgggtagctcggactacaggcatgcactaccacacccaaccaacttttttatttttaatagagatgaggtcttgccatgccgcccaggctagtctcaaacttccgaggtcaagcaatcctcccgcctcagcctcccaaagtgctaggattacaggtgtgaaccaccatacccagcctaagtacaattttctattgttgccattctttttcgttttgagatggagtctcactctgttgcccaggctggagtgcagtggcacaaccttggcccactgcaagctctgcctcctgggttcacaccattctcctgcctcagctnctgagcagctgggactacaggcgcccggcacacgcccggntnattttttggatttttagtaaaacagnggttcactggggtagccncgatnggcttna

SEQ ID NO: 7039 - DNA, 544 bp, Homo sapiens
  misc_feature (5)..(5): "n" may be a, t, c, g, other or unknown
  misc_feature (39)..(39): "n" may be a, t, c, g, other or unknown
  misc_feature (83)..(83): "n" may be a, t, c, g, other or unknown
  misc_feature (145)..(145): "n" may be a, t, c, g, other or unknown
  misc_feature (194)..(194): "n" may be a, t, c, g, other or unknown
  misc_feature (236)..(236): "n" may be a, t, c, g, other or unknown
  misc_feature (322)..(322): "n" may be a, t, c, g, other or unknown
  misc_feature (337)..(337): "n" may be a, t, c, g, other or unknown
  misc_feature (347)..(347): "n" may be a, t, c, g, other or unknown
  misc_feature (365)..(365): "n" may be a, t, c, g, other or unknown
  misc_feature (394)..(394): "n" may be a, t, c, g, other or unknown
  misc_feature (455)..(455): "n" may be a, t, c, g, other or unknown
  misc_feature (501)..(501): "n" may be a, t, c, g, other or unknown
  misc_feature (507)..(507): "n" may be a, t, c, g, other or unknown
  misc_feature (516)..(516): "n" may be a, t, c, g, other or unknown
  misc_feature (526)..(526): "n" may be a, t, c, g, other or unknown
  misc_feature (541)..(541): "n" may be a, t, c, g, other or unknown
  misc_feature (543)..(543): "n" may be a, t, c, g, other or unknown
agggnacaggtagatttaatgagctttcaagtaaactgnagattattatatggaagctcctcccagctctccttcatctttgnactattttataaactcattcagtccttcattccacatacgttttgcccctcttatgacccanatgttcggagtgttgggaatgctacacaagacagacaagctcccaatgntaaagaactcacatttattttcattaatattactggtaatgnccaactttttgaccattcataggcttttctcttagattaattattcagaaatattagcactaatctgaatcaccttatgtgcttgntaaagcacagattgntgggccccancccgagtctttggttcantggatctagggtggaagctgagaatctgnctttctaatttccctagtgatgctaatgctgctgttctagggaccaaacgctggcttaagncattgccaaattgcattccttcagtgtaatgacacttttctttcanggggtnaaaaaaaanttaaaattantaattaataattaancng

SEQ ID NO: 7040 - DNA, 564 bp, Homo sapiens
  misc_feature (488)..(488): "n" may be a, t, c, g, other or unknown
  misc_feature (505)..(505): "n" may be a, t, c, g, other or unknown
  misc_feature (517)..(517): "n" may be a, t, c, g, other or unknown
  misc_feature (524)..(524): "n" may be a, t, c, g, other or unknown
  misc_feature (556)..(556): "n" may be a, t, c, g, other or unknown
  misc_feature (563)..(563): "n" may be a, t, c, g, other or unknown
gagacggagtctcactttattgcccaggctggagtgcagtggcacgatctctgctcactgcaacctccacctcccgggtttgagcaattctcctgcctcaacctcccaagtaactgggattataggcatacatcaccatgcccggctaacttttgtatttttagtagagatggggtttcaccatgttggccaggctggtctcgatctctgaactcgtgatctgcccgcctcggcctcccaaggtgctggggttacaggagtgagccaccgcacctggccacttcctatatttcttttgcaaaaatgaacagatacacatgtattttcctatgtctttctttttacatgaaagggagtatatcgtaaattttttttgcactcagcttgcttcaaaatattctagaaatcactccatatcagttattatcttcagttttacagatgaagagacaggcataaagaggttaagtaactagctcaaggcctgnatctattaaggagtatngctgggatgtgnaactaanaagtttggcttcagaatccatgggcctttttntacatana

SEQ ID NO: 7041 - DNA, 568 bp, Homo sapiens
  misc_feature (462)..(462): "n" may be a, t, c, g, other or unknown
  misc_feature (514)..(514): "n" may be a, t, c, g, other or unknown
  misc_feature (560)..(561): "n" may be a, t, c, g, other or unknown
  misc_feature (566)..(566): "n" may be a, t, c, g, other or unknown
  misc_feature (568)..(568): "n" may be a, t, c, g, other or unknown
gagactgggttctgctctattgcccagtagcgcgatcatggctctcactgcaacaacctcccaggctcaagtgatcctcccacctcagccacctcccaccttagcctcccaagtagctaggactacaggcatacaccaccacgcccagctaattttgtgtagagatgggttctccttatgttgcccagggtggtctcaaactcttgggctcaagtgatcctccagcttcggactcccaaagtgctgggattacaggcgtgagccactgtgcccagcgcgcattgttcttttaacaaaagattcgcctggcccctgctttggctgggctccgcagagatagcgcaggcctagtggacaaggcctctgtctgaaccgggcctatactgtagtgggacggaaagacaccaaacaatttgctttcacggggaagaaagtggggtgccaaaaataatgtgggaaaangcctttgcatacagggtcagaaacgggctcccaaagagatgacatttcacangattctggctgaaaaaaaccttggggcaaaagaaagggcttaaccnnggggntn

SEQ ID NO: 7042 - DNA, 563 bp, Homo sapiens
  misc_feature (318)..(318): "n" may be a, t, c, g, other or unknown
  misc_feature (459)..(459): "n" may be a, t, c, g, other or unknown
  misc_feature (469)..(470): "n" may be a, t, c, g, other or unknown
  misc_feature (491)..(491): "n" may be a, t, c, g, other or unknown
  misc_feature (507)..(507): "n" may be a, t, c, g, other or unknown
  misc_feature (521)..(521): "n" may be a, t, c, g, other or unknown
gagacagagtctcgctctgttgcccaggctggctccatctctgctcactgcaagctccgcctcccgggttcacgccattctcctgcctcagcctcctgagcagctgggactacaggcacccgccaccacacccagctaattttttgtatttttagtagagacgaggtttcaccatgttagccaggatggtctccatcacctgacctcgtgatccgcccgcctcagccccccaaagtgctgggattacaggcgtgagccaccacgcctggccgagccatcagtatttttaaaaatcttcacgtgattccaatatacggnaaaatttaagagactacagcaataatataagcaagagatgatgatggattggcccaagattgttagtgatagagatggtaagaagtggtgagattctcgatataccttgaagatgtcaaaccacagcaaatttactactgnaaaaattatnngaacactgaaattattaatgngtattttggaacattnacacaccccatttnaaatatcttggatcaattcttactgaggcatgggaaataatc

SEQ ID NO: 7043 - DNA, 571 bp, Homo sapiens
  misc_feature (490)..(490): "n" may be a, t, c, g, other or unknown
  misc_feature (525)..(525): "n" may be a, t, c, g, other or unknown
  misc_feature (537)..(537): "n" may be a, t, c, g, other or unknown
  misc_feature (545)..(545): "n" may be a, t, c, g, other or unknown
  misc_feature (554)..(554): "n" may be a, t, c, g, other or unknown
  misc_feature (565)..(565): "n" may be a, t, c, g, other or unknown
gagacagagtctcactctgtcacctaggctgaagggccatgaggcaatcttggctactgcaacctctgcctcctgggttcaagtgattctcctgcctcagcctcctgagtagctgggactataggcatgcagcaccacgcctgggtagtttatgtattttcaggagagatggggtttcaccatgttggccaggctggtctcaaactcctcacctcaggtgatccactggccttggcctcccaaagtgctgggattccaggtgtgagccactgcgcccagcccagacctccaatttctatcctcccagggactccaggcccagcctggatctcagagaagaatcctgattgtggcagaggctgttacttctcccttagaatccatcctccctgtttcgttcttggtaaccaaacccctaagagtatgagcactgcacatggccacccagccagagactacatttcccagactctcttgcactagagatggntatgtgaccatgctccgggccaatgggatataacngaaatgctctgnaccatctntgggtgacncctttccaaanagtggt

SEQ ID NO: 7044 - DNA, 567 bp, Homo sapiens
  misc_feature (485)..(485): "n" may be a, t, c, g, other or unknown
  misc_feature (518)..(518): "n" may be a, t, c, g, other or unknown
  misc_feature (528)..(528): "n" may be a, t, c, g, other or unknown
  misc_feature (545)..(545): "n" may be a, t, c, g, other or unknown
  misc_feature (554)..(554): "n" may be a, t, c, g, other or unknown
  misc_feature (560)..(560): "n" may be a, t, c, g, other or unknown
cttttttttgaagatggatgtactttctaagaataagaacattctcccacagtactattatcacacctaagaaaatgaacagtggctggacacggtggctcatgtctataatcccaacactttgggaggctgaggtgggtggatcacctgaggccagcagttcgagacagcctggccaacatggtgagaccccatctctactaaaaatacaaaaattagccaggcatggtggcacacacctgtagtcccagctacttggcaggctgaggcaggagaatcacctgaacccaggaggcagaagttacagtgagccaagattgtaccactgcactccagtctgggcaagagagtgagaattcatctcaaaaaaaaaaaaaaaaaaaagagagagaaaatgaacagtaattcttttcatgtaatatctagtccatattcaaattggaatgatttctttttttttttttttttttgaaaccaggtctttnttttacccaggctggagtcagtgcaaccactgnggcttactgnaacttttacctctgggnccaagcagncttcanaataaac

SEQ ID NO: 7045 - DNA, 570 bp, Homo sapiens
  misc_feature (462)..(462): "n" may be a, t, c, g, other or unknown
  misc_feature (544)..(544): "n" may be a, t, c, g, other or unknown
  misc_feature (564)..(564): "n" may be a, t, c, g, other or unknown
agtagagacgtgggtttcaccgtgtaagccacgatggtcttgatctcctgacctcatgatccgcctgcctcaggctcccaaagtgctgggattacagacgtgagccaccgcgcccggcctgattagacaatatttaacactatcttattgtgatgtaccaataaacaaaacaaaacaaaaaacccacattgaaacaaatcagaaaaaattaaagcatgaacaaattttatatagtatataataagaataaaagtcccacaacttaaggctctaattataacaatgaaatagatccaaagttcttgaatcacttttttcaattttgaagatgactgttgtaaatatatatctatttaaagtttcatccacaaggtttattaatcaagtaaaatgtacatttttaaacccattcctgggtaaacaaatatttatttgcaagcttttcttaattggactcctcangcacatctaatattgcaacatatgcaggttaggaaaatatacacataatcctaaacaatctttacttataaatttgaatgcntattctaatctaccaagagnaagatt

SEQ ID NO: 7046 - DNA, 571 bp, Homo sapiens
  misc_feature (532)..(532): "n" may be a, t, c, g, other or unknown
  misc_feature (557)..(557): "n" may be a, t, c, g, other or unknown
  misc_feature (563)..(563): "n" may be a, t, c, g, other or unknown
  misc_feature (571)..(571): "n" may be a, t, c, g, other or unknown
aattgaaaagaaaatcagattggtttattgcttctgcttgtatacagagttgaagagcaagtttgagtgagtgcctggagtgggcggtggatgaggggaattatggaagggagaggggttcctcaagtctgttattttttaagagacggggtctcgctgtgttgcccaggctggtcttgaactcctgggctcaagcaatccacccatctcagcctcccaaagtgttgggattacagatgtgaggcaccgcacctggcctcaaatctgttcttgagcagtagagaggaaaggagaaaggaagggacccactggctaaaataaaatacatttttaagaagggcaactctcagtgagtggttgtgatggccgccctgctagggctcttccctcgcctcctggagctcctcccttcatcctctcctgtattgctgggcccagcctaatgtggaagaagagtaaagctgagctagaagtattttctgcttggtgccccaccaatttaaacacattaaatttggaatggaagttctgnctttggatgaggctttatctatggngacatnctggtctn

SEQ ID NO: 7047 - DNA, 561 bp, Homo sapiens
  misc_feature (471)..(471): "n" may be a, t, c, g, other or unknown
  misc_feature (537)..(537): "n" may be a, t, c, g, other or unknown
  misc_feature (539)..(539): "n" may be a, t, c, g, other or unknown
  misc_feature (541)..(541): "n" may be a, t, c, g, other or unknown
  misc_feature (546)..(546): "n" may be a, t, c, g, other or unknown
  misc_feature (548)..(548): "n" may be a, t, c, g, other or unknown
  misc_feature (551)..(551): "n" may be a, t, c, g, other or unknown
cttttcttttttttttggataggcttttgttctgttgcccaggctagagtgcagtggcatgatcactgctcactgcaacctccacctcccaggttcaagcaatcttactgcctcagcctcctgagtagctgtgaatacaggcacgtgtcaccatgctcgtttttaaaatttttggtaggcatgaggtctctctgtgttgtccaggctggtaccaatctcatgggctcaagcgatcctccttcctcggcatcccaaagtgttgggattacaggcgtcagccattgtgcctggccactacacatgttactaatatgacgaactgaaattatggatccctaagtttagtagaataaaatttcagatttcataaaaagactaacataaaagatattgatcattcttttaggcctcctaagtaagatttaagcaaagcataaatttctgggatattctcagttcaaacacacactnttactgatgtcctgctaagctttctgatgacaattcctttatgctttacatcttggagaaccaatnangnttacntnttntacattaacg

SEQ ID NO: 7048 - DNA, 569 bp, Homo sapiens
  misc_feature (516)..(516): "n" may be a, t, c, g, other or unknown
  misc_feature (538)..(538): "n" may be a, t, c, g, other or unknown
  misc_feature (540)..(540): "n" may be a, t, c, g, other or unknown
agacagttataataacaaaggatttattatcatttgcagatgaaataaatgtaccatcccctacttgaaaggtttcaataagccttaacatttttcaggttgtaccaaggcaccgccactgcctagttatattatgcacccatttctagagtaaaaaaactacacctccctcaacatcagttctgtactgtttctggtttatgatacacttccaaaacagcaaaaaattgcaaatatgtgcaaacactgtggtccattcagagtactgcttagtcatcatcttcttcttcctcctcttcttcctcaaagctatcttcaaagccctcactgtcctcctggtcttcatccccctctattgctgtatcccactgtgggtgattttctggcacaggcttagcctcatgaacttccaacttcaatggtttaatctgatccaaacccatataggagtctgatctcagaaacacagtatactgataatttccaggcttgcctggtgcaggaaacttcaacttntacctcaggaaagtaaaggctntncccaggatgggtaattttggatttgggtt

SEQ ID NO: 7049 - DNA, 563 bp, Homo sapiens
  misc_feature (547)..(547): "n" may be a, t, c, g, other or unknown
  misc_feature (555)..(555): "n" may be a, t, c, g, other or unknown
  misc_feature (558)..(558): "n" may be a, t, c, g, other or unknown
gatctttctagaatgttatttattaaaaatagattctctatccttcccctcacccctgcgagcaaagtggcctttcccaacatcttttcccaaatggatgaaacaggtcttgaggacgcagatgtggcattctacataaactacaggatcaggcttttctgggacagtgggtctgctggagccaagagtggaacagcacaagacaacatcagcaaaccctggcgcacctaaccgcgggctgccatggatgccgggacggactggagttcctcctgctccaggtacaagtccacaaagagagacccagcggcccagcagcagcctcctgggcaccaccagaaagcgatgtacttaagggcctcaggcggtcgagaggcaacgtggcttccacatgtgtgggaatgagactaaaaagctggctcaaagcaaaatatgaacttataggaaaggagggccctggactggcaggaagagagagactcgtggcaattctagagatggcagtgcccaaccatcaagttctaaagagaccatttgggagtgactntgccttanccngggtg

SEQ ID NO: 7050 - DNA, 566 bp, Homo sapiens
  misc_feature (520)..(520): "n" may be a, t, c, g, other or unknown
  misc_feature (522)..(522): "n" may be a, t, c, g, other or unknown
  misc_feature (527)..(527): "n" may be a, t, c, g, other or unknown
  misc_feature (547)..(547): "n" may be a, t, c, g, other or unknown
  misc_feature (554)..(554): "n" may be a, t, c, g, other or unknown
  misc_feature (558)..(558): "n" may be a, t, c, g, other or unknown
aatcaaagagaaatattgcactgtattctccaggataaaatcaggtagcagatgcggctgctgagtcacccaaatgggttttagaaaagaaactgctgaatccagactggtaagtcccttgtagccagtgatttgcgctcagaggaggtaataggacaaaaaaaaaaaaaaaaaaaaagccgtatgtgcaaaaggaagagcttcaaagaagtccgtagggaaggagtgactgcgacgcagtgaaggccattagtcaggagtgtggtgggagagggagagggcagctttcctgtgccacaagaagatgggagttgggtggactcaagaactcagggctgatgtttgagtccatgctctttcaatgatagacacacatacctgaaagcagccaatctccattaaaaatgtgtgttcttttcctcaaaggagatacaatagacatcagaaagatatgattatttcagctaccaaagtgtcttgatatccatctcttcaaagatccatatgggatgggatcaangngtccncctgagaaaagtcctaagtnttaagcncagnttttatta

SEQ ID NO: 7051 - DNA, 562 bp, Homo sapiens
  misc_feature (527)..(527): "n" may be a, t, c, g, other or unknown
  misc_feature (550)..(550): "n" may be a, t, c, g, other or unknown
gctatccatttgcgtagtaaatattcctccatccctttattttgagcctacgtgtgtctttgcatgtgagatgggtctcctgaatacagcacactgatgggttttgactctttatccaatttgccagcctgtgtcttttaattgggtcatttagcccctttacatttaaggttaatattgttatctgtgaatttgatcctgtcattatgatgctagctggttattttgcctgttagttgatgtagtttcttcaaagtgtcgatggtctttagattttggtatgtttttgcagtggctggtaccagtttccccttccatattcagtgcttccttcagtagctcttataaggcaggcctggtggtgacagaatctctcagcatttgcttatctgtaaagggttttatttctccttcacttatgaagcttatttaggctagatatgaaattctgggttgaaaattctttaagaatgttgaatattggccccaactctattctagcttgtagggtgctgcagaaagatccnctggtaagctgaagggccttccnttggggggaacc

SEQ ID NO: 7052 - DNA, 536 bp, Homo sapiens
  misc_feature (3)..(3): "n" may be a, t, c, g, other or unknown
  misc_feature (17)..(17): "n" may be a, t, c, g, other or unknown
  misc_feature (24)..(24): "n" may be a, t, c, g, other or unknown
  misc_feature (40)..(40): "n" may be a, t, c, g, other or unknown
  misc_feature (99)..(99): "n" may be a, t, c, g, other or unknown
  misc_feature (127)..(127): "n" may be a, t, c, g, other or unknown
  misc_feature (131)..(131): "n" may be a, t, c, g, other or unknown
  misc_feature (168)..(168): "n" may be a, t, c, g, other or unknown
  misc_feature (170)..(170): "n" may be a, t, c, g, other or unknown
  misc_feature (219)..(219): "n" may be a, t, c, g, other or unknown
  misc_feature (233)..(233): "n" may be a, t, c, g, other or unknown
  misc_feature (246)..(246): "n" may be a, t, c, g, other or unknown
  misc_feature (294)..(294): "n" may be a, t, c, g, other or unknown
  misc_feature (297)..(297): "n" may be a, t, c, g, other or unknown
  misc_feature (339)..(339): "n" may be a, t, c, g, other or unknown
  misc_feature (363)..(363): "n" may be a, t, c, g, other or unknown
  misc_feature (374)..(374): "n" may be a, t, c, g, other or unknown
  misc_feature (444)..(444): "n" may be a, t, c, g, other or unknown
  misc_feature (446)..(446): "n" may be a, t, c, g, other or unknown
  misc_feature (460)..(460): "n" may be a, t, c, g, other or unknown
  misc_feature (487)..(487): "n" may be a, t, c, g, other or unknown
  misc_feature (489)..(489): "n" may be a, t, c, g, other or unknown
  misc_feature (506)..(506): "n" may be a, t, c, g, other or unknown
  misc_feature (510)..(510): "n" may be a, t, c, g, other or unknown
ganacagagtcttgctntgtcatntaggctggagtgcagnggcgtgatataggctcactgcaacctccacctcctgggttcaagcgattctcctgcctnagcctcccaagtagctgggactacaggngtgngccaccatgtccagccaattttttgtatttttagtananatggggtttcaccatgctggccaggctggtctcgaactcctgacctcgngatccgccctcctnagcctcccaaagngttgggattacaggcatgagccactgcgcctggccatcaaaacgtatnttntttcactccaggaagttctcctttctagttaatgaatgtctnacctgaccacctgaggcaaacagngttttcatttntaccaccacagatcactttttgccttttcttgaacttcacataaatggaatcattcaagtaagtacttgntnatatgcatattttngggtcattcatggtttgcttggataananggcttttattggtgaanaccnctggatggaacttactaactattacc

SEQ ID NO: 7053 - DNA, 566 bp, Homo sapiens
  misc_feature (502)..(502): "n" may be a, t, c, g, other or unknown
  misc_feature (514)..(514): "n" may be a, t, c, g, other or unknown
  misc_feature (545)..(545): "n" may be a, t, c, g, other or unknown
  misc_feature (556)..(556): "n" may be a, t, c, g, other or unknown
  misc_feature (566)..(566): "n" may be a, t, c, g, other or unknown
gagatggagtttcactcttgttgcccaggcaggaatgcaatggcatgatctaggctcactgcaacctctgcctcctggatccaagcagttctcctgcctcagcctcctgagtagctgggatcacgggtgcccatcaccatgtctggctacttttttgtatttttagtagagacaggtttcaccaagttggccaggctggtcttcaactcctgacctcaggtgatctgcccacctcacctcccaaagtgctgggattacaggcatgagccaccacacccggcctttttctctttttaatatgaaagttcactgcccttggccaaactgactttgagacctttttgggagggatagtgctttggaataaacccagcagccagagttcattcttagttctgataaagaatagcccagagacataggaatcacatacacacctataattagaggcatttattttattttagtgtcattatatgtgcatttgctttatttttaattngattacatggangtactggtggtcttttaacatgaagggaaancctggggcaancatttgttcn

SEQ ID NO: 7054 - DNA, 568 bp, Homo sapiens
  misc_feature (495)..(495): "n" may be a, t, c, g, other or unknown
  misc_feature (506)..(506): "n" may be a, t, c, g, other or unknown
  misc_feature (511)..(511): "n" may be a, t, c, g, other or unknown
gagatgggagtctcgctatgttgcccatgctggagtgcagtggcgtgatctcagctcactgcaacctctgcctcccaggttaaagcgattctcctgcctgagccccccagcctcctgagtagctgggattacaggcgcctgccaccacgtctggctaatttttgtattttttagtagagacggggttttaccgtgttgtcaaggctggtctcaaattcctgacctcaggtgatctatctgcttcgcccccccaaagtgctgggattacaggtgtgagccaccgcatccagccaagaatggcctctttaatgtctgtgagctccccaagggcagagacaccctctagtgcctggcaccgcctccagggctgaggaggtgctcaccaagtctgtgatgcaggaatgaagccgtatcccaagtagggggctgcgtctgcccagtttaccagtgcgttcttgtcacccagcacgggctggccagcgagtatcgacacanggtttgctgancggangaatgaaccctgctttgtggtggaagggaacaagtggcaaggaaaaccggacccctt

SEQ ID NO: 7055 - DNA, 563 bp, Homo sapiens
  misc_feature (528)..(528): "n" may be a, t, c, g, other or unknown
atttttattttttctgagacggagtctctgttgcccaggctggagtgcagtggcacaatctcggctcactgcaacctccgcctccctggttcaagcaattctcctgcctcagcctcccgagtagctgagactacaggtgcacgccaccatgcccggctaatttttgtatttttatagagatagggtttcaccacgttggccagactggtctccaactcctgacctcgtgatccacctgccttggcctctcaaagtgctgggattataggcgtgagacaacgcacctggcctttagtttatattttatttggatactacaaatgttgaatatcttgtgtttactggttatttgtatgttttctttacgaattgcttttcaggattttggcctatttagtgatattatttaaatatttcttaagtggatctgtaagcactctacatattaaggctataacacagtatagcactctgggattatctaacctctacagttgagatattagacataaaggggctgctggggantagaaattttttatgccaaatattacttaatttac

SEQ ID NO: 7056 - DNA, 555 bp, Homo sapiens
  misc_feature (449)..(449): "n" may be a, t, c, g, other or unknown
  misc_feature (454)..(454): "n" may be a, t, c, g, other or unknown
  misc_feature (461)..(461): "n" may be a, t, c, g, other or unknown
  misc_feature (476)..(476): "n" may be a, t, c, g, other or unknown
  misc_feature (520)..(520): "n" may be a, t, c, g, other or unknown
  misc_feature (523)..(523): "n" may be a, t, c, g, other or unknown
  misc_feature (543)..(543): "n" may be a, t, c, g, other or unknown
  misc_feature (555)..(555): "n" may be a, t, c, g, other or unknown
aatagagacagggtttcaccatattggccaggctggtctcgaactcctgaccgcaggtgatccgcctgcctcggcctcccaaagtgctggctgggattataggtgtaagccaccgtgcccagcctgctgctgacctttaaatggggtttttgtggggtctttttcattgatgttgttgttgctcttgctttctatttgtcttttcacagtcaggtccctcttctgtagggctgctgccatttgctggggatctactccagacgctatttccctgggtccttcccactcctggaattatcaccagtggacgctgccgaacaacaaagatggcagcctgctccttcctctgggagctctgacccagaggggcaccaacctgatgccagctggaacactcctgtatgaagtgtctggcgaactctattgggacatctcacttcagtcaggangaacnggatcanggtcttgcttaaaanaaccagtcttggcttgccccttggcaaaacaaggtgtgctacantangggggaatccccctaatccnggcttgccctgn

SEQ ID NO: 7057 - DNA, 564 bp, Homo sapiens
  misc_feature (466)..(466): "n" may be a, t, c, g, other or unknown
  misc_feature (487)..(487): "n" may be a, t, c, g, other or unknown
  misc_feature (530)..(530): "n" may be a, t, c, g, other or unknown
  misc_feature (557)..(557): "n" may be a, t, c, g, other or unknown
  misc_feature (559)..(559): "n" may be a, t, c, g, other or unknown
  misc_feature (563)..(563): "n" may be a, t, c, g, other or unknown
atatggagtctcgctctgtcgcccaggctgtagtgcaacggcacaatcttggcttactccaatcttcacctccgggttcaagcaattctcctgactccgcctcccgagtgggattacaggcacccaccaccatgcctggctatttttgtagttttagtagagactgggtttcaccatattcatcaggctggtctcaaactcctgacctcaggtgattcatccgcctctgccagaatttctctttaaattcaacaagattcagttttacagtctggaaaaaaaatgtcctctctatatgaacaatcaatcttcaccattgatatttttcatctttgacttgaagttacaaactaacttcagcaggaatatttatgaattattatggataatctattacacagtgaaaactgtaatatatgtttgctacatttatatataaaaacatcctcatgactaatgaagcctncctagtcttaactgaacaaantggactcaataaatatgcttatggcaattataaaaaggggaanggaccaaatcactaaagaaaacctttntnttgnt

SEQ ID NO: 7058 - DNA, 564 bp, Homo sapiens
  misc_feature (520)..(520): "n" may be a, t, c, g, other or unknown
  misc_feature (543)..(543): "n" may be a, t, c, g, other or unknown
cactgatgtatcccagacacttataactgtgcctggcacattaaaggcattctatagatatttgctgaatgaataaatgagaagctgttgttttattctataataaataataattaactaagttgtaggtagggactatgttttctaccccttaggacctaacagagccaaacaagagtgcagagaagatgctcagattttctgataatgatactaatgcttcagtcttacaccctcacctcttctcaggcactcctgagctttgttaagtcattctatttgttttcatgccagttggttaaaggctttcgtttctatttagaggtgaaactagagctacagagatgatcattagccaaccatgaagagaattctagtttcctatgtgctattaactagtctgcgtccaagtataaagaaggtgcttatgcttggcgtggaataaaataagttgccagtgctgatccctttctctcctcctcttcttcatatcttggtctgggccttacctggcagcttncctcttttcggttggattgaacnggcctgggcagctttgaaccg

SEQ ID NO: 7059 - DNA, 562 bp, Homo sapiens
  misc_feature (449)..(449): "n" may be a, t, c, g, other or unknown
  misc_feature (475)..(475): "n" may be a, t, c, g, other or unknown
  misc_feature (489)..(489): "n" may be a, t, c, g, other or unknown
  misc_feature (513)..(513): "n" may be a, t, c, g, other or unknown
  misc_feature (531)..(531): "n" may be a, t, c, g, other or unknown
  misc_feature (540)..(540): "n" may be a, t, c, g, other or unknown
  misc_feature (553)..(554): "n" may be a, t, c, g, other or unknown
ggacagtaaatggtttttattattttatttcctttctccttctctattagcttggtagctataaattctctttctatccttttagtgattactctagagttaatcaactcaagttctatgaaagaattatgtcctgcagaaaacattctgagtgactattttttttttcagttcttacaaggcattctaaatgtaaagaagttaattcataatatataatagatgccttagcacagatgtcttagttctggctgctactaacaaaaataccatagaccgggtggctcacacaacaaacatttctcatagttctagaggctgggttctatagaccctccaagaccagggttccatcatggtcaagttctggtgaagaccctcttcctggcttgcagatggcattcttcttgctgggccccatatggcagagaagtagacagaaagaacangaactctggggctctaatcccattgngagggttcaccttnacgaactaaatccttccaaaaggncccacttctaacaccatnaccttgganggtagaattcacnntccaatct

SEQ ID NO: 7060 - DNA, 415 bp, Homo sapiens
  misc_feature (3)..(3): "n" may be a, t, c, g, other or unknown
  misc_feature (16)..(16): "n" may be a, t, c, g, other or unknown
  misc_feature (19)..(19): "n" may be a, t, c, g, other or unknown
  misc_feature (33)..(33): "n" may be a, t, c, g, other or unknown
  misc_feature (41)..(41): "n" may be a, t, c, g, other or unknown
  misc_feature (83)..(83): "n" may be a, t, c, g, other or unknown
  misc_feature (105)..(105): "n" may be a, t, c, g, other or unknown
  misc_feature (114)..(114): "n" may be a, t, c, g, other or unknown
  misc_feature (116)..(116): "n" may be a, t, c, g, other or unknown
  misc_feature (182)..(182): "n" may be a, t, c, g, other or unknown
  misc_feature (184)..(184): "n" may be a, t, c, g, other or unknown
  misc_feature (214)..(214): "n" may be a, t, c, g, other or unknown
  misc_feature (236)..(236): "n" may be a, t, c, g, other or unknown
  misc_feature (247)..(247): "n" may be a, t, c, g, other or unknown
  misc_feature (260)..(260): "n" may be a, t, c, g, other or unknown
  misc_feature (275)..(275): "n" may be a, t, c, g, other or unknown
  misc_feature (320)..(320): "n" may be a, t, c, g, other or unknown
  misc_feature (322)..(322): "n" may be a, t, c, g, other or unknown
  misc_feature (325)..(325): "n" may be a, t, c, g, other or unknown
  misc_feature (370)..(370): "n" may be a, t, c, g, other or unknown
  misc_feature (380)..(380): "n" may be a, t, c, g, other or unknown
  misc_feature (393)..(393): "n" may be a, t, c, g, other or unknown
  misc_feature (415)..(415): "n" may be a, t, c, g, other or unknown
ganacgagtctcgctntgncaccaggctgaagngcaggggngcaatctcggctcaccgcaacctccgcctccctgcaacctgngcctcccaggttcaagcgattntcccgcctnancctcccaagtagctgggactacaggcacgcaacaccatgcccggctaatttttggatttttagcananacggggtttcaccatgttggccaggatggnctcgatctcctgaccttggganctgcccgcctnggcctcccaaagngctgggattacaggngtgagccaccacgcccggcccaccacgataattttttttttgtananacnagggtctcaccatgttgcccaaaatgggctcgaactcctgagctnaagcaatttnccggcttgggctnccaaagggtggaactcccggtn

SEQ ID NO: 7061 - DNA, 556 bp, Homo sapiens
  misc_feature (457)..(457): "n" may be a, t, c, g, other or unknown
  misc_feature (495)..(495): "n" may be a, t, c, g, other or unknown
  misc_feature (502)..(502): "n" may be a, t, c, g, other or unknown
  misc_feature (528)..(528): "n" may be a, t, c, g, other or unknown
  misc_feature (539)..(539): "n" may be a, t, c, g, other or unknown
  misc_feature (549)..(549): "n" may be a, t, c, g, other or unknown
cctaaaaaaggcttatatttacttgatttgaattttgctagcatgctttttcttctgaattcaagtgactagaactgaaattattccacctggggagaagagacagctgaaagccaatttagtattggttttcaaatacatgaagggtactcagagagaggatgattgccaaagaaaatggtctttgaaccatagaaagaatctgagcttgctctaaagttaaatttcctgacttacagagtttatgacattaaactgagagaccaagggatcctttttggagacttcaaaaataggatagatccttaaatgcctgagatggcttggatgtggctttgtctgaagtcaggaggataaatcttaccactgatggtcccttcaggcgtgtgaatctatgggtttgactggcatgtcagaagctagaatgccagcccaggacatctagagagcatctctncatgctgggtagcagtctatcaatcgctctactggctnacatctntcaacttggcttcaccacatagggancccaggcctgntccggctgangctgatt

SEQ ID NO: 7062 - DNA, 540 bp, Homo sapiens
  misc_feature (451)..(451): "n" may be a, t, c, g, other or unknown
  misc_feature (475)..(475): "n" may be a, t, c, g, other or unknown
  misc_feature (491)..(492): "n" may be a, t, c, g, other or unknown
  misc_feature (522)..(523): "n" may be a, t, c, g, other or unknown
  misc_feature (532)..(532): "n" may be a, t, c, g, other or unknown
ctttttttgagacagtctcactctgtcacccaggctagagtgcagtggtgcaatctcggctcactgccagctccgcctcccaggttcacgccattctcctgcctcagtctcccaagcagccgggaccacaggcgcccgccaccatgcccggccaattttttgtatttttagtagagacggggattcaccgtgctagccaggatggtctcgatctcctgacctcgtgatccgcccgcctcggcctcccaaagtgctgggattacaggcgtgagccaccgcgcccagccgccagaagatatttttaacatgccaagaagacaaaggttaaatatccagaatatttcaaagatgtcctatacgcactacaaaacactgctgaagagagcttggtgcatttgaagaacaacaaagtgtttgttgtggttgtagcaaaaatggggtgtgtgtgtgngtgtgtgtgtgtgtgtgtgtgtgngtggggatactcccgnntttcctggataaattcctttgacttaaaanngccttttancaattttg

SEQ ID NO: 7063 - DNA, 553 bp, Homo sapiens
  misc_feature (422)..(422): "n" may be a, t, c, g, other or unknown
  misc_feature (425)..(425): "n" may be a, t, c, g, other or unknown
  misc_feature (464)..(464): "n" may be a, t, c, g, other or unknown
  misc_feature (479)..(479): "n" may be a, t, c, g, other or unknown
  misc_feature (498)..(498): "n" may be a, t, c, g, other or unknown
gagatagggtcttgctctgtcacctagggtggagtgcagtggtgcaatcatggctcacggcagtctcaacctcctggactcaagcaatcctcccccctcagcctcccaaacagctaggaccacaggtgcacaccaccacaccccacaatttttttaaaactttttgtagacatagggctctgtatgttgcccaggctggtctcaaactcctgatctcaagcgatcctcctgccttggcttcccaaggtgctgggattacaggtgtacgcacctggccttacatatattaccttaatggaagattttaaataaggtagtatttctctatagcagtggtcttacctgggggttacttttgtctccttttccctaaccaggagacacttgacaatgtctgcagacatttttggttgtgggaatgnggntttgggtggtggggtactacttgcatgtaggggtaaaangccagggatgctctnaacatcttacaatgcccanggacagcttccacaacaaacaatttccagccccaacaccacaggctgaggtggga

SEQ ID NO: 7064 - DNA, 559 bp, Homo sapiens
  misc_feature (505)..(505): "n" may be a, t, c, g, other or unknown
  misc_feature (534)..(534): "n" may be a, t, c, g, other or unknown
  misc_feature (541)..(541): "n" may be a, t, c, g, other or unknown
  misc_feature (544)..(545): "n" may be a, t, c, g, other or unknown
  misc_feature (554)..(554): "n" may be a, t, c, g, other or unknown
  misc_feature (559)..(559): "n" may be a, t, c, g, other or unknown
gatacggagtattgctctgttgcccaggctggagtgcagtagcacagtctcggctcactgcaacctctgcctcccgggttcaagagattctcctgcctcagcctccagagtagctgggattacaagcgtgcaccaccatacctggctaatttttgtattttcagtagagatggggtttcgccatgttgaccagcctggtcttgaactcctgaccttaagggattcacccgccttggcctcccaaagtgttaggattacatgcgtgagccaccaccctcggcctgcttcttagcacttctaacctctgccccttggcatcacctggccaagcagatgaaaagttccagtgagctgtcagccggcaccaggctggggtcttccctaggcagctccaagtggctaggatctggcttcttttccagagctgggtccagaaaccaagatcgggaatgcctgatggctgctctgcggcccttgctatgaaggcactttccttggttcaggngatcggcccttggctttaaggaacatgtngggtcanccnngggttgggncaacn

SEQ ID NO: 7065 - DNA, 523 bp, Homo sapiens
  misc_feature (463)..(463): "n" may be a, t, c, g, other or unknown
  misc_feature (476)..(476): "n" may be a, t, c, g, other or unknown
  misc_feature (479)..(479): "n" may be a, t, c, g, other or unknown
  misc_feature (482)..(482): "n" may be a, t, c, g, other or unknown
  misc_feature (489)..(489): "n" may be a, t, c, g, other or unknown
  misc_feature (510)..(510): "n" may be a, t, c, g, other or unknown
  misc_feature (515)..(515): "n" may be a, t, c, g, other or unknown
aaagatatggctatggataatggtcgtagatatcttacaatctaggattattttgaaaacttttttctgagttattcattgtaagactctccccaatccaagggtgaaggatacttggacacaacacaatgccagttcaagttcaagggaagtgttccatcctctttcagcctccactcagctccagacacacggtgcatggtccagctccctgggattttcccattcggaaagggaagccgtttgtcgagccagcctctgtgaccactcatgatctgaattacccacaggtgttcgaaaatacagagggatccagcataattaagagcattaagcaatcatctcagcccaaggaggcagttgaagaaaagaacagagtttgggcaacacttggggaaataaattccacagcctttcaccaagttgaaatcttggctttggacacacataaaaatgacctggnccaatcttaactnttnagnggacatnttggcatatcacaagatttgnccaantgggctgc

SEQ ID NO: 7066 - DNA, 563 bp, Homo sapiens
  misc_feature (427)..(427): "n" may be a, t, c, g, other or unknown
  misc_feature (459)..(459): "n" may be a, t, c, g, other or unknown
  misc_feature (492)..(492): "n" may be a, t, c, g, other or unknown
  misc_feature (511)..(511): "n" may be a, t, c, g, other or unknown
  misc_feature (533)..(533): "n" may be a, t, c, g, other or unknown
  misc_feature (557)..(557): "n" may be a, t, c, g, other or unknown
  misc_feature (559)..(559): "n" may be a, t, c, g, other or unknown
aatgagcagtttaatggaaaataattgctccaggtacaggtcttctaggcacattttgtctctgcagctattgttttaattagtgggcctgcttgttcgctgtccctttgttgtggcccgctctggggcaggggtgcccggggagggttcctcttgtggaacgcaggcgttaatgagccatttcagtaataagagtcctgccttgagccagaagtcagagcacccaagacaccccaagcagcagaaatgctcatgaatttctgaaactgcctttctaatttgcatttaaacataacttccaaagaacaatttcacctgtgattttctgagctggaaaggtaagggactttagatgttgaatatgtacaaattatgttaatataacggaggtaaatgaaagtcaaatgcattggcatgtaaaatgtanacgtcttttctaaatggctattttctacccangctttggttaattttcccctaaagtggaaatgngataatttttttttaaatnaagggaatctctataataaatnccaattggatggaactgggtattncncaat

SEQ ID NO: 7067 - DNA, 501 bp, Homo sapiens
  misc_feature (391)..(391): "n" may be a, t, c, g, other or unknown
  misc_feature (419)..(420): "n" may be a, t, c, g, other or unknown
  misc_feature (426)..(426): "n" may be a, t, c, g, other or unknown
  misc_feature (473)..(473): "n" may be a, t, c, g, other or unknown
  misc_feature (481)..(481): "n" may be a, t, c, g, other or unknown
  misc_feature (496)..(496): "n" may be a, t, c, g, other or unknown
  misc_feature (501)..(501): "n" may be a, t, c, g, other or unknown
gagaggagtctcgctctgtcgcccagtctggagtacggtagtgcgatcccggctcactgcaacctcggcctcccaggttcaagggattctcctgcctcagcctcatagttcctccccgtctgcaaccaccggtcttcaccggattcacagtcggaaccgcgagcaaagacacctagtagagccggccgattcctaggtcctccggctaggaggcgctgcgggccagtctccggggggccaccgcagcccgcgcgcccagcacccccaccctcacggcagagcccagcccagccccgcggcggagctccgagttctgcgccgtccgccggggttactcccggtcattccactgcaccaactcggcccagcttccccatctgcgcccaggcanaactgccccgagagaccagcagcaacgnntggaanatgggcttgcagggaacgttgggaaaagggaaggattgggcacccancttccggntttccggaagctttnctaan

SEQ ID NO: 7068 - DNA, 554 bp, Homo sapiens
  misc_feature (394)..(394): "n" may be a, t, c, g, other or unknown
  misc_feature (442)..(442): "n" may be a, t, c, g, other or unknown
  misc_feature (448)..(448): "n" may be a, t, c, g, other or unknown
  misc_feature (452)..(452): "n" may be a, t, c, g, other or unknown
  misc_feature (454)..(454): "n" may be a, t, c, g, other or unknown
  misc_feature (492)..(492): "n" may be a, t, c, g, other or unknown
  misc_feature (494)..(494): "n" may be a, t, c, g, other or unknown
  misc_feature (518)..(518): "n" may be a, t, c, g, other or unknown
  misc_feature (550)..(551): "n" may be a, t, c, g, other or unknown
gagacggagtcttgctttgtcgcccaggctggagtgcagtagtgtgatctcggctcactgcaagctccacctcccaggttcacaccattctcctgcctcagcctcccgagtagctgggactacaggcgcccgccaccacgcccagctaatttgttttttttgtatttttaggagcgacagggtttcaccgtgttagccaggttggtctcgatctcctgacctcgtgatccgcccgcctcagcctcccaaagtgctgggattacaggcgtgagccactgcgccaagagcaagcttctgatgtaggggctgcggggggcttcccaggccaggcaggttgctgtctcagcgccagcgtgtagcctcctcccaggatccggagcaggagggtggctgncttttgcgttcaatccgctgggctgctgtggggttcccgcaaaactgnttcaangggncnagaagaaggaaggacccttgccccaaggacagacggcnancttggatcaggaaaggccaaccgnggccaaaggcttggactctggttgggggaacnncca

SEQ ID NO: 7069 - DNA, 531 bp, Homo sapiens
  misc_feature (414)..(414): "n" may be a, t, c, g, other or unknown
  misc_feature (468)..(468): "n" may be a, t, c, g, other or unknown
  misc_feature (488)..(488): "n" may be a, t, c, g, other or unknown
  misc_feature (491)..(491): "n" may be a, t, c, g, other or unknown
  misc_feature (516)..(518): "n" may be a, t, c, g, other or unknown
  misc_feature (528)..(528): "n" may be a, t, c, g, other or unknown
aaatttagagacagggtcttgctctgtcacccaggctggagtgcagtggcgtgatcatagctcactgcagcctcgaattcctgggctcaagccatcctctagcctgggcctcttgaaatgttaggatcacaggcgtgagccaaggcacagactctgggtttaaggcagaagcacttgttacatgaatcacatcacataaagcaatcttttggtcaggtggccaggcgaggagaggcccaagaaacaggaaaaggagagcaagtgagagtgaatcggcgaagccatcacctaatgaaggagccagacaccctgagtgtggagccccagccatgggtcctgccccttgcgccgctcagggcaaatcttcttgctgcctggtccacagcagttactggggggcttggcagggtgaantgtgtgtcaccagacctgcacaagcttcttcttacagatacaacgctgactcantgtgaaggcccttaaggctntanaaaaaccccaaccaagggaggggcnnnaacccccaanaag

SEQ ID NO: 7070 - DNA, 564 bp, Homo sapiens
  misc_feature (443)..(443): "n" may be a, t, c, g, other or unknown
  misc_feature (448)..(448): "n" may be a, t, c, g, other or unknown
  misc_feature (453)..(453): "n" may be a, t, c, g, other or unknown
  misc_feature (469)..(469): "n" may be a, t, c, g, other or unknown
  misc_feature (472)..(472): "n" may be a, t, c, g, other or unknown
  misc_feature (562)..(562): "n" may be a, t, c, g, other or unknown
gccaaaccaccctactagattataacagtctgcatcaagaaacatttcatttaattctggaaaggcacagccatggaaatagaagattaaaatgaaaaaaaaaaaaaaagaaaaaagaaaaagagaaaacccacacaaaaaaaatgaaactaagagattctgaaagcagcatttcctaattaagaaggcccaagaaggtgacagatgtacccaggtccccacaaccagccagtggcagaaccaccagaagagctcattttcctagtgcctgcccaggttttttctacaatgctcacagcattgcaaggaggagttaacgccaattcttattcaaaattaaattctattagatattaaggatttctggtgggaatacttcagaaatgaaaaagtattttcaatttaaattaaattaaatttccaattaagtcacagagaactgnacttnaacanggaatctcttttactntanccctttaccaaaggaaatatttcactttttttctttctgggcatcaattaagaagtttaatgtaaaatggggcacttttcatcttggatnaa

SEQ ID NO: 7071 - DNA, 569 bp, Homo sapiens
  misc_feature (433)..(433): "n" may be a, t, c, g, other or unknown
  misc_feature (468)..(468): "n" may be a, t, c, g, other or unknown
  misc_feature (479)..(479): "n" may be a, t, c, g, other or unknown
  misc_feature (487)..(487): "n" may be a, t, c, g, other or unknown
  misc_feature (497)..(497): "n" may be a, t, c, g, other or unknown
  misc_feature (500)..(500): "n" may be a, t, c, g, other or unknown
  misc_feature (540)..(540): "n" may be a, t, c, g, other or unknown
  misc_feature (543)..(543): "n" may be a, t, c, g, other or unknown
gagactgagtggagtctcgctctgtcgcccaggctggagtgcagtggtgcgatctcgatctcgactcactcactgcaagctccgcctcccaggttcatgccattcttctgcctcaacctcccgagtagctgggactacaggcgcccaccaccacacccggctaattttctgtatttttagtagagacggggtttcaccgtgttagccaggatggtctcgatctcctgacctcgtgatccgtccgcctcggcctcccaaagtgctgggattacaggcatgagccattgcacccggcctaaatttgtaccttttaaaaataagtgctaatgtaataaatatctaaacaaccttgtgtgtagagcttattacaaagaacagactgttttgacaatttcagatcatcattaccaatattaagttacaggtacttggngactctaagtaggaccagaacagaagcctcaatgngctggcccaanttgacatntatgcctgancgnaaggctttggggcttgaaaatcttcccattagaaaatcanggnggtattttattcattattcccatggc

SEQ ID NO: 7072 - DNA, 559 bp, Homo sapiens
  misc_feature (393)..(393): "n" may be a, t, c, g, other or unknown
  misc_feature (490)..(490): "n" may be a, t, c, g, other or unknown
  misc_feature (512)..(512): "n" may be a, t, c, g, other or unknown
  misc_feature (519)..(519): "n" may be a, t, c, g, other or unknown
  misc_feature (559)..(559): "n" may be a, t, c, g, other or unknown
gagatagtcttgctctgtcacccaggccggagtgcaatggcgcgatcccggcccactgcaacctctgtctcccgggtttaagtgattctcccgcctcagcctcctgtgcagccgggaccacaggcgcgcgccaccacacccagctaatttctatacctttagaaatggggtttcaccatgttggccaggagggtctcgatctcccgacctcgtgatccacccatctcagcctcccgaagtgctgggattacaggcgtaagccactgagcccggctcaaaatctatttcttaatctggttggggaacagtatgaatgctctggttgagaatcctgggcccaggccagccttggtcctctggctttcaatgcttgcagatgagaaaatctgctgncaatggttttttttttttctcctttggcaaagggttaatttattctgggggaggcccttgagaatttatctggggatttcaagaatgtccccagganaatgccaagggggggctttttntttaagnaacccttgcttggactttaccaaactttactgggcaaacn

SEQ ID NO: 7073 - DNA, 554 bp, Homo sapiens
  misc_feature (477)..(477): "n" may be a, t, c, g, other or unknown
  misc_feature (536)..(536): "n" may be a, t, c, g, other or unknown
  misc_feature (554)..(554): "n" may be a, t, c, g, other or unknown
aagtaaagacggggtttcactgtgtcggccaggctggtctcgacctcctgatctcaaatgatccgcccgcctcggctttctgaagtgctgggattacaggagtgaaccgttgtgcctggtacaactgttatcttctttaagaaatgatgggaggccttttttccaggtatcatagtcaatatcagcacccagtttaatgtaccaacagggatttctggaccaaaatgactctttatgctttgtcacatcttgagtgagcatgatcatagactccatggagcacatttacaactgggaacacaaagtctgttcacttttcccaggcctgggccattacctgaagattaggacacccaatgatacattctactttaattttacacttcagacttctaggagtcttgcatctgttttccagcagccacaaaagacattctctaattacttctgaatgaaaaacagagacttttaatttcntgcaaagacatgcatgcactacatacactttaagaccctggggtggctcaatttctggnaaaactggacttttcctn

SEQ ID NO: 7074 - DNA, 530 bp, Homo sapiens
  misc_feature (420)..(420): "n" may be a, t, c, g, other or unknown
  misc_feature (440)..(440): "n" may be a, t, c, g, other or unknown
  misc_feature (444)..(444): "n" may be a, t, c, g, other or unknown
  misc_feature (454)..(454): "n" may be a, t, c, g, other or unknown
  misc_feature (463)..(463): "n" may be a, t, c, g, other or unknown
  misc_feature (476)..(476): "n" may be a, t, c, g, other or unknown
  misc_feature (524)..(524): "n" may be a, t, c, g, other or unknown
  misc_feature (527)..(527): "n" may be a, t, c, g, other or unknown
aattttctttctagagatagggtctcattctgttgcccaggctgaagtgtaatgacgcatcacagctcactgcagtctcaaactcctgggctcaagcgatcatcctgtttcagcttcctgggtagctggaaccacaggtacgcaccaccacacctggcggggtttttgtttttgtagagatggggtctcactacgttgcctagggtggtctctgatctttcaagtgctcagtagctgcaatgaggcgattgaacctggcctcctatctggtctccctgtctccaatctctagtttttgataaattgacaagtctgaggatgtgctgctgccttgagaagggggtgctctctctcaagaaagtcagatggcagagccagcataagttgtcaaggcagagggccacaatcctggtgaccttntcaagtggggggctgcctgnctgnggttctgagnccccactangggatccccattnccttgggttgacccgttttttgccttttttaaaccggggtccctggcntgncct

SEQ ID NO: 7075 - DNA, 254 bp, Homo sapiens
  misc_feature (247)..(248): "n" may be a, t, c, g, other or unknown
  misc_feature (250)..(254): "n" may be a, t, c, g, other or unknown
gcattttacatttcttctgtctttattgtattgcttcaattggcaaatcatgcttgtattcattcatggggtacaatgtggaatgaggaaatcccactacttagcatctccactacctcagagagaccaattccacgtgaggtcccagaagtgttgatctaaacaagttgaccccatagaagtagcaagtagatcgatggtgaccaggggtcagagagtggcagagggaggggaatgggaggggggnngnnnnn

SEQ ID NO: 7076 - DNA, 533 bp, Homo sapiens
  misc_feature (3)..(3): "n" may be a, t, c, g, other or unknown
  misc_feature (17)..(17): "n" may be a, t, c, g, other or unknown
  misc_feature (40)..(40): "n" may be a, t, c, g, other or unknown
  misc_feature (85)..(85): "n" may be a, t, c, g, other or unknown
  misc_feature (99)..(99): "n" may be a, t, c, g, other or unknown
  misc_feature (108)..(108): "n" may be a, t, c, g, other or unknown
  misc_feature (157)..(157): "n" may be a, t, c, g, other or unknown
  misc_feature (168)..(168): "n" may be a, t, c, g, other or unknown
  misc_feature (248)..(248): "n" may be a, t, c, g, other or unknown
  misc_feature (289)..(289): "n" may be a, t, c, g, other or unknown
  misc_feature (367)..(367): "n" may be a, t, c, g, other or unknown
  misc_feature (376)..(376): "n" may be a, t, c, g, other or unknown
  misc_feature (392)..(392): "n" may be a, t, c, g, other or unknown
  misc_feature (406)..(406): "n" may be a, t, c, g, other or unknown
  misc_feature (424)..(424): "n" may be a, t, c, g, other or unknown
  misc_feature (437)..(437): "n" may be a, t, c, g, other or unknown
  misc_feature (459)..(459): "n" may be a, t, c, g, other or unknown
  misc_feature (501)..(501): "n" may be a, t, c, g, other or unknown
  misc_feature (503)..(503): "n" may be a, t, c, g, other or unknown
  misc_feature (522)..(522): "n" may be a, t, c, g, other or unknown
  misc_feature (530)..(530): "n" may be a, t, c, g, other or unknown
  misc_feature (532)..(532): "n" may be a, t, c, g, other or unknown
ganacagggcctcactntgtcacctaggctggagttcagnggtacgatctcagctcactgcaacctccaccttccaggctcaagngatcctcctgcctnagcctccanagaagctgggactacaggtacacgccaccataccagctaatttttttgnaatttttgtanaggcggggttttgccatgttgcccaggctggtcttgaactgctgagctcaagcaatccaccccccttggcctcccaaagngttgggattataggcatgagccatggcacccagcctatttngcatacttctttactgattcattaagtcgcagtctaattagcattacagattatgagtaataactttattatctaggnctctactgngtagcacctcctctgntacattggtacttncttaagggcattcttctntgaccaccccatntaagctggaactccttgctggnggatcctaggcctataccctaaaatcagattttttacataancnggtttttaagggaaggggntggaaacnant

SEQ ID NO: 7077 - DNA, 549 bp, Homo sapiens
  misc_feature (409)..(409): "n" may be a, t, c, g, other or unknown
  misc_feature (438)..(438): "n" may be a, t, c, g, other or unknown
  misc_feature (457)..(457): "n" may be a, t, c, g, other or unknown
  misc_feature (459)..(459): "n" may be a, t, c, g, other or unknown
  misc_feature (462)..(462): "n" may be a, t, c, g, other or unknown
  misc_feature (464)..(464): "n" may be a, t, c, g, other or unknown
  misc_feature (481)..(481): "n" may be a, t, c, g, other or unknown
  misc_feature (536)..(536): "n" may be a, t, c, g, other or unknown
  misc_feature (540)..(540): "n" may be a, t, c, g, other or unknown
aaactgagacagggtctcactctgtcactcaggctgcagtacagtggcatgatctcagctcactgcagcctctgcctcccgggctcaagtgatcctcccacttcagcctgccaagtagctgggacttcggggcatgccaccacgcttggctaattttttgtatttttggtggagatggagtttcaccatgttgcccaggctggtctcgaactcccgagctcaagtgatccgcccaccttggcctctcaagtgctgggattataggtgtgagctaccgcacccagccaagagtcaatctgtgatccctaagattcttattgcctagtaaagatgaaagatgaaaaagagataacaatgaaaacatgagggcatggcagagtaaaataggaagaaaagtccagaatatggnattacagaggcagggattagaaatatttncctgataagtgggtttcancngangnagtattaacaagctaangggcttttgaaaaatctgggcatttttggctgtaccaagatttgcaggttcaaangganttttggggg

SEQ ID NO: 7078 - DNA, 560 bp, Homo sapiens
  misc_feature (474)..(474): "n" may be a, t, c, g, other or unknown
  misc_feature (498)..(498): "n" may be a, t, c, g, other or unknown
  misc_feature (503)..(503): "n" may be a, t, c, g, other or unknown
  misc_feature (519)..(519): "n" may be a, t, c, g, other or unknown
  misc_feature (540)..(540): "n" may be a, t, c, g, other or unknown
  misc_feature (560)..(560): "n" may be a, t, c, g, other or unknown
cctgttggggacgaggggaggggaaggaaacaggactgttccaaaccgatgaaacaccgtgcaggcggggagggccaagcccttcttagggagtttcagtctggaagatgctcagcctgggagatgccggccaggaagcctgggaaattcctcccctctgcaggccccaccccgtgctaatcctggctccacctcacctccgcccagcttctcctggactcacatgacttttctatattggtgcccaggggcttaaggcagatgagtcttaagcgggcatcacagacagaccggacacctgtgcagtctggaagaacttctcagctctcagccacgggaaggcgatcactcagcctaaggtgttcccaagaggcagaactgccctaaggggccttgcagataagaatggccccagaagtcggtgaaggaacgcacatgggtgatgcaaacatgatatctgactcttgctggcancaagctgtgctgacattttttacncctgnttcttggaacttgaanggcctaaaagccttgcccttnggccttccttaaaaatcctn

SEQ ID NO: 7079 - DNA, 383 bp, Homo sapiens
  misc_feature (315)..(315): "n" may be a, t, c, g, other or unknown
  misc_feature (320)..(320): "n" may be a, t, c, g, other or unknown
  misc_feature (325)..(325): "n" may be a, t, c, g, other or unknown
  misc_feature (357)..(358): "n" may be a, t, c, g, other or unknown
  misc_feature (368)..(368): "n" may be a, t, c, g, other or unknown
  misc_feature (374)..(374): "n" may be a, t, c, g, other or unknown
caccagaaaggcttactttatgatatgctaacagaacagaaaagcaggttgggacaagatacagactttgttgcatttagctatgacccttctctcccctctgtggatgtgggcagggtggggagaggcaggaagaggcagtagagggaaatgacatttgcactcaggcttcccgcccctacccacccctacccttcgcccaaacagacgtcggatctatgctgcaccaggggtgggtcatggagtccagctaattgccaggagctgaggcgtgtacaagccatgaaaagagctgccccacggcctccccacatnactgnccttnatgcacttgcatctttaaggctgccagcttannagctccctgnacattncctggccaa

SEQ ID NO: 7080 - DNA, 520 bp, Homo sapiens
  misc_feature (3)..(3): "n" may be a, t, c, g, other or unknown
  misc_feature (17)..(17): "n" may be a, t, c, g, other or unknown
  misc_feature (37)..(37): "n" may be a, t, c, g, other or unknown
  misc_feature (77)..(77): "n" may be a, t, c, g, other or unknown
  misc_feature (106)..(106): "n" may be a, t, c, g, other or unknown
  misc_feature (108)..(108): "n" may be a, t, c, g, other or unknown
  misc_feature (164)..(164): "n" may be a, t, c, g, other or unknown
  misc_feature (177)..(177): "n" may be a, t, c, g, other or unknown
  misc_feature (179)..(179): "n" may be a, t, c, g, other or unknown
  misc_feature (209)..(209): "n" may be a, t, c, g, other or unknown
  misc_feature (226)..(226): "n" may be a, t, c, g, other or unknown
  misc_feature (242)..(242): "n" may be a, t, c, g, other or unknown
  misc_feature (255)..(255): "n" may be a, t, c, g, other or unknown
  misc_feature (282)..(282): "n" may be a, t, c, g, other or unknown
  misc_feature (295)..(295): "n" may be a, t, c, g, other or unknown
  misc_feature (329)..(329): "n" may be a, t, c, g, other or unknown
  misc_feature (424)..(424): "n" may be a, t, c, g, other or unknown
  misc_feature (438)..(438): "n" may be a, t, c, g, other or unknown
  misc_feature (468)..(468): "n" may be a, t, c, g, other or unknown
  misc_feature (496)..(496): "n" may be a, t, c, g, other or unknown
  misc_feature (501)..(501): "n" may be a, t, c, g, other or unknown
  misc_feature (505)..(505): "n" may be a, t, c, g, other or unknown
  misc_feature (510)..(510): "n" may be a, t, c, g, other or unknown
ganacggagtctcgctntgtcgcccaggccggactgnggactgcagtggcgcaatctcggctcactgcaagctccgnttcccgggttcacgccattctcccgcctnancctcccgagtagctgggactacaggcgcccgccaccgcgcccggctaattttttgnatttttttagtananacggggtttcaccttgttagccaggatggnctcaatctcctgacctnacgatccacccgcctnggcctcccaaagngctgggattacaggcgtgagccaccgngcccggcctatgnttttaatttaagttggacttcacttttctctggngtctcctaaattagcttaataatcaatcttctgacttcttttcctggcaattcatagacttcatcttggtttgcatccattgctggtgagctggnatattttggggggnggtaaaaaaccctggtttggcatattaccngaatgggttttcgggtctttctcaattngggangctnttcanagggaaaact

SEQ ID NO: 7081 - DNA, 567 bp, Homo sapiens
  misc_feature (500)..(500): "n" may be a, t, c, g, other or unknown
  misc_feature (503)..(503): "n" may be a, t, c, g, other or unknown
  misc_feature (523)..(523): "n" may be a, t, c, g, other or unknown
  misc_feature (527)..(527): "n" may be a, t, c, g, other or unknown
  misc_feature (535)..(535): "n" may be a, t, c, g, other or unknown
  misc_feature (544)..(544): "n" may be a, t, c, g, other or unknown
  misc_feature (556)..(556): "n" may be a, t, c, g, other or unknown
gagtctccctccatctcccaggctggagtgcatggcatgatctcagctcactgcaacctctgcctcccaggttcaagtgattcttctgcctcagcctcctgggtagctgggattacaggtgtgtgccaccatgcctggttaatttttgtatttttataagagatgggatccagctgatggggaagcggctcactcagggcagtgcactctactcagtggaaggagaaaacccctcagagggatagatgagaatcctgaagcctgaagtggcagggactggtagcaagggcaggagatgaaggattttaaggtgaaagctgtgcctgttccctgcacatggaatggctggctgcagtgaggcaggccacatgttggtcagagatagtaggttgccaaagcaacaaccatgaagaagtcatggctcagtagaatagtggaatcctttctttacttcctatggacaaccaacacttcaacaagacagactggctaaaacattncanaagagacttaaagaggtgcngacntaaaacanttggtggcnaaagcaagggcnctgggacaagg

SEQ ID NO: 7082 - DNA, 568 bp, Homo sapiens
  misc_feature (438)..(438): "n" may be a, t, c, g, other or unknown
  misc_feature (458)..(458): "n" may be a, t, c, g, other or unknown
  misc_feature (490)..(490): "n" may be a, t, c, g, other or unknown
  misc_feature (516)..(516): "n" may be a, t, c, g, other or unknown
  misc_feature (564)..(564): "n" may be a, t, c, g, other or unknown
  misc_feature (567)..(567): "n" may be a, t, c, g, other or unknown
aaggcagtattgagtaggaagtttacattggagtctctccctcaagagttaggtcttcataggtactgaacacttacaccaatcacctccattactcagctcctaagcagagatggaagcctcctaggtggaatgttgaatttgattttgaattctctcttcaacattttcagcataaaattcttttccactcctagataatatgccttttctatcttctcttctctgtaaaacacttggctttgagatcctgagaggtcttacttagttgtgggtctttgattatctcaggttttctgggcatcttgttaaatgaagattctggtccaacaggtctggggtggggcctaaaattatgcatttctgacaagtccccaggggaagtctatggggctggcctagggtccacactcggaataggaaggtctaaagaaatcngcattgtaaaaggaaaaatnaacattttgaggcttaatggcagcagcattgngggctgataatacctggcagacaaantatctcagcatcaattcttggtcctaggagttgaagcccccaagttgnttnc

SEQ ID NO: 7083 - DNA, 570 bp, Homo sapiens
  misc_feature (471)..(471): "n" may be a, t, c, g, other or unknown
  misc_feature (491)..(491): "n" may be a, t, c, g, other or unknown
  misc_feature (531)..(531): "n" may be a, t, c, g, other or unknown
  misc_feature (545)..(545): "n" may be a, t, c, g, other or unknown
  misc_feature (554)..(554): "n" may be a, t, c, g, other or unknown
  misc_feature (563)..(563): "n" may be a, t, c, g, other or unknown
  misc_feature (569)..(569): "n" may be a, t, c, g, other or unknown
gcctagctccaagtaggccctgaactgaggaaacaatttggcctttacattcccttggactctccgtgtcagaatggagtgcccttgcctcccgtaaactcttcagcctactaccccatcaggcgtgtagccagatatcctcatgtagctaaatccatggacatcattctgttacatcttaagcatctcttaggtccgctagaaacagtggactgctgcctccttcctgtcttggtttctataggactgcattctcttgatttctattattcctgctaccccatctcagtttcctttgctccttgtcgcttctgtactgatctctcaacacaggagattcccaagggctcagaactagcccttctctctcttccattctctccctcgatgatatcgccatttccatggttttaaataccatctgcatgttgatttccacatccataactccagtctacatggcttctctgnccaccatattcacatatctnaccattgcttggacatctaaactcagcatggtctaaactnaacacttacaatgntctaaaccnggtctctgnttttgna

SEQ ID NO: 7084 - DNA, 578 bp, Homo sapiens
  misc_feature (512)..(512): "n" may be a, t, c, g, other or unknown
  misc_feature (531)..(531): "n" may be a, t, c, g, other or unknown
  misc_feature (560)..(560): "n" may be a, t, c, g, other or unknown
gacagggtcttgctctgtcacccgagctgaaatgcagcagtggtaacatggttcactgcagcctcaacctcctgggatcaagtggtcctcccacctcagcctcccgagtagctgggactagagacatgcatcaccatgcccagttagttttttaattttttgtagagacagggtctcactttgtggcccagcctggtcttgaactcctgggctcaagccatccttctgccttggactcccaaagtgttgggattacaggtgtgggccactgtgtccttccttaacataataaaattgagataatcacattcataaaagggcaaaactatgtcaacaagcccactgtattagtctgtcttcacagtgctgtaaagaactgcccaagactgggtaatttataaaggaaacaggttaactgactcacagtttaacatggctgggaaggcctcaggaaacttaacaatcatggcagaaggcaaaaggggaaacaagggaccttcttcataaggcanatgaaggaaaattaatgcnggagggacttccaaccccttaaaaccctnagaacttgggaactcgct

SEQ ID NO: 7085 - DNA, 563 bp, Homo sapiens
  misc_feature (490)..(490): "n" may be a, t, c, g, other or unknown
  misc_feature (524)..(524): "n" may be a, t, c, g, other or unknown
  misc_feature (532)..(532): "n" may be a, t, c, g, other or unknown
  misc_feature (535)..(535): "n" may be a, t, c, g, other or unknown
  misc_feature (542)..(542): "n" may be a, t, c, g, other or unknown
  misc_feature (557)..(557): "n" may be a, t, c, g, other or unknown
  misc_feature (561)..(561): "n" may be a, t, c, g, other or unknown
actaatggctggttttaatttttttagaggaaatactataatttaaaaaaaagttccaaaatatttaacagaatttccagcaatgattatttccaaaatgtaaagatttgaaacataatttatacaaaactaaaaaccagaaggattcattcttgctttttccttttttaaaaaatccagacatttgtcacaagaaagttcggcatgtgatagcagctgtagcctcagtcaccctcagaatcgctgtccctcctcatgaggacagagtgccacactgatgacagcaatacatcttcaatcggcttcttagggttttcctccaggtccatcataattgctccagattcagacagtttccattccaactcatctcttgtcaggttcatgccaccaaacaccagaggaccaataaactgagccttgatatctccttccaggtaaacaaatatcggggcagattcctatcaggataattgggtatgcaggttgntgaaatggctttgataaattgacatcagggaacnttctgggnagnccctggnggtctgaattattanggcnca

SEQ ID NO: 7086 - DNA, 485 bp, Homo sapiens
  misc_feature (442)..(442): "n" may be a, t, c, g, other or unknown
  misc_feature (456)..(456): "n" may be a, t, c, g, other or unknown
  misc_feature (462)..(462): "n" may be a, t, c, g, other or unknown
  misc_feature (464)..(464): "n" may be a, t, c, g, other or unknown
  misc_feature (476)..(477): "n" may be a, t, c, g, other or unknown
  misc_feature (479)..(479): "n" may be a, t, c, g, other or unknown
cctgagatagagtctggctctgtcgccaaggctggagtgcagtggtgtgatctcggctcactgcaatctctgcctcctgggttcaagcaattctcctgcctcagcctcccaaggagctgggactacaggcatgcaccgccctgcctggctaatttttttgtatttttttttagtagaaacggagtttcaccgtgttgcccaggctggtctggaactcctgagctcaggcaatccacccgccttggcctcccaaagtgctaagattacagttgtgagccactgcacctggccaaatactcggtattcttgaaagcattctattagtacaaggcatttttactttcttccaccctgctggctactccctcagagacggagagtccctcaaagtcctcccacttctccctatccttccctgtcctagaagcacgaaacctacctntccgggctgccctngccctngngaacactgactnntntgacaa

SEQ ID NO: 7087 - DNA, 396 bp, Homo sapiens
  misc_feature (333)..(333): "n" may be a, t, c, g, other or unknown
  misc_feature (347)..(347): "n" may be a, t, c, g, other or unknown
  misc_feature (361)..(361): "n" may be a, t, c, g, other or unknown
  misc_feature (364)..(364): "n" may be a, t, c, g, other or unknown
  misc_feature (370)..(370): "n" may be a, t, c, g, other or unknown
  misc_feature (386)..(386): "n" may be a, t, c, g, other or unknown
  misc_feature (394)..(394): "n" may be a, t, c, g, other or unknown
cttttctgagacggagttttgctcttgtcacccaggctggagtgtaatggtgcgatctcggctcactgcaacccccgcctcctgggttcaagtgattctcctgcctcagcctcccgagtagctggaataacaggcacccgccactatgcccggctaattttttgtatttttggtagagacggggtttcaccatgttggtcaggctggtcttgaactcctgacctcgtgatctgcctgccttggcctcccaaagtgctgggattacaggtgtgagccactgcgcccagccatgctgctatcttttttttttttttttttttttttttttttganacggagtcttgctntgtcacccaggctngantgcagnggcccaatcttggctnactacaanct

SEQ ID NO: 7088 - DNA, 580 bp, Homo sapiens
  misc_feature (326)..(326): "n" may be a, t, c, g, other or unknown
  misc_feature (393)..(393): "n" may be a, t, c, g, other or unknown
  misc_feature (414)..(414): "n" may be a, t, c, g, other or unknown
  misc_feature (476)..(476): "n" may be a, t, c, g, other or unknown
  misc_feature (512)..(512): "n" may be a, t, c, g, other or unknown
  misc_feature (515)..(515): "n" may be a, t, c, g, other or unknown
  misc_feature (538)..(538): "n" may be a, t, c, g, other or unknown
  misc_feature (558)..(558): "n" may be a, t, c, g, other or unknown
  misc_feature (579)..(579): "n" may be a, t, c, g, other or unknown
ctttttctgagacagagtcttgctctgttgcccaggctggagggcagtggcgtgttcttggctcactgcagcctccacttgctgggttcacacgattctcacacctcagcttcccatatagctgggattacaggcatgtgccactatgcctggctgatttttgtatttttggtagagacagggttttaccatgttggccaagctggtctcaaactcctggcctcaattaatctgcctgtcttggcctcccaaagtgctgggattataggtgtaagccactgtgcccagccattgggctgtttttaaaataaggggcactcatgcanagtttctgtgctcagcaataatagcaactgctaatacttggacaggccttttgcatcatcttattanaaggggtccaactataattgncaggtgagctaataatctatacagtatttgcaagtacaaattcacaatgatcaatgatctgnttctctaaagacaggccaaaaactaattaatggttnctntatacctaaaggcaatgggaaanggcttaagtaaagggtgaangggaaaaggcccgacaaaacna

SEQ ID NO: 7089 - DNA, 569 bp, Homo sapiens
  misc_feature (238)..(238): "n" may be a, t, c, g, other or unknown
  misc_feature (366)..(366): "n" may be a, t, c, g, other or unknown
  misc_feature (445)..(445): "n" may be a, t, c, g, other or unknown
  misc_feature (465)..(465): "n" may be a, t, c, g, other or unknown
  misc_feature (515)..(515): "n" may be a, t, c, g, other or unknown
  misc_feature (549)..(549): "n" may be a, t, c, g, other or unknown
  misc_feature (569)..(569): "n" may be a, t, c, g, other or unknown
gagacggagtctcactctgttgcccaggctggaatgcagtggcacaatcttggctcactgcaacctctgcctcccaggtaaaagcgattctcctgcctcagcctcccgagtagctgggactacaggtgcccgccaccacacctggctaatttttgtatttttagtagagacggggtttcaccgtattggccaggctggtctcaaattcctgaccttgtgttctgcccaccttggcctntcaaagtgctgggattacaggtgtgagccaccgtgcccggcctttttttttttttcttttgagatggagtttcgctcctgttgcccccgctggagtacaatggcacgattttggctcactgcaacctntacctcccagagtcaagcgattcttctgcctcagccacccaagtagctgggattacaggcatgcaccaccacgcccggntaatctggatttttaggtanaaacaggggttcaccatgttggtcaagctgggcttcgaacttctggactnaactgaaccgctggcttaaacttccataagggtnggattccaggggtgaacctn

SEQ ID NO: 7090 - DNA, 577 bp, Homo sapiens
  misc_feature (521)..(521): "n" may be a, t, c, g, other or unknown
  misc_feature (525)..(525): "n" may be a, t, c, g, other or unknown
  misc_feature (539)..(539): "n" may be a, t, c, g, other or unknown
  misc_feature (547)..(547): "n" may be a, t, c, g, other or unknown
  misc_feature (553)..(553): "n" may be a, t, c, g, other or unknown
  misc_feature (564)..(564): "n" may be a, t, c, g, other or unknown
  misc_feature (573)..(573): "n" may be a, t, c, g, other or unknown
aatggtacaagaaggaaatttatttttcacagaacaaaaatgacaattttgactcaggtacccacataggagcaggtgaagttctcaaaggacaactttttttgttgttgtttttttggtaagcaaatgaaaaccaagacatatttttctgctcttttatttatattgatgaaacctcaaagtctgtactcaaatacttattaaaatatatccatacatatatgatttcttgtcaaaatgcatcattcttcttcaaatacaaaaacaaaaatattttcactttcctaaaaccatcactttttcttagatcacacttttatctttcttctgagtatagccctggaaaagcagtttgaatgcaaagccccttgacaaaatatctgctttttaaaaatgttaatttaatacacaagaaaaaaaaaagcctctgggagaagaggataaagaagttaggatttctaactcctaggctaaaaaacagcatatcagaaagccattcaatttcctttcaatgctggatnaagncttcattttaatcntcattatnaatggnggaccttaatncctaactgntttt

SEQ ID NO: 7091 - DNA, 575 bp, Homo sapiens
  misc_feature (501)..(501): "n" may be a, t, c, g, other or unknown
  misc_feature (515)..(515): "n" may be a, t, c, g, other or unknown
  misc_feature (531)..(531): "n" may be a, t, c, g, other or unknown
gagatggagtctcgctctgtcgcccaggctggagtgcagtggcgccatctcagctcactgcaagctccgcctcccaggttcacaccattctcctgcctcagcctcccaagtagctgggactacgggtgcccaccaccatgcccagctaattttttttgtatttttagtagagacggggtttcactctgtcagccaggatgatctcgatctcctgacctcatgatccgcccgctcggcctcccaaagtgctgggattacaggcgtgagccaccatgcccagctcccaggtgcttctaacttatatgaccagcccaacactgtcctaggaacaaaccagtgacctaattagctaacatgaaccaaactgataatacttgcccagctaaatgaagtgatgggtggatatgtaataatcatacatctatcaagactaagtttggtaacttaacaaatctcagcaatcccttactccctttataacagaagtgcgcagaatcaacntttctaagagagtntctaagggaaatggtnaaggggacaactggatttaagcttttcctggcagaaaagcttaa

SEQ ID NO: 7092 - DNA, 561 bp, Homo sapiens
  misc_feature (427)..(427): "n" may be a, t, c, g, other or unknown
  misc_feature (429)..(429): "n" may be a, t, c, g, other or unknown
  misc_feature (432)..(432): "n" may be a, t, c, g, other or unknown
  misc_feature (505)..(505): "n" may be a, t, c, g, other or unknown
  misc_feature (537)..(537): "n" may be a, t, c, g, other or unknown
  misc_feature (560)..(560): "n" may be a, t, c, g, other or unknown
gagatggagtctcactttgtcacccaggctggagtgcagtggcacgatctcggctgactgcaagctcagcctcctgggtttacgccattctcctgcctcagcctcctgagtagctgggactacaggtgcccgccactgcgcctggctaatttttttgtattttttagtagagacggggtttcactgtggtctcgatctcctgacctcatgatccacccgccttggcctcccaaagtgctggggttacaggcatgggccaccacgcccagctggtcttgaacttgagctcaagtgatccacctgccttaatctcccaaagtgctgggattaccagcatgagccactgtgcccaaccagtttggcactgttttcctaagaattttttaaccaatgttcataagcaatattggtcaagttggtttcttgnantgnctttgctgaccctagcatcaaaggcaatgcttggctcatagaacgaagttagaaaggaatttcctcctctttnaagtttttgaaagaagttgcaaaggatggcantaaattttcggttaaaggctggna

SEQ ID NO: 7093 - DNA, 563 bp, Homo sapiens
  misc_feature (528)..(528): "n" may be a, t, c, g, other or unknown
  misc_feature (534)..(534): "n" may be a, t, c, g, other or unknown
  misc_feature (542)..(542): "n" may be a, t, c, g, other or unknown
  misc_feature (546)..(546): "n" may be a, t, c, g, other or unknown
  misc_feature (561)..(561): "n" may be a, t, c, g, other or unknown
ctttgagacggagtctcactctgtcacccaggctggagtgcagtggtatgatctcggctcactacaagctccacctcctgggcccacaccattttcctgcctcagcctcccgagtagccgggaccacaggtgcccgccaccaggcccggctaatttttttttgtatttttagtggagacggggcttcaccgtattagccaggatggtctccatctcctgacctcgtgatccgcgcgcctgagcctcccaaagtgctgggatcacaggcgtgagccaccacgtgtggccatacctatgagttttcttaaaaccaaattgtcaaaaatgtggggcctaccaggtgttagcctccatcccataacatcgtggctcaggtcaccctcagaaggagacacagggagtcctaagtgtattctgggagtgacctctgtggcagaccaagggacacagctatggccgggacaccaacagcttctgctataatctcccaattttttttatttaagtgcaattatttttatttaagtnccattntaaaactntaangggaacattttagangg

SEQ ID NO: 7094 - DNA, 559 bp, Homo sapiens
  misc_feature (453)..(453): "n" may be a, t, c, g, other or unknown
  misc_feature (505)..(505): "n" may be a, t, c, g, other or unknown
  misc_feature (512)..(512): "n" may be a, t, c, g, other or unknown
  misc_feature (547)..(547): "n" may be a, t, c, g, other or unknown
gtctgtcttattttagagaaccaatctttaagttctgggattcgttccaatatgttgggttagagcgtactcctttagctcagtgaagtttgctactacccaccttctgaagcctacttctgtcaattcatccatctcaacctccacccaggactgtgcccttgctgtagaggtgttgtgatcatttggagtaaacaagtcactctggccttttgagttgttaggggtttttcattcctttctcatcttcatgagtttgtctcattttgatctttgaggctgctgacctttagatgaggttttcgtggggactttttggttgatgttgttgttgctttctgtttttctttcgacagtcaggtacctcttctgtagggctgctgtggtttgctggggattcacttcaagccctatttatctgggtccctcccacacctgaagatgtcaccaganggtgctggagaacagcaaagatgggaccccactccttccttgggatctctgnccttgangggcacccacctgatgccagtagaaatgctcctgnataagggggctg

SEQ ID NO: 7095 - DNA, 550 bp, Homo sapiens
  misc_feature (422)..(422): "n" may be a, t, c, g, other or unknown
  misc_feature (492)..(492): "n" may be a, t, c, g, other or unknown
  misc_feature (510)..(510): "n" may be a, t, c, g, other or unknown
  misc_feature (516)..(516): "n" may be a, t, c, g, other or unknown
  misc_feature (519)..(519): "n" may be a, t, c, g, other or unknown
  misc_feature (529)..(529): "n" may be a, t, c, g, other or unknown
  misc_feature (533)..(533): "n" may be a, t, c, g, other or unknown
  misc_feature (538)..(538): "n" may be a, t, c, g, other or unknown
gagatggagtctcgctgtcatccaggctggagtgcagtggcgtgatctcagctcactgtagcctccacctcatgggctcaggtgatccttccacctcagcctcccaagtagctgggactacaggcgtgtgcctccatgcccagatgatttttgttattttttgtagagacaggatcttgtcatgttgcccaggttggtctcgaatcctgggctcaagtgatccacccgccttggcctcccaaagtgtgggattacaggtgtgagccactgcacctggcctgctctttatttttaatgagagagacttgagtatttgggacaggggagcaatgaaggaaactgcaacccaggagggacccgcccaaatgaagtgaggtctcagtgtggcaggatgtagggctttgggtgtgtggtgggtgcangctggtactctttccctatggagaaacacttctaccctaaccctttgggtcgcaactgactggctttggnaaggcctggatgaaccancactgntgnctttccaacnatgngctgngtgaacttcaac

SEQ ID NO: 7096 - DNA, 560 bp, Homo sapiens
  misc_feature (430)..(430): "n" may be a, t, c, g, other or unknown
  misc_feature (521)..(521): "n" may be a, t, c, g, other or unknown
gagagggagtctcatgtctcattctgtcccccaggctggagtgcagtgacgcaatcttggctcactgcaacctccgcctcctgggttcacaccattctcctgcctcagcctcctgagtagttgggaccacaggtgcctgctgccatgcctggctaattttttgtatttttagtagagacggggtttcaccatgttagccaggatggtctctatctgctgacctcgtgatctgcccacctcggcctccccaagtgccaccgtgcctggcctctagaaaaggttctttaaacaatagcaagtgagcgaagtgaaagtcaggagacgtgttccagtcccatctttgctgctcacttgttgtgagactttggtctctaacttctctaggccttggtttcctcagctaggaaataagacagttgggttgattcanaggttttaagcccatgctttggtagataaatagagtattttgagtaactttaaaagtgagcagccctctctaagtttgactcttctacctnaccatatcaaacttaccacttatccatgacccttgattt

SEQ ID NO: 7097 - DNA, 500 bp, Homo sapiens
  misc_feature (479)..(485): "n" may be a, t, c, g, other or unknown
gtagagatggggtttccctatgttgcccaggctggtctagaactcctgagctcagaggatcctcccacctcagcctcccaaagggctgggattataggcatgacccactgaactccgccctccgccactttttctttcttgaaactgggtcttgttctgttgcccaagctggagtgcagtgttataatcacagctcactgcagcctcaacctcctgggctcaagctgtccttccacttcagcctcccaagtagctgggcctacaggcatgtagccaccaaacctggctaatttttttattttttattttgtagagataaggtctcactatgttgcctaagctgatcttgaactcctgggctcaagaaatcctcctgccttggccttgaaaatgttggggttacaggtgtgagccactgtgcctagcctcacctactttttctaaatgatttaagataatcattttaccaaaaaaaaaannnnnnnaaaaaaactacccac

SEQ ID NO: 7098 - DNA, 559 bp, Homo sapiens
  misc_feature (438)..(438): "n" may be a, t, c, g, other or unknown
  misc_feature (461)..(461): "n" may be a, t, c, g, other or unknown
  misc_feature (464)..(464): "n" may be a, t, c, g, other or unknown
  misc_feature (522)..(522): "n" may be a, t, c, g, other or unknown
  misc_feature (525)..(525): "n" may be a, t, c, g, other or unknown
cgagacagagtctcactctgtcacctaggctggagtgcagtggcacgatctcggctcattgcaacctccgcctcctgggttcaagcaattctttcacctcagcctcccgagcagctgggattacaggcgcacggcaccacgccgagctaattttgtatttttagtagagatggggtttcaccatgttggccaggctggtctcaaaactgctgaccttgtgatctgcccacctcagcctcccaaagtgctgggattacaggtatgagccaccgctcccagccagatccttctaatgaataaatttttagaagcttaaaccaagtcaggctggtttctgttctaagttttggagcctcgttacatagcaaatggtaattgaaataatcaacccaagcctagcagctcatgcctgtagtctcagcacttcaggaggctgangcaggagaatcgctttaacctangangccaaggctatagtgagccatgactggaccactggtacttccaagccttgggcaccanaancagaacctggctcaaaaaagaaagagaaaaaacc

SEQ ID NO: 7099 - DNA, 432 bp, Homo sapiens
  misc_feature (160)..(160): "n" may be a, t, c, g, other or unknown
  misc_feature (389)..(389): "n" may be a, t, c, g, other or unknown
  misc_feature (400)..(400): "n" may be a, t, c, g, other or unknown
  misc_feature (406)..(406): "n" may be a, t, c, g, other or unknown
  misc_feature (414)..(414): "n" may be a, t, c, g, other or unknown
  misc_feature (416)..(416): "n" may be a, t, c, g, other or unknown
  misc_feature (421)..(421): "n" may be a, t, c, g, other or unknown
  misc_feature (430)..(430): "n" may be a, t, c, g, other or unknown
agaatgaagttttttttttaattatttttcttggaagtagggaggatttgaaagcttgaaaatcaagaatcaaaagacagtgaatctagaaggcatctgggagcagaacagagattgaagacgggtgggcacaggagaaagcgccaccatcgatcccggntgctgccctggaaatgtgattttcttaatagctgagttcatggttgcttgaggtcaggcctggctattcatttccagcgatgtctgaccagagaggactcatcattgacgacctcagggtcacgggggcgacgctgacaccggaacggcagcagcagcaggacgattaagacaaggaggatggctccacagacgctcatgagcgcataggacacaatccacaaaatggnctcgctcaaanactgancggggacncngttgntggctacancc

SEQ ID NO: 7100 - DNA, 554 bp, Homo sapiens
  misc_feature (458)..(458): "n" may be a, t, c, g, other or unknown
  misc_feature (498)..(498): "n" may be a, t, c, g, other or unknown
  misc_feature (551)..(551): "n" may be a, t, c, g, other or unknown
gtgacggagtctcactctgtcgcccaggctggagtgcagtggtgccatcttgtctcaactgcaacctccgcttccccagttcaagtgattctcctgcctcagcctcctaaatagctgggattacaggcatcgccaccatgcccagttaatttttgtatttttagtagagatggagtttcaccatgttggccaggctggtctcgaactcctgacctcaagtgacccacctgcctcagcctcccaaagtgctgggattacagtcgtgagccaccgcacctggctctttcatcttttatggtgaggaaaaagcagtgaaatagaagtcaatggcctcaaagttgagtatcagcaccagtatttaccaaatatgcaaccttagacaagtcacttagcctcagttttctctcttctaaaaggggactagtaacagcaacaatattctgaggatcatataaggnaataaatatgaaaagtgttctacgaactttaaactggcgntcaaaacaaagctatgtcatttcatcatcccataatgatctcaacagactttntac

SEQ ID NO: 7101 - DNA, 556 bp, Homo sapiens
  misc_feature (453)..(453): "n" may be a, t, c, g, other or unknown
  misc_feature (493)..(493): "n" may be a, t, c, g, other or unknown
  misc_feature (502)..(502): "n" may be a, t, c, g, other or unknown
  misc_feature (528)..(528): "n" may be a, t, c, g, other or unknown
  misc_feature (530)..(530): "n" may be a, t, c, g, other or unknown
ccaagtaatagaacaggtatttttgtcccctgctaagtggagcaaacgctggatctctccatttgtgtcagtgtgcagactcccattccccactgctttcccaagctcctcggaaccactgtcatgcttgctgcttatcagcgccctccaaacccagaatgtccactcagtgcatttgggcaagtcccaaagactccaggagaaaaagcatcttatcaccaccataagagcgcagtgagcatttgacggctcaccagcctatagcaggattttttttgtttttgttgttgttgctgttgttgttttgtttttgagatgtagtttcgctcttttttgcccaggctagagtgcaatggtgcaatctccgctcactgcaacctccgcctcctgggtttaagcaattctcctgccttaaccttccgagtagctgggattacaggcacacgccaccgnattcagctaatttggattttaggagagacagaagtttcancatgttggncagctggtctggactcctggacctangngatccacccatttgggcttccaaagg

SEQ ID NO: 7102 - DNA, 555 bp, Homo sapiens
  misc_feature (532)..(532): "n" may be a, t, c, g, other or unknown
ctcttccaaagcttattttaataggaagtctttatgcatggcatatgtcaagattaatggtacatggaacacattttgtatcctatccatgagtcacacgggaaatcaccttccaggcctttctctgtgaggtctccctgtccactgtgccctgatcaaccctccaccccttcactgtctttacttccctcatttcccttaagcagacaaaagtccaggtctctggtccacagcttcagacatgacaaggaagaggcccagtatcaaggtgaagctgaggaaggccaagggaaagccaggccaagaggcacccgttggtgatggtcacaggagagaggtgatcagtggagccagggactgggccatcctgctatagatcacactgctgagttttggttgtatttgttttagaagcagccatcattcaccgagggggagagaggaaagggaagagaggggaagagaagaatggggagggatatttacccgtgtgaacaaaggccagcccaaggcttaaagccgcacccctganaggcttcacctgttggggaaaac

SEQ ID NO: 7103 - DNA, 564 bp, Homo sapiens
  misc_feature (481)..(482): "n" may be a, t, c, g, other or unknown
  misc_feature (531)..(531): "n" may be a, t, c, g, other or unknown
  misc_feature (539)..(539): "n" may be a, t, c, g, other or unknown
  misc_feature (547)..(547): "n" may be a, t, c, g, other or unknown
  misc_feature (557)..(557): "n" may be a, t, c, g, other or unknown
  misc_feature (559)..(559): "n" may be a, t, c, g, other or unknown
gagacggagttttgctcttgttacccaggctggagtgcagccttgttacccaggctggagtactcggctcaccgcaacctccgcctcccaggttcaagcgattctcctgcctcagcctccctagtagctgggattacaggcatgtgccaccacacccagctaattttgtatttttagtagagacggggtttctccatgttggtcaggctggtctcaaactcctgacctcatgtgatccacccgcctcggcttcccaaagtgctgggattgcaggcgtgagccaccgcgcccggcctgtttaatttcctaatgtttactgagactcttcaagagtgggagagggatataatatacagcatttcctcagtttatttagccactgaatttattttttgtaagcatctcaaggaacttgagcccaaattttgcaaaactgcatgtaatatacaatgttgctttggttgccttttccagcttctgnnagagaatatttaaattattttatcttacttataaacatttttaaattgngatattgngaacctgnattggcccangncatta

SEQ ID NO: 7104 - DNA, 560 bp, Homo sapiens
  misc_feature (441)..(441): "n" may be a, t, c, g, other or unknown
  misc_feature (458)..(458): "n" may be a, t, c, g, other or unknown
  misc_feature (545)..(545): "n" may be a, t, c, g, other or unknown
  misc_feature (551)..(551): "n" may be a, t, c, g, other or unknown
  misc_feature (559)..(559): "n" may be a, t, c, g, other or unknown
gagacagagtctttgctctgtcgcccaggctggagtgcagtggtgcgatctcggctcactgcaagctccacctcccaggttcacgccattctcctgcctcagcctcccgagtagctgggactacaggcaccggccaccacacccagctaattttttgtattttttagtagagacagggtttcaccgtgttagccaggatggtctcgatctcctgaccttgtgatctgctgcctcggcctcacaaagtgctgggattacaggcgtgagccaccgtgcccggcccataatctggttttgtaccagtcttcaaaaccttccagctacactggccacactatattttcaaattaatctttcactgctctagctctatggccatcttcttcctctggaccatttaatcatgaatccagaaaatcctacccagagaaggcagaaaanagaggacaagaagtctncattcttttgggtccatcacctgatgggcccatctgaatttctgggggaacaaggatctgagcgggtccttggaaagcaatacccantggganccaaaacnt

SEQ ID NO: 7105 - DNA, 559 bp, Homo sapiens; identical to SEQ ID NO: 5807
  misc_feature (1)..(559): "n" may be a, t, c, g, other or unknown

SEQ ID NO: 7106 - DNA, 563 bp, Homo sapiens
  misc_feature (465)..(465): "n" may be a, t, c, g, other or unknown
  misc_feature (479)..(479): "n" may be a, t, c, g, other or unknown
  misc_feature (484)..(484): "n" may be a, t, c, g, other or unknown
  misc_feature (488)..(488): "n" may be a, t, c, g, other or unknown
  misc_feature (505)..(505): "n" may be a, t, c, g, other or unknown
  misc_feature (515)..(515): "n" may be a, t, c, g, other or unknown
  misc_feature (552)..(552): "n" may be a, t, c, g, other or unknown
gttttttgttttttttttttgagacagagtctcgctcagtcacccaggctggagtgcagtggtgcgatctcagctcactgcaggctctgcctcccaggttcacaccattctcctgcctcagcctccccagtagctgggactacaggtgcccaccaccacgcccggctaatttttttgtatttttagtagagacggggtttcaccgtgttagccaggatggtctcgatctcctgacctcatgatcctcccgcctcagcctcccaaagtgctgggattacaggctcgagccaccgcgcctggcctagcagacatttttaaacacccaatatgggtattgttgtgggggataaaaagacgtacaaaatatagtcctcagctttaagaagtctatagttttgtcaagaggatttgggaattctgaaaacagttctgtggcttctagaaagacatttttcccataaactnctctgggctcttgngccanccgnactcatcttcatagagnaagtgagttncccgaacttaacttttaaaaaaggaaccgatttggangggttcttggg

SEQ ID NO: 7107 - DNA, 534 bp, Homo sapiens
  misc_feature (6)..(6): "n" may be a, t, c, g, other or unknown
  misc_feature (16)..(16): "n" may be a, t, c, g, other or unknown
  misc_feature (19)..(19): "n" may be a, t, c, g, other or unknown
  misc_feature (47)..(47): "n" may be a, t, c, g, other or unknown
  misc_feature (81)..(81): "n" may be a, t, c, g, other or unknown
  misc_feature (100)..(100): "n" may be a, t, c, g, other or unknown
  misc_feature (118)..(118): "n" may be a, t, c, g, other or unknown
  misc_feature (137)..(137): "n" may be a, t, c, g, other or unknown
  misc_feature (144)..(144): "n" may be a, t, c, g, other or unknown
  misc_feature (152)..(152): "n" may be a, t, c, g, other or unknown
  misc_feature (211)..(211): "n" may be a, t, c, g, other or unknown
  misc_feature (229)..(229): "n" may be a, t, c, g, other or unknown
  misc_feature (236)..(236): "n" may be a, t, c, g, other or unknown
  misc_feature (246)..(246): "n" may be a, t, c, g, other or unknown
  misc_feature (250)..(250): "n" may be a, t, c, g, other or unknown
  misc_feature (280)..(280): "n" may be a, t, c, g, other or unknown
  misc_feature (285)..(285): "n" may be a, t, c, g, other or unknown
  misc_feature (312)..(312): "n" may be a, t, c, g, other or unknown
  misc_feature (378)..(378): "n" may be a, t, c, g, other or unknown
  misc_feature (427)..(427): "n" may be a, t, c, g, other or unknown
  misc_feature (444)..(444): "n" may be a, t, c, g, other or unknown
  misc_feature (474)..(474): "n" may be a, t, c, g, other or unknown
  misc_feature (499)..(499): "n" may be a, t, c, g, other or unknown
  misc_feature (510)..(510): "n" may be a, t, c, g, other or unknown
  misc_feature (520)..(520): "n" may be a, t, c, g, other or unknown
ccaaanggtaaatctntgngtattcatgcctaatcttccaaggttgngtaaataatttttttctaccatcccccatcattngcatacatttttgtcaagnccaaacataatttgaagngaggtaggtagtttctctntacttgngccgttgnccttggggtgatgtcggggcctgtgccctgaacgcacttgtctcctgtgcaggggcagngccagggctggcatcagnggctggnggagcttctnagtnggctattttctcaatctcgtccaaatcatntgggnccaatctttctatcttcttattaaaangctcctggattctgttcaggatgttcatgctgtgcttgctgtccaccatgttcactgccaggcccnttttgccaaagcggccgtgcgcccgaccggtgcaggtaggtctcattgncaggattcccggccttnccacgggaagaacaaagttgatgaccaccngaccttggtcaaacattaatgccgngggcacccccnttgggggganccaaaacctttttt

SEQ ID NO: 7108 - DNA, 556 bp, Homo sapiens
  misc_feature (513)..(513): "n" may be a, t, c, g, other or unknown
  misc_feature (515)..(515): "n" may be a, t, c, g, other or unknown
  misc_feature (523)..(523): "n" may be a, t, c, g, other or unknown
  misc_feature (526)..(526): "n" may be a, t, c, g, other or unknown
  misc_feature (542)..(542): "n" may be a, t, c, g, other or unknown
  misc_feature (547)..(547): "n" may be a, t, c, g, other or unknown
  misc_feature (550)..(550): "n" may be a, t, c, g, other or unknown
ggtggtagagagacggggtctcaccgttgtctaggctggagtgtagtggcttaattacagctcactgcagcctcaacctcctgggctcaagtgattctcccacctcagcctcccaagtagctgggactacaggtgcatgccaccacacctggctagtttttgtatttttttggagagacaaagttttgccacattgcccaggctggtcttaaactcctggactcaagtgatccacccacctcggcctcccaaagtactgggaatacaggcatgagccaccatacctggcctagaactacttttcacaacagtatcatggaaaggaatagctctctcactctctcaatatatgtattatgtatataaaacaatgaacatgcctatcagattgaacaaaacacagatctgaaggtgctatttctacattttgaaggttatccaaaagtataaattaaaaaaaaggagaatggcaagtggtttaacgcattggtcataaatactgggacagaaacncnccagtcancangttaattgcctggganttaanccncccttt

SEQ ID NO: 7109 - DNA, 556 bp, Homo sapiens
  misc_feature (385)..(385): "n" may be a, t, c, g, other or unknown
  misc_feature (437)..(437): "n" may be a, t, c, g, other or unknown
  misc_feature (478)..(478): "n" may be a, t, c, g, other or unknown
  misc_feature (498)..(498): "n" may be a, t, c, g, other or unknown
  misc_feature (507)..(507): "n" may be a, t, c, g, other or unknown
  misc_feature (525)..(525): "n" may be a, t, c, g, other or unknown
  misc_feature (537)..(537): "n" may be a, t, c, g, other or unknown
  misc_feature (546)..(546): "n" may be a, t, c, g, other or unknown
atgtgttgaaatggtttaatacacaacaatagataactgctatatttgctgagaaggttctgagcaacctctataactgtagcaggaacaggcttaagagaccatttttactaacccctccctttatgatggaggcagctcctccccaaggtcccacttacagagtgagacctttgtctacttctgtttggcatgtgctggccatgtgcaaacccacaattatattggccaatggcaaacagaattgggaaaccaaccatttccaataaaataaggtttcatttcaaaccagatacacccattttggggattaccaattgctttggagtttctaaatcacttctcccatctgcatacatgggcaacagggctaacttaccacctnccagtgaaaaataaaaagataaccaaaccctggacctctgttgccctccctntcccgtgcctgggttcctcatccttgcatttcttggctggngctatccttgggaagccagncaccagtcnatggctctattggctggnaattgctttggntatattggnaccttgaaag

SEQ ID NO: 7110 - DNA, 555 bp, Homo sapiens
  misc_feature (471)..(471): "n" may be a, t, c, g, other or unknown
  misc_feature (514)..(514): "n" may be a, t, c, g, other or unknown
  misc_feature (527)..(527): "n" may be a, t, c, g, other or unknown
  misc_feature (541)..(541): "n" may be a, t, c, g, other or unknown
gagatagtctccctttgttgcccaggctggagtgcagtggcacgatctcagctcactgcaacctctgcctcctaggtttaagcgattctattcttgtgtctcagacacctgactacctggcactgcaggtatatagcaccatgcccaactaatttttctatttttagtagagactggtttcaccatgttggccaggctgatattgaacctctgagctcacgtgatctgtctgccttggcctcccaaagtgctgggattacaggtgtgagccaccgcacctggccaaatggtaggttttttaaaagctcatattaaaatatttctttccatgtcaccacatgggcttgacagcaataatttaaaattggtgtataatattctattagattgatacattatttacctcgctatttattagatatttttatttgctttaaactgtttttcacaagtatcaacaattatgaatgncttcatttatatataccttttaactttctggcctatttccttnaaattcatacccngaaacaccccccanttaaaaaaaggggt

SEQ ID NO: 7111 - DNA, 558 bp, Homo sapiens
  misc_feature (498)..(498): "n" may be a, t, c, g, other or unknown
  misc_feature (511)..(511): "n" may be a, t, c, g, other or unknown
  misc_feature (531)..(531): "n" may be a, t, c, g, other or unknown
  misc_feature (555)..(555): "n" may be a, t, c, g, other or unknown
  misc_feature (558)..(558): "n" may be a, t, c, g, other or unknown
cttcttctgttttggtctgtagtgatctttgtctctcttctctcttctttccttatctttttcttttctcttacctgcccagagtggatgggttcaattaaactgttcatgtcatgactctggaagtcctgataagcttattggactataagaggggatcttcattagcagtgctgagaaatcccaactcctgataccaaatgctgttgagcttttgtcttccaatttcacttttttttctgttttcgatattcctgctgctgctggagctcctcttccatcagctattgctttggaagaaggatttggaagcatctgtgtatcctctttttctgccctgggacattcattacggtaagaggaatctgaggctaccggtgctgtaacttctgaaccacgacttaagtcaagagggagacagggtcccagcttctcaagtggcaaatgtgcaacatcaggcataagttttatttatcactgaagaagaaagctgagatncaagcggcaaaancttgacttggattaaatctngggaaaatggggaattaagggggnttn

SEQ ID NO: 7112 - DNA, 549 bp, Homo sapiens
  misc_feature (487)..(487): "n" may be a, t, c, g, other or unknown
  misc_feature (496)..(496): "n" may be a, t, c, g, other or unknown
  misc_feature (501)..(501): "n" may be a, t, c, g, other or unknown
  misc_feature (531)..(531): "n" may be a, t, c, g, other or unknown
  misc_feature (548)..(548): "n" may be a, t, c, g, other or unknown
ctaattctgtgaggaatgccaatggtatggtaatggcaatagcattgaatctataaattgctttgggcaatgtggccattttcatgatattgattcttcctgtccatgagcatggaatgtttttccgtttgtttgtgtcctctcttatttccttgagcagtggtttgtaattctccttgaggaggtcctttgtgtcccttgttagctgtattcctgggtattttattctctgtttggcagttgtgaatgggagttcattcatgatttggctctttgcttgtctgttgttggtgtataggaatgcttgtgatttctgcacattgattttgtatcctgagactttgctgaagttgcttatcagcttaagaagcttttgggctgagtcgatgggttttctagatacaggatcatgtcatctgcaaacagggataagtttgacttcctctcttttatttgaatccctttattctttctcttgcctgaatgncctggccanacttncaacactatgtgaataaaatggtgaaaaanggcaaccttgcttgggnc

SEQ ID NO: 7113 - DNA, 539 bp, Homo sapiens
  misc_feature (464)..(464): "n" may be a, t, c, g, other or unknown
  misc_feature (487)..(487): "n" may be a, t, c, g, other or unknown
  misc_feature (489)..(489): "n" may be a, t, c, g, other or unknown
  misc_feature (495)..(495): "n" may be a, t, c, g, other or unknown
  misc_feature (512)..(512): "n" may be a, t, c, g, other or unknown
  misc_feature (514)..(514): "n" may be a, t, c, g, other or unknown
  misc_feature (519)..(519): "n" may be a, t, c, g, other or unknown
ggtgttcaactactctgcagaatgtctctacctttgtttctgatctgagatgtcagtgcttttttttgttgctactaatgttatgcacataaggtttgtaacttcttagcccaagccaaagttctatggcagctttggtggacagttctcatatggtttgaggtctttctacctcaagttcctgagtttctctgcctgaatctcttctctggccagagaagcatgttcagcctgagtatgggatgggctggagtgccagggaggtaattctccaagtaaaaccctcaagcaacaaagggcagtaattgggagacagacatcccagtttccttgatcctgcatgggacaattctaaggtgtgtttcatgggctctgagagggtcccagcaggactgagtgcagttgcccacaggagtaactttttcaataatatccttccttattgacttttctcatccttatgncttacctggccctaaatttccangncaattnccaaatgaaatacttgnancccangcccttttttaagtcgggat

SEQ ID NO: 7114 - DNA, 563 bp, Homo sapiens
  misc_feature (493)..(493): "n" may be a, t, c, g, other or unknown
  misc_feature (503)..(503): "n" may be a, t, c, g, other or unknown
  misc_feature (509)..(509): "n" may be a, t, c, g, other or unknown
  misc_feature (528)..(528): "n" may be a, t, c, g, other or unknown
  misc_feature (542)..(542): "n" may be a, t, c, g, other or unknown
gcggaggaaacgaggttgagggtgtgagtggctctggagatgcaccccagtctcaaaataaaattaaaaagaaaaatttctgttcaatctttgaaaaaaaaaaaggaaaaggacatgtaatacaccgttcaataaatagaaaaaaagttacaaaatgatgtggtattttgtccttaatatacaagaagggaaaagatgtgggggtgacttgggggggtgatgttctcccttctcctccctgggtcaaggtgggggaaaggaaggatggccaaagagagagggcggcagggacttaggtgcagagagaaaggcaggtaagtgccgggaaaaatggaaacagagtaagatgaaggggcgaagcagaaagacaggaggcgaaagggtgaaaaagccagaaaaacaccaagatacaggtctctttcctttccagatcgggggtgggggtctccggctctctcgcgtctgtgtcccccaaccccagttggaagggcantgtgaacctngctcanttcctgagtggacgtcaangactagcaggtganaaaaaggccaccgaggacttc

SEQ ID NO: 7115 - DNA, 561 bp, Homo sapiens
  misc_feature (374)..(374): "n" may be a, t, c, g, other or unknown
  misc_feature (389)..(389): "n" may be a, t, c, g, other or unknown
  misc_feature (452)..(452): "n" may be a, t, c, g, other or unknown
  misc_feature (470)..(470): "n" may be a, t, c, g, other or unknown
  misc_feature (478)..(478): "n" may be a, t, c, g, other or unknown
  misc_feature (483)..(483): "n" may be a, t, c, g, other or unknown
  misc_feature (534)..(534): "n" may be a, t, c, g, other or unknown
  misc_feature (558)..(559): "n" may be a, t, c, g, other or unknown
gagacagagtttcgctcttgttgcccaggctggagtacaatggcgcaatatcagctcaccgcaacctctgcctcctgggttcaagcaattctcctgcctcagcctcctgactagctgggattacaggcatgcaccaccacacctggccaattttgtatttttagtagagatggggtttctccatgttggccaggttggtctcaaactcccaacctcaggcaatccacccacctcggcctcccaaaatgctaggattacaggtgtgaggtgttatttctgagggctctgttctgttccattggtctattacatatggctagccagttttcccagcaccatttattaaatagggaatccttttcccaagttattgnttttgccaggtttgncaaagatcagatggttgtaggtgtgtggtggtatttctgagggctctggtctggtccattggnctattacatatggctagncagttttnccaanaccatttattaatagggaatccttttcccaagtatggttttgcaaggttgncaaagatcaaatggttgaaggggnngg

SEQ ID NO: 7116 - DNA, 470 bp, Homo sapiens
  misc_feature (212)..(212): "n" may be a, t, c, g, other or unknown
  misc_feature (304)..(304): "n" may be a, t, c, g, other or unknown
  misc_feature (324)..(324): "n" may be a, t, c, g, other or unknown
  misc_feature (337)..(337): "n" may be a, t, c, g, other or unknown
  misc_feature (353)..(353): "n" may be a, t, c, g, other or unknown
  misc_feature (373)..(373): "n" may be a, t, c, g, other or unknown
  misc_feature (385)..(385): "n" may be a, t, c, g, other or unknown
  misc_feature (422)..(422): "n" may be a, t, c, g, other or unknown
  misc_feature (437)..(437): "n" may be a, t, c, g, other or unknown
  misc_feature (444)..(444): "n" may be a, t, c, g, other or unknown
  misc_feature (455)..(455): "n" may be a, t, c, g, other or unknown
  misc_feature (467)..(467): "n" may be a, t, c, g, other or unknown
gtaaagaagaatgaaaacactttttttttttttttttgcgatggagtccactctgttgcccaggctggagtgcagtgtcacagtcctggctcactccaacccctgcctcccagtttcaagcgattctcttgcctcagcctcccaagtagctgggactacaggtacacaccaccatgcccggctaatttttttgtatgagaacacttttttgnactattttggaaagaaccactagatgtactattaaaagaaaaatgcatatacacctactatgtacccacaacacttaaaatttaaaattaanaaaaagaaaaatgcaaagtnccaaacagtatgnataatatgctatctgntaattaaaatgctaaaagangaagaaacagtnggacagcaagaatcacacattctagcaaaaccccatntctacaaaaaatacnaaaatanctgggcataanggcacacacctnttg

SEQ ID NO: 7117 - DNA, 573 bp, Homo sapiens
  misc_feature (502)..(502): "n" may be a, t, c, g, other or unknown
  misc_feature (534)..(534): "n" may be a, t, c, g, other or unknown
  misc_feature (569)..(569): "n" may be a, t, c, g, other or unknown
  misc_feature (573)..(573): "n" may be a, t, c, g, other or unknown
gtttttttaaagagatagggtctcactctgttgcccaggatgatctcaaactcctggcctcaagtgatcctcccatcttggcctcccacagtgctgggattacaggcatgagccactgcacctggcctgcctctaccttcccagccctgacagtttcacggtggcctgcaccctactcaaggctctgtgtgacagcaggacccaggcaagctgggggagctgcactcacctgtggccaggccctgcgtcgggaccccggccctaactgggggcacaggctgctgagggaatgtgtggcctggactacacagagcagagggaggctcccaaacgggcgtgcagggcagccctcggtgcggtggagggaccgaagtggatggggatgggaggaggcagctaccttggccctagaggtcagatatcaaacgaatggcctcagaatgccccggtcaagtcctggccccccaacttctttcacggaagcttcttcccaagggcctanctggcaatataattctgggaaaaggttacatntttagtgacggttggttatctggggcaatccgtcnttgn

SEQ ID NO: 7118 - DNA, 557 bp, Homo sapiens
  misc_feature (320)..(320): "n" may be a, t, c, g, other or unknown
  misc_feature (467)..(467): "n" may be a, t, c, g, other or unknown
  misc_feature (536)..(536): "n" may be a, t, c, g, other or unknown
  misc_feature (541)..(541): "n" may be a, t, c, g, other or unknown
agacaaggtctcattcttgttgcccaggctggagtgcagagtcacgatcacggctcactgcagcctcgacctccctgggctcaggtgatcctcccacctcagtctcctgagtagctaggactacagatgtgcaccaccacgctaatttttgtacttttttgtagagatggcattttgccatgttgcccaggctggtctccaactcctgggctcaagcaatcctccttccttggcctcccaaaatattgggattataggtgtgagtcaccgtgcctggccctctaaaagtccttttccttttttttttttttttttttggnggattcttgctctgtcacccaggcgggagtgcagtggcacaatcttggctgacttcaacctctgccttctgggttcaagcaattctcctgcctcagcctcccgagtaactggggttataggcatgagccaccttgccctggcatctntcagcttcaaaaagagatttaacaattaatcctcgactcttatcactaggaaacaaacaagggcatctnttctntttggctaaaggaaaa

SEQ ID NO: 7119 - DNA, 462 bp, Homo sapiens
  misc_feature (166)..(166): "n" may be a, t, c, g, other or unknown
  misc_feature (176)..(176): "n" may be a, t, c, g, other or unknown
  misc_feature (193)..(193): "n" may be a, t, c, g, other or unknown
  misc_feature (227)..(227): "n" may be a, t, c, g, other or unknown
  misc_feature (370)..(370): "n" may be a, t, c, g, other or unknown
  misc_feature (411)..(411): "n" may be a, t, c, g, other or unknown
  misc_feature (413)..(413): "n" may be a, t, c, g, other or unknown
  misc_feature (430)..(430): "n" may be a, t, c, g, other or unknown
  misc_feature (433)..(433): "n" may be a, t, c, g, other or unknown
  misc_feature (442)..(442): "n" may be a, t, c, g, other or unknown
  misc_feature (462)..(462): "n" may be a, t, c, g, other or unknown
gagacggagtctcgctctatcgcccaggctggagtgcagtggtgtgatctcggctgactgcaaactctgcctcccaggttcacaccattctcctgcctcagcctcccgagtagctgggactacaggtgcccgccaccacgcccggctaatttttttttttttttgnattttagtanagacggggtttcactgngttagccaggatggtcttgatctcctaacctcgngatccacctgcctcggcctcccaaagtactggaattacaggtgtgagccactgcgtccggcctgtatttttttatttctatttttttttgagaaagagtcttgctttgttgcccaggctggagtgcagtggcgagatctcggntcactgcaatctcagcttcctgggttcaaacgattctctgntnagcctcctgagaagtanctnggatcacanggggtccacaccatgcccan

SEQ ID NO: 7120 - DNA, 557 bp, Homo sapiens
  misc_feature (471)..(471): "n" may be a, t, c, g, other or unknown
  misc_feature (503)..(503): "n" may be a, t, c, g, other or unknown
  misc_feature (509)..(509): "n" may be a, t, c, g, other or unknown
  misc_feature (513)..(513): "n" may be a, t, c, g, other or unknown
  misc_feature (537)..(537): "n" may be a, t, c, g, other or unknown
  misc_feature (539)..(539): "n" may be a, t, c, g, other or unknown
  misc_feature (543)..(543): "n" may be a, t, c, g, other or unknown
gagacagaatctcgcactgttgcccaggctggaatgcagtagcgtgatcttggctcaccacagcctctgcctactgggttcgagcgattctcctgcctcattgggcactgaatttgtggatattcattatattattagtataagtaaaataaaaataagcaaaacagggtcatgcttggatcaatgaggatactatgttatgagccaaggaaaaactgaggagccagagacctcaagaagccaaacatacaatgtataaacaacaaaacagagtaagaagctattttaaaatacagtaaaacaaaagaggattggtttctcaaatgtaaaaccacacgctttctgagggccttgacctaaggacactagtagttacagaaagctttccatttctacccctagagtttcaatgaatcataaaaaataaatggtgggctatattttatttcttgcagcactcaaagaaaaaangcccaagtagaaaggttctctatggggtttcnaatctnaaanccttttaatctggaaataattacngntccnttcttaaggggtta

SEQ ID NO: 7121 - DNA, 452 bp, Homo sapiens
  misc_feature (439)..(445): "n" may be a, t, c, g, other or unknown
cctgagaacaatctgttcttatcccactcattttttaaatgattgttggccttttgcttaagagaaattttaaaacagctttttatttcttgtcttattaatgtttgttcattactaaagaaattttaaaatacaaagaaggggctgggagcggtggctcacgtctgtaatcccagcactttgggaggccgaggtgggaggatcacgaggtcaggagatcaagaccatcctggctaacatggtgaaaacccatctctactaaaaaaatatatatatataaaattagccgggcgtggtgatgggtgcctgtagtcccagctactcaggaggctgaggcaggagaatggtgtgaacccggaaggtggagcttgcagtgagctgagatcaggccactgcattccagcctgggcgacagagtgagactccgctcaaaaaaacnnnnnnnaaaaaaa

SEQ ID NO: 7122 - DNA, 563 bp, Homo sapiens
  misc_feature (461)..(461): "n" may be a, t, c, g, other or unknown
  misc_feature (527)..(527): "n" may be a, t, c, g, other or unknown
  misc_feature (531)..(531): "n" may be a, t, c, g, other or unknown
  misc_feature (539)..(539): "n" may be a, t, c, g, other or unknown
  misc_feature (550)..(550): "n" may be a, t, c, g, other or unknown
  misc_feature (562)..(562): "n" may be a, t, c, g, other or unknown
cttttgagacagagtttcgctcttgttgcccaggctggagtgcaatggcgcgatctcagctcaccaaaacctccacctcacggcttcaagcgattctcctgcctcagcctcccaagtagctgggattacaagcatgcgctaccatgtccagctaattttgtatttttagtagggatgatgtttctccatgttggtcaggctggtctcaaattcccgacctcaggtgatccacccgcctcagcctcccaaagtgctgggattacaggcgttagctaccgcactcagccatgaaatttttttatccacttcttaaccacctatatccagtgttatatggctttatatgattttatattcaaatcctaatgctatactgctttatattataattccaattcatttgctgagaattctctttccccataccccacatgaacattttattttcccatatgcactgncatacattacaaagtccattggcaaatacccaaattgaacagcagaatttggggaaggctgggatnaagnaaaatgcnttatctggttnaaagaagttttnt

SEQ ID NO: 7123 - DNA, 574 bp, Homo sapiens
  misc_feature (425)..(425): "n" may be a, t, c, g, other or unknown
  misc_feature (439)..(439): "n" may be a, t, c, g, other or unknown
  misc_feature (500)..(500): "n" may be a, t, c, g, other or unknown
  misc_feature (524)..(524): "n" may be a, t, c, g, other or unknown
  misc_feature (534)..(534): "n" may be a, t, c, g, other or unknown
  misc_feature (554)..(554): "n" may be a, t, c, g, other or unknown
  misc_feature (561)..(562): "n" may be a, t, c, g, other or unknown
  misc_feature (571)..(571): "n" may be a, t, c, g, other or unknown
gatgtagtcttgctctgtcacccaggctggagtgcagtggctcactgcaacctcccgcgtagctgggattacaggcgcccgccaccacgcctggctgatttgtgtatttttagtagagacagggtttcaccatgttggccaggctggtctcgaactcctgaccttgtaatccacccacctgagcctcccaaagtgctgggattacaggcatgagccaccgcacccggccccattagtaacctctttctgtttcaggatccaatccagggtagcacattgcatttagctgtgatcagatcatgaatctgtaatgcttatataggttccctaaatgtgtggttttcagcctcagactactcccctaatcctagacgcctgtcctctgcctagcccttatcaccaaaaaggggcccagggggcactgnggattatggtcagnaaacacctctagagggtgggccatgaacgcccctttgatcactaagtcctatgctcactgntcaatgccaccagaattttcttgnggggtaaggnaaaggtttagaaacccgacngaggtanncggttgtcnctt

SEQ ID NO: 7124 - DNA, 408 bp, Homo sapiens
  misc_feature (169)..(169): "n" may be a, t, c, g, other or unknown
  misc_feature (201)..(201): "n" may be a, t, c, g, other or unknown
  misc_feature (328)..(328): "n" may be a, t, c, g, other or unknown
  misc_feature (332)..(332): "n" may be a, t, c, g, other or unknown
  misc_feature (365)..(365): "n" may be a, t, c, g, other or unknown
  misc_feature (369)..(369): "n" may be a, t, c, g, other or unknown
  misc_feature (374)..(374): "n" may be a, t, c, g, other or unknown
  misc_feature (379)..(379): "n" may be a, t, c, g, other or unknown
  misc_feature (386)..(386): "n" may be a, t, c, g, other or unknown
cttttttttttttgagacagagactcactgttgcccaggctggagtgcagtggtgcaatctcagctgactgcaaactccgtctcccgggttcacgccattctcctgcctcagcctcccgagtagctgggactacaggcgcccgccaccacgcccggctaaattttttgnatttttttttagtagagacagggtttcaccgngttagccagaatggtctcgatctcctgacctcatgatccgcccgcctcagcctcccaaagtgctgggattacaggcgtgagccacgcacccggcctttttttttttttttttttttttttttttganacanagtcttgctctgttgcccaggctgaaatgcagnggcncaatntctgntcactgnaacatccacctcccgggttcaa

SEQ ID NO: 7125 - DNA, 505 bp, Homo sapiens
  misc_feature (432)..(432): "n" may be a, t, c, g, other or unknown
  misc_feature (434)..(434): "n" may be a, t, c, g, other or unknown
  misc_feature (437)..(437): "n" may be a, t, c, g, other or unknown
  misc_feature (449)..(449): "n" may be a, t, c, g, other or unknown
  misc_feature (456)..(456): "n" may be a, t, c, g, other or unknown
  misc_feature (468)..(468): "n" may be a, t, c, g, other or unknown
  misc_feature (489)..(489): "n" may be a, t, c, g, other or unknown
gcttggaaacacaaagtatttaataggatttgctgactgccataacatagaaactcaaaatacagtttcatggttcttttgccttgaagtaagcaaattcattcatttgttcattcattcattcatttattcaacacacatttactgagcacctaccacattccaggatctgtgcaaggttctggggataggaagatgaatagaaggacacagctcctgccctccaggagctcacaatctgatggaggaggtgacgttcttgggtggtgttccaagaaagaacagatcagaggagaggagacaggaaagagaaaaagtttcactttggacatgatgagtttgctgggcctgcagaacatccgagaggatgagtggggctggagctcaaatgcaagatcggggaatacagatttgagaatcatcagccctaangnggncattaaatgaanggtctgnctgagtcatgcnaaaactgtgtgcagaatgacntgagaatgaatcaagg

SEQ ID NO: 7126 - DNA, 557 bp, Homo sapiens
  misc_feature (498)..(498): "n" may be a, t, c, g, other or unknown
  misc_feature (500)..(500): "n" may be a, t, c, g, other or unknown
  misc_feature (533)..(533): "n" may be a, t, c, g, other or unknown
  misc_feature (557)..(557): "n" may be a, t, c, g, other or unknown
gagacagggtcttgttctgtagcccaggctggagtgtagtggcactctcacggctcactgcagcatcaacctcccgagctcaagccatcctcctgcctcctgaatagctgggactacagatatgtgccactgtgcccagctaattattactgttattatgtttagtagagacaaggtctcactatgttgcccagggtggtctggaagtcctgagctcaaatgatcctcccaccgcagcctcccaaagtgctgggattacaggcatgagccattacacgtggccaaccatcctttattatgctcttatatgttattattaactcacagttactgtgatcaagaagagctaaaatttacaatgggcttcctgtgggccaggtcctattcagagtggcccagagagaggcagtacctgcctggggccgcatggcgaataagcagaacagggatgggaaaacaagtgggtggcggaatcctggattccatgccttacccagntnttaaaacagcttatgtcctgggcctttactggngccaggcgcccggccaaccttttn

SEQ ID NO: 7127 - DNA, 568 bp, Homo sapiens
  misc_feature (455)..(455): "n" may be a, t, c, g, other or unknown
  misc_feature (481)..(481): "n" may be a, t, c, g, other or unknown
  misc_feature (505)..(505): "n" may be a, t, c, g, other or unknown
  misc_feature (513)..(514): "n" may be a, t, c, g, other or unknown
  misc_feature (547)..(548): "n" may be a, t, c, g, other or unknown
aaacaagttttattttgagaacattttaaaatacagaaaaagtacacagggtcataccatacccagctgctcagaattgacaattgttcattaccatttcttttttttaagttgaaacagggtctcattatgttgcccaggccggtcttgaactcctgggctcaagcaatctgcctgtctcggcctccaaaagtgctgggagtacaggcttgagccaccgcacctggcctattttatcattcttttccaacccttttctaccttggcttctccacaggctccagggaggtctagcttggctggtcaaaacggaggtgacattgacagaaagtgagtgattaaaggttgggtgtcagagtcggacagatctgggttttttttggagacagagtcttactctgtcgctcagctggaatgcagtgggcacgatctaggctcactgcaaccaccacctnctgggttcaagtgattctcctgcctnagccccctgagtagctgggatttncggtgtgnngccaccacgccaagttaattttgggattttggnnaaaaacggggttttgccctt

SEQ ID NO: 7128 - DNA, 566 bp, Homo sapiens
  misc_feature (468)..(468): "n" may be a, t, c, g, other or unknown
  misc_feature (488)..(488): "n" may be a, t, c, g, other or unknown
  misc_feature (495)..(495): "n" may be a, t, c, g, other or unknown
  misc_feature (535)..(535): "n" may be a, t, c, g, other or unknown
  misc_feature (540)..(540): "n" may be a, t, c, g, other or unknown
  misc_feature (547)..(547): "n" may be a, t, c, g, other or unknown
  misc_feature (558)..(558): "n" may be a, t, c, g, other or unknown
cgttcgtacaatgtttattgaatgtcaaatgtctgccaggcactgtgcaaaatcacataaaaatgaggtgggaggagtgcagtggacagggagcgccagcaggtcaggcaggagtacagacaggcaaagacacagacttcgaagccagagaccagcgccggagctgatgcctgcttgcctgcctgctgagggcgagaatgcacctgctgtgggggcctgacctcaccgcggacacccaccgcgggagcaccagccctcccccggtccccagggtatggaagccaggggcctttgtagccccacattgcccggagttggatacaaacatcccaagagctaggggtgcctttactggctggaaggtgaccgttccatttccccaacatgaactcagaaagcttcagccaggcgcaggaacatcccagggaaaagctggctgagggcttccctaatgcaggggtgtttctnctggcccctgtccaagcagncaccaanactggcaccaaatggttaaggaaaataggcaaagaaagcntttgncctttantttcttccttnccaggcat

SEQ ID NO: 7129 - DNA, 570 bp, Homo sapiens
  misc_feature (537)..(537): "n" may be a, t, c, g, other or unknown
attgagaaactgtttttcttacagaagtggcagtgtagaataaataacgcgagggacagagagtgtgaggtaccaagaggctaaagaagctgggaggtttgcctttaaaaggagacaaaaatcccagggaagctgcaagcggaagggagtggggtggcccggaggcggaggactcaacttacagaggtgaagtctgcaaagcccgaggcagaggccttagaaggtttagctgcagaggaggggacaaatgggtcttttccactaaacgggtccccaaacccctttttactttggaacgggtcgccgctgtcagccccgagtggctggagtggatcgggggcctcgggaaagtctgcggaaccaagctggcttacaggtgtacttttaccttggacatctggctgaagtcggcaaagccttcagcactattgaaggacccacttccgaagggatctaaggttccaaagggatctgatccttttgaggagaccctggaggatgaaaaagggatcactggattcaaagggtcgagcttcnaaggtaaggaagggttttcggaatggatcccag

SEQ ID NO: 7130 - DNA, 553 bp, Homo sapiens
  misc_feature (103)..(103): "n" may be a, t, c, g, other or unknown
  misc_feature (110)..(110): "n" may be a, t, c, g, other or unknown
  misc_feature (143)..(143): "n" may be a, t, c, g, other or unknown
  misc_feature (146)..(146): "n" may be a, t, c, g, other or unknown
  misc_feature (157)..(157): "n" may be a, t, c, g, other or unknown
  misc_feature (167)..(167): "n" may be a, t, c, g, other or unknown
  misc_feature (174)..(174): "n" may be a, t, c, g, other or unknown
  misc_feature (217)..(217): "n" may be a, t, c, g, other or unknown
  misc_feature (256)..(256): "n" may be a, t, c, g, other or unknown
  misc_feature (294)..(294): "n" may be a, t, c, g, other or unknown
  misc_feature (332)..(332): "n" may be a, t, c, g, other or unknown
  misc_feature (443)..(443): "n" may be a, t, c, g, other or unknown
  misc_feature (485)..(485): "n" may be a, t, c, g, other or unknown
  misc_feature (517)..(517): "n" may be a, t, c, g, other or unknown
  misc_feature (539)..(539): "n" may be a, t, c, g, other or unknown
acaaagaatcaactttattgaacattcagggtcagtttctcttcttgctcttgcctgtgaccttggctggtgtgaggactggagctgctgcctggtacagggnggagganatcttgttgatgtagtacagaccaaccatgganaanatgaagcaggnggtgacacanactcggnggatgaggccagatgcaaagagagccaacaggaggcacagganaactagggaggcaagaagaacaaggagggcaacggtcanaatggaaatactaggcatctgcacatggagtccagganaaatccggggctctctgaatcctggggaacctgcttanaagggtaagcgtgactacagcaggaggattctgattaccttaatgatacccagaacatggaggtaggaggttgagtgtggtggcttgcacctggaatcccagcacttcggnagggctgaggtgggcagatcactttgagcccaggagtttganaccagcctgaacaacaaagggagacccatctnttaaaaaaaaaaaaaaattgantttaaaaaaatttt

SEQ ID NO: 7131 - DNA, 569 bp, Homo sapiens
  misc_feature (543)..(543): "n" may be a, t, c, g, other or unknown
  misc_feature (545)..(545): "n" may be a, t, c, g, other or unknown
  misc_feature (568)..(568): "n" may be a, t, c, g, other or unknown
cttttcttttttttgagagagtcttgctgtcgcccaggctgaagagcagcagtggtgcgatctcagctcactgcaacctccaccacccgggttcaagccatcctgcctcagcctcccaaatagctgggattacaggcacacgccaccaggcccagctaatatatatatatatatacacacacacacatatatatataggagacagagtctcactgtcacccaggctggagtgcaatggtgagatctcggctcactgcaacctctgcctcccgggttcaagcgattcttctgcctcagcctcccaagtagctggaactacaggtgcacgtcaccataccagctaatttttgtagttttagtagagatggggtttcaccatactggccaggctggtcttggaactcctgacctcgtgatccacccgcctcggcctcccaaagtgctgggattacaggcgtgagccaccggcccagccaatttttggattttagtagagacaggttccgcatgttggccaggctagtctcaaacttctggacttangnggatccaccaccttgggcttccna

SEQ ID NO: 7132 - DNA, 571 bp, Homo sapiens
  misc_feature (518)..(518): "n" may be a, t, c, g, other or unknown
  misc_feature (521)..(521): "n" may be a, t, c, g, other or unknown
  misc_feature (534)..(534): "n" may be a, t, c, g, other or unknown
  misc_feature (570)..(570): "n" may be a, t, c, g, other or unknown
aactcacttaaaaatatcttctaattttcccttgtgagctcttctttaacctatgggttattcagaaatctcttacttaatttctgatggacatacatggagtgaaagagagaagtcaatggggactccaaagtttttgagtggagcaactggaaggatggcagtgcttttcagtgagtgggaaggaatgcaagcagagcagattttaatctctggaaatgtttgtgaaggctcgatattagttctatgtttgacagaattcatcagtgaagacaaaataacctcctgaggttattttggggcaagaacaggggtgcagttctggatctgttcagtggaaatgcccattaaaaagccatcaagatgtggaacaggcaactggatatggaaatattgagtctggggagcagtctaggttggtgtcttcagtgccgtatgtggtatttaatgtcacaggactgaatgagatgaccaaaggaatgaatagaagaagagaaagttatcatgagaagaagcanaanaaggggtcataangagactggttcatggtaactttttaaggaaattaana

SEQ ID NO: 7133 - DNA, 564 bp, Homo sapiens
  misc_feature (507)..(507): "n" may be a, t, c, g, other or unknown
  misc_feature (532)..(532): "n" may be a, t, c, g, other or unknown
  misc_feature (553)..(553): "n" may be a, t, c, g, other or unknown
gagaaagagtctcactctgtcacccaggctggagtgcagtggtatgatcttggttcactgcaacctccacctcccgagttcaagtgattctcctgcctcagcctccagagtaggtgggactacaggagtgcaccacacctggctatttttttttttttttttttgtatttttagtagagatagggtttctccatgttggtcaggctggtctcgaactcctttcctcaagtgattcacctgcctcagcctcccaaagtgctgggattacaggcatgagccaccgcacccagcctgctttcattgtattctattggtcaaaacaaatctcagggccagctcagatataaggagaaggaaggagactccacctcttgataggaaaaacagcaaagaatgtgtggctgtcttcaatcacagctattttaattccacagtaacagccttgcactggtctccctactttaatccttaatgccttatagtcaattccccacacagaagccagangagctttttaaggacactttaatgngaagaattttagaaggaaacnccccccccccc

SEQ ID NO: 7134 - DNA, 520 bp, Homo sapiens
  misc_feature (457)..(457): "n" may be a, t, c, g, other or unknown
  misc_feature (461)..(461): "n" may be a, t, c, g, other or unknown
  misc_feature (465)..(465): "n" may be a, t, c, g, other or unknown
  misc_feature (475)..(475): "n" may be a, t, c, g, other or unknown
  misc_feature (483)..(483): "n" may be a, t, c, g, other or unknown
  misc_feature (510)..(511): "n" may be a, t, c, g, other or unknown
aaagacatttttatacattttttagtagagatgcagtactgccatgttgcccaggctggtcttgaactcctgggctctagcaatcctcctgcttcagcctcccaaaggttatagagattacaagcatgagccaccatacttgcccattgattattttcctttaaactctgaagtcacgagaatgtgaagccctgagaaccggaactgtgaagaaaatgtattgtcactcatgtgaaccagaagtgaaggggtgtatgaagctttgtgatggacacaaagtgttgttgcccctcctgatgggactgcaaagctgggatgcaagttgaagccccatctggactccatgcccttcctgggtgaaagcactggagcagacatggagccagggcatgcttccttatgaatttcagtaactcgtactttcactccttcaagaaaacatgtgaggtgtttttgnttgnttgntggtttatgntttaaggntttttggtggtaatggtggtggtggtnntctttcttt

SEQ ID NO: 7135 - DNA, 567 bp, Homo sapiens
  misc_feature (512)..(512): "n" may be a, t, c, g, other or unknown
  misc_feature (522)..(522): "n" may be a, t, c, g, other or unknown
ctaaagtggagttctgacttgtgttgacgccatcacgcagagcctcctgttcctgcctggagccagctgtctgtcatttaggagtgtgaaatcaattgggcttcagagatgtaaaatccctaggggcaaaattaaaagtgacccagatccaagcccacgtggtcctgtcaggaacacgactctcacatggcaagtttcaaagatttagtttcaaaattcgggtttcttattttaaaaaatatgcagttgtttgacattagatctgacagacaaattatagcttcagcaataaaggcttttaagattagaaatgaaaagagaaattacttatatattaaaaaaagaaaaaacccacccaggcttgagtttggaggcatttgtaggcgcgtgcgtcactctttcttccctgcaaatataaggggctccatcagctgatgaggccgtaaatagagaagcgagttacatggaatttcgaggaaagaaccagtgtgctggcaacctttggaaatcanggtgatgganccggtcagttggttgcactggcttaaactgggggggtccccttgg

SEQ ID NO: 7136 - DNA, 560 bp, Homo sapiens
  misc_feature (522)..(522): "n" may be a, t, c, g, other or unknown
  misc_feature (525)..(525): "n" may be a, t, c, g, other or unknown
  misc_feature (535)..(535): "n" may be a, t, c, g, other or unknown
ctccattctgaaaatagcaggacatttacctcttaaataaacttagcatttagaggtaattctaaatttaacaagtgacagggttggtttcaaagaaaaaggtccatgctttgcttacaatggagtctgcagtgaggggagatgctgggatagccatttccatggctctgttatgcaagcacaaatttcatctcctagatggacttcctggttttctcttactgcagtaacactggccttcccttctctaattccttaccccagctgcggcatccctgtgttaactcaggatgccaagtggccctcagattacacttctccagatagctgaatgagtctgctttcactgtgactgggacctgaatgacctgcagtcagggcccagagttgggactctatactaccctgggctctggtctgtaggtttgtagtagccaccggtaataagccaagggctaggctcttgtttgagtttatggccccctggaattttcaggcatctcatgatcagcggaagggcanacngatggattcnacaggttggtttttaaatttccacc

SEQ ID NO: 7137 - DNA, 569 bp, Homo sapiens
  misc_feature (531)..(531): "n" may be a, t, c, g, other or unknown
  misc_feature (533)..(533): "n" may be a, t, c, g, other or unknown
  misc_feature (544)..(544): "n" may be a, t, c, g, other or unknown
  misc_feature (548)..(548): "n" may be a, t, c, g, other or unknown
  misc_feature (561)..(561): "n" may be a, t, c, g, other or unknown
ctttttggagtataagatccattcttatttaagtcattctttttttaatttcaatagtttttgtggcagaaatggtttttggttacatgaatgagttctttagtccattcagtcttaaagaattgtctgtgtttcctttttaaatcaatctgagcccttttgatagtatttattttccatgctcatattttttattctattttgcatttttttaacttggtgatttatgtgagtaccatcagactgttttaaataagtttcacagcttggaaattgccagaccacacagagtataaattgaaactgaaaatctatgagggagggcctgtggttaagaattcttagaaacgttttcctcaggcaagaacaggtcaagacgtatttgtcacctctctactgagaccacagtcctttgagtgtctcacgttactatggtatctctaacttaaatggacccaagaccctgctcctgctcccacaaggcagttgaaccccaatcctttggattaccaagaatctgcaggagccccnanggccacttgcncagncaattcctttccntttccagt

SEQ ID NO: 7138 - DNA, 555 bp, Homo sapiens
  misc_feature (551)..(551): "n" may be a, t, c, g, other or unknown
ctaacccaactttcagtttgtttctacagtacttacagtgagttgctgttgtatttcttctctgttcttttctctctatatatattcttaccctccttcctgcatgatgaatttgaccttctagattttttttttttggaacaatccagcctggttgtgacaaatggagaaagagagagaagatcttaattgtgatataattgacctttcacctttgttcactcccacttatttatttgtctttaatattgttatggttagttctttgttactgttaaatattccctgttggatttttctcttttgagacagatcttcccacgagggttgtatttagccaccagcttggtaagtctagggtcgagaggatggctctcatcagcagcagtaccattcaggtccagcagagggatcggatcgtgattcactgtgccctgggcgtcttccaggtctctacagggtggccttctgatgatctcggcctcctgattccttagactatttcgacatccttcctttggttttccaaccttacttttaagttggttccncagg

SEQ ID NO: 7139 - DNA, 559 bp, Homo sapiens
  misc_feature (529)..(529): "n" may be a, t, c, g, other or unknown
aatttatagtcaggtccttgttctgtgtggcccaggctggagtgcaatgcaatcatagctcaatgcagtcttggactctggggctcaagcaatcctcctgcttcggcctcccaagtagctaggactactgacaagtattaccactcctggctaatttttaatattttttttgtaaagacggggtctggctttgttgccctggctggtcgcgaattcccggactcaagcaacctttctgcctcggcctcccaaaatgctaggattataggcataagccactgtgcctgtccaaaactttatttttaatgacaaaacctattttcctatagctctgcttggaatgctgtatttatcctaagcaccagttttggccctagctggcctgtatacagctttaggtaggctcttgatctagttttgctataggcagggtagatctcagtatttcatattttccttgtggcagagacagtgttaacctttctctcatggatagcggattcattgagacagatttaactaagaactntgatgattatacccgaacttcaaatggatc

SEQ ID NO: 7140 - DNA, 564 bp, Homo sapiens
  misc_feature (546)..(546): "n" may be a, t, c, g, other or unknown
atcaaaagaacatcccccacttccctgaccagatacatccagaggggaggcaagtggagactggctgtctgtagggagtggagaaatggcaggtccagcttgggctggtgtcctcttcctcagaaagtgctgtgggtgaacccagagtctcagggagcagaagcccccctcgctggctttcttcacgcggggtcctcggcaagctgctctgcactgcggagaacgtgcgccttgtcctcagaagacgaggaagagcagggcctcatgccggggcagtacgatgttctccacagtgcgctccatggcgcgcacctgctccggggaggctgtcaggaacgccaggggcccgatgcgctgctccgcacaggagtggcagaggtagccccccttgttttccttcctgttgctataggtgatgggcagcttcttcatggtaaggacggtgtcaacagggatggcattgttgcactgtcccacgcagcagcgcaccacgcctgtttttaaaacgttgcttgcaacttttgcttgcaagaagtacttcccagnccaaggcaaaatgttttc

SEQ ID NO: 7141 - DNA, 567 bp, Homo sapiens
  misc_feature (525)..(525): "n" may be a, t, c, g, other or unknown
  misc_feature (559)..(559): "n" may be a, t, c, g, other or unknown
  misc_feature (566)..(566): "n" may be a, t, c, g, other or unknown
caggaggaatggacaatccaagtttatacagtgggctggaaaaagaaaacactgaaaagtctaaaagcacaaaataaacaaagctgggagggaagacagtaagagttatttgtttctaattcattctgaaacccaaggcttgtatttaccagtcctttctgctaaagtcatccagctactgaagaggagagcctggaagtaaagtctggaggaaaggtagttgactgataaactgtcctacaggtgacagtcaaggagagaagaggtagaggtttggtggttaatgaataagttcctgactagccagctcctcttcttctcttgacttagatcaaccaatgtagatgcgatgaaaatcattggcaccaaaagcagcattacacttgggacatttgcgctggcgggtgtcatagcgtgtcttcacacactcaaagcagaagacatgaaacacttagtaagaacagcatcctttttacgcatgttacagcacggacaggtcaaccgtgccttggaatccttaatctnttcatcagaatcttatacacttgggacattggcntgggttnt

SEQ ID NO: 7142 - DNA, 559 bp, Homo sapiens
  misc_feature (448)..(448): "n" may be a, t, c, g, other or unknown
  misc_feature (511)..(511): "n" may be a, t, c, g, other or unknown
  misc_feature (529)..(529): "n" may be a, t, c, g, other or unknown
  misc_feature (559)..(559): "n" may be a, t, c, g, other or unknown
ctttgagatggagtctcgctctgtcacccaggcttgagtgcagtggcgcaatctcagttcactgcaagctccgcctcctggattcatgccattctcctgcctcagcttcccaagtagctgggactataggcacccaccaccacgcccggctaattttttgtatttttagtagagatggggtttcaccatgttagccaggatggtcttgatctcctgacttcatgatccgcccacctcggcctcccaaagtgctgggattacaggcgtgagccaccgtgcccggctgagactattgggttttctagatatacaatcatgtcatctgcaaacagagaagacttcctctcttcctgtatgggtgccctttatttctctctcttgcatgactgctctggtaaggacttccagtactatgttgaattgaagtggtaagacaggacatccttgnctcatgccggttttcaagggtaatggttccagcttttggccattcaagttcaatggttgctgngggtttggcataaaaggntctaataatttgagggatggtccctcaaan

SEQ ID NO: 7143 - DNA, 542 bp, Homo sapiens
  misc_feature (63)..(63): "n" may be a, t, c, g, other or unknown
  misc_feature (175)..(175): "n" may be a, t, c, g, other or unknown
  misc_feature (450)..(450): "n" may be a, t, c, g, other or unknown
  misc_feature (468)..(468): "n" may be a, t, c, g, other or unknown
  misc_feature (488)..(488): "n" may be a, t, c, g, other or unknown
  misc_feature (530)..(530): "n" may be a, t, c, g, other or unknown
  misc_feature (532)..(533): "n" may be a, t, c, g, other or unknown
ggatttccttcctgtttatttccttggtgacttggtcatacaagcaaacatggcaaaaccctntcagaacccaaaagaacagcacacggatgaaccaaatgtgaggaaagcagctgtgatattttgggtggagagaaacacaagggcaatttggcacaacgctgctagatactgngggtttacaatcaaccttttcattcccaagctgtacacaaaactctctgtttcttgttacacgcctgcctgctccatgctgaaggagacttcggggtgcttgtagctgagcagaatgtctgtaatacacgtagatggatagcaagaggagtttaaatgctggctgccatcactcaggtctgggtgctcatgacctcccaggcttgccccacattcctcattttccccatcctgaaactgctggctgcccatgagcgaagactgactgagaactgnatccgacatccgggcaancttaagtgcttttccagccncgagactcattctggcaagttttccactgtacataacattgncnnttgttttgg

SEQ ID NO: 7144 - DNA, 567 bp, Homo sapiens
  misc_feature (535)..(535): "n" may be a, t, c, g, other or unknown
  misc_feature (538)..(538): "n" may be a, t, c, g, other or unknown
  misc_feature (544)..(545): "n" may be a, t, c, g, other or unknown
  misc_feature (548)..(548): "n" may be a, t, c, g, other or unknown
  misc_feature (562)..(562): "n" may be a, t, c, g, other or unknown
gatagtgctgaattcaacctatgttttcctaaagagatttttcttatttgaaccatggaacagtattttccattgcacagcctttccggatggtgaccaacagtgataacccctataaaacagggcaacaccggtaaccccttcgtggggctgctgcaagggtgacacagcatcagcctgagacctcctttgaaaagcttggaataagaaagcacccaaacagcacaagaaccacctgctttcttccaactctgcaagcacagctcatttactcacctgactgaagtaacagtgtaaaagacaagcgttcaggtaagaagctgactggaccagtttgaaaaatctcacaaaattattactgttcaatgcagcaaaagcctgaacagcaaatttcacctcagatgagtttctaacagcaggatggaactgttgtacttctctgttaattaaaggagagaaaaggggttggaatgttattttaaataagacaaaattttcatgaagatagatctgataaataatagatttcactggncanatccannggnttacacctgtaatnccaaa

SEQ ID NO: 7145 - DNA, 566 bp, Homo sapiens
  misc_feature (473)..(473): "n" may be a, t, c, g, other or unknown
  misc_feature (489)..(489): "n" may be a, t, c, g, other or unknown
  misc_feature (501)..(501): "n" may be a, t, c, g, other or unknown
  misc_feature (513)..(513): "n" may be a, t, c, g, other or unknown
  misc_feature (522)..(522): "n" may be a, t, c, g, other or unknown
  misc_feature (541)..(541): "n" may be a, t, c, g, other or unknown
aagtgtacagatagattgatactaaaaggtagcctcttgttctcttttgccactgtaattgtttccaaataacatacaaatatttagaaaagattgtttctcagatccccaaattcattgcaattctcaagctgtgttgagaggattgacttcaaagagaagaaaagtaataattaaaaaaatgcgactatgattttttaaaaataaaaaagtctttttggatctatgacagaattatgccataaaaataatagctagcatttagaaaacactttctatgtgtcaggcagtgtgctaaaagccttgtgtagattttttcatttagacctcaaattaatgtgtcattatcaattagtctcgatttattggtgagaaaatggaaacttggaaaaattagggaactagcaaggtcacctaacacataaccaacttaaggacaaggagtctaaaaaacagagttgggtttttaaatncaaagggcacagcctnttaagcataatncccatatattgnttggggtanaaaaccggatagttggggntaagagcctatttcctatccagctg

SEQ ID NO: 7146 - DNA, 577 bp, Homo sapiens
  misc_feature (433)..(433): "n" may be a, t, c, g, other or unknown
  misc_feature (485)..(485): "n" may be a, t, c, g, other or unknown
gggctgttcctttgggttttattacatggtggggtcggacacagctgagaagcaaggacccatcccgggaagtcaaacacaggagggcccctggctcagccgccatacccactctccccgggcagttcctgagtcctccaccgcccctgcccagccccttctgctgcctctccccgccccccaggccaggcgctgggccagcaatgcaaatggctgggggtgggatcaccaaagagaaggccaagccaactacccctactctgccaggccagctccccacaacctgcatccccaatacctgaatctccatttgcaaacacagtgttatgcccaggggtcgggctgggtccttcccatcccagggcagctgaaggtgggcggccctatatactgcctgagggccttcagggactttgctcctctgtgcaccctnacaacaaccctgtgaggtaagtggggtgggaagagtgaccccctggactaangctcaaggaggcaatgtgaccgggccaggaaggaccattcaccatgcacaagggaacccggaaaagggacccaagtgcccgaaaaaacacct

SEQ ID NO: 7147 - DNA, 460 bp, Homo sapiens
  misc_feature (108)..(108): "n" may be a, t, c, g, other or unknown
  misc_feature (117)..(117): "n" may be a, t, c, g, other or unknown
  misc_feature (179)..(179): "n" may be a, t, c, g, other or unknown
  misc_feature (187)..(187): "n" may be a, t, c, g, other or unknown
  misc_feature (224)..(224): "n" may be a, t, c, g, other or unknown
  misc_feature (237)..(237): "n" may be a, t, c, g, other or unknown
  misc_feature (263)..(263): "n" may be a, t, c, g, other or unknown
  misc_feature (331)..(331): "n" may be a, t, c, g, other or unknown
  misc_feature (403)..(403): "n" may be a, t, c, g, other or unknown
  misc_feature (407)..(407): "n" may be a, t, c, g, other or unknown
  misc_feature (429)..(429): "n" may be a, t, c, g, other or unknown
  misc_feature (440)..(440): "n" may be a, t, c, g, other or unknown
  misc_feature (446)..(446): "n" may be a, t, c, g, other or unknown
  misc_feature (454)..(454): "n" may be a, t, c, g, other or unknown
  misc_feature (460)..(460): "n" may be a, t, c, g, other or unknown
gagacagagtctcactctgtcgcccaggctggagtgcagtggcgcaaactcggctcactgcaagctccacctcccgggttcacaccattctcctgcctcagcctccanagtagctgngactacaggagcccgccatcacgcccagctaatttttttggattttttagtagagacagggntttaccgngttagccaggatgggctcgacctcctgacctcatganccgcctgcctcancctcccaaagagttgagattacaggngtgaggcgggaggaccacccgaggtcagaagttcaagaacagcctggccaacatgatgagaccccatntctatataaaaaatgcaaaaaaattagcctggcatggtggcacacacctggaatcccagccacttgggtggntganacaggagaatcacttgaaccgnggagggagaanctgcangagccaanatcacn

SEQ ID NO: 7148 - DNA, 581 bp, Homo sapiens
  misc_feature (527)..(527): "n" may be a, t, c, g, other or unknown
  misc_feature (552)..(552): "n" may be a, t, c, g, other or unknown
  misc_feature (559)..(559): "n" may be a, t, c, g, other or unknown
  misc_feature (571)..(571): "n" may be a, t, c, g, other or unknown
gagacagtcttactctgtcacccccaggctggagtgcagtggcatgatcttggctcactgcaacctccacctcctaggttcaagtgattcttctctgcctcagtttcccaagtagctgggactacaggcacgcaccaccacgcctggctatttttttatttttatttttagtagagacagggtttcaccatgttggccgggctggtcttgaactcctgacctcaagtgatctgcccacctcagcctcccaaagtgctgggattacaggcgtgagccactgcgccccgcccactgtcttttttttttttttaaaggacctcaggtgattctgatgcacagctcaggttgaaagcactgaactaaaggaaggagccttttgatatgcattcaggaagcagccaacctaatgcaatcaagaagagatagttcctaactgtcagccttgtggctaagtgaggaagagataatttggcaaaccatggaaaccccacacaacacacagagctttaatctagagcaaggagacngacaacttcccaaactacagtcagnttccaanagccttacaccntttatgggct

SEQ ID NO: 7149 - DNA, 585 bp, Homo sapiens
  misc_feature (492)..(492): "n" may be a, t, c, g, other or unknown
  misc_feature (505)..(505): "n" may be a, t, c, g, other or unknown
  misc_feature (520)..(520): "n" may be a, t, c, g, other or unknown
  misc_feature (532)..(532): "n" may be a, t, c, g, other or unknown
  misc_feature (535)..(535): "n" may be a, t, c, g, other or unknown
  misc_feature (565)..(565): "n" may be a, t, c, g, other or unknown
  misc_feature (568)..(568): "n" may be a, t, c, g, other or unknown
gagatggagtcttgttctgtcacccaggctgcagtgcaatggcacgatcccggctcactacaacctctgcctcctgggttcaagtcattctcccgcctcagcctcccgagtagctgggaccacaggcgtgcaccaccacgcttggctaatttttgtattttagtagagacagggttttgccatgttgaccaggctggtcctgaactcctatgacaagtgatccacccaactcagcctcccaaagtgctgggattacaggcgcgagccaccatgcctggcccacaattgcaagctttctaaaggaactgctgctcaaagaggggttccagggcctatctccctgtcaccaggttttggctggaacaaacagtaagttcgcctggcagcattgagttttctcaagcaggaacctacagaggctggagtcatcatccctctgcaggggctaatgaagttgggaaggcttctggaacttctcttctaggacacaanctggcgcattcangtgatggagcattgnccatcttgctgnttntgggcccgggttgtaagatcctcttaaagnaangcctcctttggctcacc

SEQ ID NO: 7150 - DNA, 584 bp, Homo sapiens
  misc_feature (551)..(551): "n" may be a, t, c, g, other or unknown
  misc_feature (553)..(553): "n" may be a, t, c, g, other or unknown
cctttctctcgaggtcaccatgtgaggactcagtgttgtggagccactagaagctgaaaggggcagggaaggaaatctcccctagagcttttggggattacggccctgccaacaccttgagttctgacatctgggctctggaactgtgggagaatcaatttgtcttcagccccgcagtttgtggcaatttgttacagcagctgtaggaaatgaacacaccagccacctagaaaaccaccagttcagatgggtgggtcagattccaactccacctgaagggataattctagttttctccctcctcatattttcaactccgttttctgacaagaaacctggcttctgtgatgcttaatagattgacttctttggtcagtcccccatatgacagcgacctccctgctcctctgccacccttggccctgagggggctccctcccgacctccccactggactcagggcagtgtcctgctctgggcacacacccatatcctctgctcacctaatggctagaccacattactcggaggggaagggaaggagaaggtanangaagaacaaccctgggttatgcccacccttg

SEQ ID NO: 7151 - DNA, 569 bp, Homo sapiens
  misc_feature (140)..(140): "n" may be a, t, c, g, other or unknown
  misc_feature (211)..(211): "n" may be a, t, c, g, other or unknown
  misc_feature (284)..(284): "n" may be a, t, c, g, other or unknown
  misc_feature (355)..(355): "n" may be a, t, c, g, other or unknown
  misc_feature (408)..(408): "n" may be a, t, c, g, other or unknown
  misc_feature (424)..(424): "n" may be a, t, c, g, other or unknown
  misc_feature (426)..(426): "n" may be a, t, c, g, other or unknown
  misc_feature (479)..(479): "n" may be a, t, c, g, other or unknown
  misc_feature (502)..(502): "n" may be a, t, c, g, other or unknown
  misc_feature (508)..(508): "n" may be a, t, c, g, other or unknown
  misc_feature (511)..(511): "n" may be a, t, c, g, other or unknown
  misc_feature (520)..(520): "n" may be a, t, c, g, other or unknown
  misc_feature (529)..(529): "n" may be a, t, c, g, other or unknown
  misc_feature (558)..(558): "n" may be a, t, c, g, other or unknown
gagacagactcttgctctgtcacccaggctggagtgcagttgtgcaatctcggctcactacaacctccacctcctgcgtttaagcaattctttttttttttttttttttttttttttgtagttgcaaggtttaatagagngaaaacagagctcccatacaaagggaggagacccaaagagggttgccattgccggctcgaatgcctgctgngctctcaggcgatagatgattggctatttctttacctcctgtttttgcctaattatcattttaacgagctctntttgctacctgattggttgggtgtgagctaagttgcaagccctgtgtttaaaggtggatgtggtcaccttnccagctagccttagggattcttaagtcggcctaggaaatccagctagtcctgnctctcaatcccccctntnaacaggaaaacccaagtgctgttggggaggttggcccatgaccgtctaactgntttctgctgaattggggcataanaggggntgngcaattganaattcctcnggagggatgcctttgaggccttaacatcnaacatggggct

SEQ ID NO: 7152 - DNA, 567 bp, Homo sapiens
  misc_feature (415)..(415): "n" may be a, t, c, g, other or unknown
  misc_feature (457)..(457): "n" may be a, t, c, g, other or unknown
  misc_feature (503)..(503): "n" may be a, t, c, g, other or unknown
cctttgaggcacagtctcactctgtcacccaggctggagtgtagtggtgcaatctttcagctcactgcagcctccgcctcctgggttaaagcaacattcatgcctctgcctcccgagtagctgggattacacgtgcatgccaccacacccagctaatctttgtatttttagtagagatggggtttcgccatgttggccaggctggtctcgaactcctggcctcaagtaatcctcccaccttggcctcccaaagtgctgggattacaggtatgcaccatcacacccagctaatctttgtgtttttagtagagatggggttttgccatgttggccaggctggtctcgaactcctggcctcaagtgatcctcctacctcggcttccaaagtgctgggattacaggcgtgagccaccgnacccggccagttcagtggttttcaaactcgagcttgtagcancataactggggggcttggtaaaacctgatcgctggccccaacccanggttttgattcaacaggctggggaaggctgaaaaatgccttttaacaagttcccaaagaagctt

SEQ ID NO: 7153 - DNA, 587 bp, Homo sapiens
  misc_feature (551)..(551): "n" may be a, t, c, g, other or unknown
gtattttagtagagacagggtttcaccatgttggacaggatggcctcaatttcctgacctcatggtccgtccaccgcagcctccaaaagtgctgggactacaggcgtgagccaccgcacccaggcactagcgttattacaaggaggccatgtgagccgggcatggtggcactcactcataatcccagctacttgggaggctgaagcaggaggactgcttggacccaggagttcaagaccagcctgggcaacatagcgagaccccactgcaaaaataaggaatgccatgtgaaggccacacagacacatagggtagatggtttcagagactggagtgatgcagcagcagccaaggaaggccaaggattgccaggagccaccagaagctgaagagacaaggaaggatcttcccctggagtcctcaaagggagtgtggcttggcctatacttggatttcagacttttagcctccagactattctggtgctttaagccactgatttgtggtaatttgctatggcaggtccttactctggctatgggttacacatncaacaagtgggagcccaagggatttgaatcaggccc

SEQ ID NO: 7154 - DNA, 491 bp, Homo sapiens
  misc_feature (243)..(243): "n" may be a, t, c, g, other or unknown
  misc_feature (246)..(246): "n" may be a, t, c, g, other or unknown
  misc_feature (248)..(248): "n" may be a, t, c, g, other or unknown
  misc_feature (252)..(252): "n" may be a, t, c, g, other or unknown
  misc_feature (295)..(295): "n" may be a, t, c, g, other or unknown
  misc_feature (299)..(299): "n" may be a, t, c, g, other or unknown
  misc_feature (319)..(319): "n" may be a, t, c, g, other or unknown
  misc_feature (371)..(371): "n" may be a, t, c, g, other or unknown
  misc_feature (415)..(415): "n" may be a, t, c, g, other or unknown
  misc_feature (439)..(439): "n" may be a, t, c, g, other or unknown
  misc_feature (458)..(458): "n" may be a, t, c, g, other or unknown
  misc_feature (463)..(463): "n" may be a, t, c, g, other or unknown
  misc_feature (466)..(466): "n" may be a, t, c, g, other or unknown
  misc_feature (470)..(470): "n" may be a, t, c, g, other or unknown
  misc_feature (477)..(477): "n" may be a, t, c, g, other or unknown
gagatggagtctcgttctgttgccctggctagagtgcagtggcgcgatctgggctcactgcaagctccgcctccagggttcatgccattttcctgcctcagcctcccgagtagctgggaccacaggcgcccgccaccatgcccggctaattttttttttttttagtagagacagggttttgccatgttggccaggctaatttttgtttggttttcttttttttttttttttttttttttttgntananacanagtttcaccatgttggccaggttggtctcaaactcctgacctnaagngatctggctgccttggcctnccaaagtactgggattacaggcatgagccaccatgcccagccaaggagtcanaattcttaaatggcttactcagttggatatatagttgagggcanaaataaatttattaatgaaatctntgaccaaaacaaaccaatntccanaanactntgggccnccaccccacattag

SEQ ID NO: 7155 - DNA, 563 bp, Homo sapiens
  misc_feature (462)..(462): "n" may be a, t, c, g, other or unknown
  misc_feature (494)..(494): "n" may be a, t, c, g, other or unknown
  misc_feature (507)..(507): "n" may be a, t, c, g, other or unknown
  misc_feature (509)..(509): "n" may be a, t, c, g, other or unknown
  misc_feature (562)..(562): "n" may be a, t, c, g, other or unknown
aattttagctttgatgacaaaaacaatgctggaggagagtgagagcaccaagttgaacccacgtggaccagctttgacgatgaagctacaggcagccaagtcaactcacacatagagaaagtggaaaaagaacagaaaagcaggagacagaaacaaaaacatgcaggagagggtgattctgttccatgatcttggctcagtgctccagggttcctaatgtttcagcaaaaagaaaatcactgtaatgaaatgtaatgagaccctttgacactgaggaagtgacaactcaggcttggccttctaccacacacctataatctgtgacttgcaacagaacttttcccgaagagcgcagtcctccctgagcaaaatggctagggcctacgccgtgatttgctgctctggaatgggacacacatgttgctaatccttgcaaaaccagcttgaagaaccattttcctnctgagaattttcttctggtcactgctaatttnggctacttaagtncnttggttcttcttcactttaagtaaatattcctcgagttgatgtgccaaacctnt

SEQ ID NO: 7156 - DNA, 556 bp, Homo sapiens
  misc_feature (444)..(444): "n" may be a, t, c, g, other or unknown
  misc_feature (446)..(446): "n" may be a, t, c, g, other or unknown
  misc_feature (469)..(469): "n" may be a, t, c, g, other or unknown
  misc_feature (483)..(483): "n" may be a, t, c, g, other or unknown
  misc_feature (530)..(530): "n" may be a, t, c, g, other or unknown
gagatggagtcttgctctgctgcccaggttggagtgcaatggcgcaatctcggctcactgcaacctccacctcctggattcaagctgttttcctgcctcagcctcctgagtagctgggactacaggtgcccgccaccacgcctggctaatttttgtatttttagtagagacgaggtttcaccatgttggccaggctggtgttgaattcctgacctcgagtgatccgcctgcctcagcctcccaaagtgctgggattacaggtgtgagccactgcgcccggccaaaatcaggaaatctttcccaaaacatcctgtatatagcaacactcataactactactttatggcagaataatggacccgattacaggttcacatggaaaaagttgatatttcagccacgaccaaaatataaacaggatttttcataagggagtaaaatggngnggtcataaccgagataaggtggnggggtcatctctgngctgagaaactttatcttactagtaggaaacatagtaatccctacantcattaaaaggatgcctgaagaactt

SEQ ID NO: 7157 - DNA, 552 bp, Homo sapiens
  misc_feature (444)..(444): "n" may be a, t, c, g, other or unknown
  misc_feature (500)..(500): "n" may be a, t, c, g, other or unknown
  misc_feature (506)..(506): "n" may be a, t, c, g, other or unknown
  misc_feature (514)..(514): "n" may be a, t, c, g, other or unknown
  misc_feature (552)..(552): "n" may be a, t, c, g, other or unknown
atttttatttttatttttgagacacagtttcactctgtcgcccagcctggagtgcagtggcgtgatcttggctcactgcaacctccgcctcccaggttcaagtgattctcctgcctgaccctcccaagtagctggtattacaggcacgtgccactgtgcctggctaatttttgtatttttagtagagacagggttttgccatgttggccagtctggtctcgaactcctgacctccggtgatctgcctgcctcagcctcccaaagtgtttggattacaggcatgagccacggcgccaggctgcatggtcattttttagggagctgggaaaactggacatgcccccaagccccagggtcttccaaatccgattgcagcccccacatggccaatgctgtatcagcaggtgggcccgggaccctgctcatcccttcagccccatctgnccctggaaccttgcccgggggcaagtgccccctttgatgatctaggtaacatgacnaatcgnttggaganctgggcaatctgggttaacttaaaccttttctaagacn

SEQ ID NO: 7158 - DNA, 494 bp, Homo sapiens
  misc_feature (108)..(108): "n" may be a, t, c, g, other or unknown
  misc_feature (435)..(435): "n" may be a, t, c, g, other or unknown
  misc_feature (457)..(457): "n" may be a, t, c, g, other or unknown
  misc_feature (465)..(465): "n" may be a, t, c, g, other or unknown
  misc_feature (468)..(468): "n" may be a, t, c, g, other or unknown
  misc_feature (476)..(476): "n" may be a, t, c, g, other or unknown
  misc_feature (486)..(486): "n" may be a, t, c, g, other or unknown
  misc_feature (492)..(492): "n" may be a, t, c, g, other or unknown
gagacggagtctctctctgtcgcccagggtggagtgcagtggcctgatctccgctcactgcaagttctgcctcccgggctcacgccattctcctgactcagcctccanagtagctgggactacaggcacccgccaccacgcctggccaattctttgtatctttagtaaagatggggcttcaccgtgttagccaggatggtctctatctcctgacctcgtgatccgcccacctcggcctcccaaagtgctgggattacaggcgtgagccacggcgcccggcccctcatctcttaaaataaaaaaggttgaaggagttgggggagtttggatacagacccagggagggcgccttgtggagatggaggcagagatgcggctgacgcttctccaagccaaggaacatcaaggacgccggccaccagcaggaactggganaggcctgggcaaatcccccgtnagccttanganggaccaanccttattaanaccttnat

SEQ ID NO: 7159 - DNA, 528 bp, Homo sapiens
  misc_feature (458)..(458): "n" may be a, t, c, g, other or unknown
  misc_feature (462)..(462): "n" may be a, t, c, g, other or unknown
  misc_feature (466)..(466): "n" may be a, t, c, g, other or unknown
  misc_feature (484)..(484): "n" may be a, t, c, g, other or unknown
  misc_feature (496)..(496): "n" may be a, t, c, g, other or unknown
  misc_feature (521)..(521): "n" may be a, t, c, g, other or unknown
  misc_feature (523)..(523): "n" may be a, t, c, g, other or unknown
gagatggagtctcactctgttgcccagactggaatgcagtgttgcaatcttggttcactgcaacctccgcctcctgagttcaagcgattctcttgcctcagcctcccgagtagctgggactacaggcacacaccaccatgcctggctaatttttttatatttttattagagacagggttttgccatattggccaggctagtctcaaactcctgacctcaggtgatccacccgcctcagccttccaaagtgccactgcacctggccagcatccactagcttttcatcagaccatgaaatgtttggtccacgactgctcactctttccagagctgcactggaaatacactattctgaacggcccaagttcctccggagtattcctctgatggggcacaaacctggtggaccacaagcatgctggtaccaagtgctttttattttacaagagccattctgntccntttngggcgaaccggggcctgnttcatggttctnggctaacacaggccaagtacacttntntacta

SEQ ID NO: 7160 - DNA, 524 bp, Homo sapiens
  misc_feature (436)..(436): "n" may be a, t, c, g, other or unknown
  misc_feature (444)..(444): "n" may be a, t, c, g, other or unknown
  misc_feature (466)..(466): "n" may be a, t, c, g, other or unknown
  misc_feature (486)..(486): "n" may be a, t, c, g, other or unknown
  misc_feature (498)..(498): "n" may be a, t, c, g, other or unknown
  misc_feature (504)..(504): "n" may be a, t, c, g, other or unknown
  misc_feature (516)..(516): "n" may be a, t, c, g, other or unknown
gtttttaaacattttacagccattatccaacagacagtaaagcagtggaccagttgctgtgtgggtataaagcaaacggtctctgggctcctccaagctgtggatatctctggccattatcaatagctgattctcacttgtcctaatgaagtactcagtgcaggttagcctccttctcccccgccagcttctcttccacttccccacaccgtacatgcctctccctttctctctataactcagctcatctcatagcctttttctttggaaatgcaactctgctgatcacttgtgggctgggatcccagctgccttttgaacagagcagacatcctttacagagacaggtggcctggaggggagaacaggtaggggcacactgagatcccacagcaacctgagagattctgccccgtgacctgctggcccccttcanggcacttnctaatttcaatctttcattaantaaggcagcttagaagctgnttttcagcttgnaaaagnccaacccggcangaattctg

SEQ ID NO: 7161 - DNA, 551 bp, Homo sapiens
  misc_feature (487)..(487): "n" may be a, t, c, g, other or unknown
  misc_feature (491)..(491): "n" may be a, t, c, g, other or unknown
  misc_feature (506)..(506): "n" may be a, t, c, g, other or unknown
  misc_feature (512)..(512): "n" may be a, t, c, g, other or unknown
  misc_feature (516)..(516): "n" may be a, t, c, g, other or unknown
  misc_feature (520)..(520): "n" may be a, t, c, g, other or unknown
aaacccaaacttgctcaaaaaagcagtcagaagccattagtccttacctcccacatgggtttaattccttctttgaagagatggaagtcactgtggcctgtcaggtccccaggacgtaccatgtggctataaaacctccagaactgctccacctgcagagagaagaccccagagtaaaaaacatgtgtcttttacttttctttgaatgcatcccaaggttgagatttagttaagaacataagcatggaagacactatactacaggctgtccttttcagaggactcattttcatgtgtggtgttgtgagggaagacatattagaggaaaaacataccatctagtttgacaaaataaaaaatgtaacattcgcaattcaagaataaaatctttggtgagaaatgcaagccttaaccaggagctttaagtggggaaaccatggtaatacgcacttttccacttaagctgcagggtagcattacatgccgnagangacccggtttttgcncatggnactnttanccctgaggatgaaggggacccagctaactga

SEQ ID NO: 7162 - DNA, 553 bp, Homo sapiens
  misc_feature (427)..(427): "n" may be a, t, c, g, other or unknown
  misc_feature (446)..(446): "n" may be a, t, c, g, other or unknown
  misc_feature (481)..(481): "n" may be a, t, c, g, other or unknown
  misc_feature (544)..(544): "n" may be a, t, c, g, other or unknown
ctgcttctttggagagccctgagacaactttcttccccaaatatcccattttattgtttgttgaaatattttatttctaattttattatttttgaacagttaaaaactcaaagtacaatgaagtttacaatgaaaaggctcactcctgggatccttatcccccaggtatctagttctgctccttggagactaccaatgtgatcaggttcttccatatatgtcttcagagacagtctaccatatacaaacaaataggaatacatacacattttttcttcttatacatcaattgtagcatgccatacagtttgacaccatgcttttctcaataaacattattatgccttagagatcttttcatctcagtacctaaagcacttcttcattcctttttccattgggcaaattaagttcaccaatcctctgnaatttattatctaaaaggngagacatggagaaatgaaagcctattaataatatncagaacagcaggtttaaactgggagggtcaaaagccaagctatggtatctacctttggcgatnttaaggtgc

SEQ ID NO: 7163 - DNA, 559 bp, Homo sapiens
  misc_feature (507)..(507): "n" may be a, t, c, g, other or unknown
  misc_feature (517)..(517): "n" may be a, t, c, g, other or unknown
  misc_feature (531)..(531): "n" may be a, t, c, g, other or unknown
  misc_feature (552)..(552): "n" may be a, t, c, g, other or unknown
  misc_feature (559)..(559): "n" may be a, t, c, g, other or unknown
aaaagacagatacacacacatatacaacatacggtttccgaggagagtgagggctccatgcttgtgagagaggaggaggaggaatatgccgaataaccctcaggtttctcccagatttgaacatgttgtactgtggcatgaggtcagcagagacttactccagccctgtgaggctgaattctaccctgacaaagcagtatcactgtaatatgaagcaagaggattcagggcatgttggcagctgtacagaatgcctgttctagaaagtaatggcaattccaaaacaagagatctatggtgtcacatgagataatcttcagcccagttaagcaataagcacccaaaatactttgaatcccaaacacaggcagctcaaaagtttaatggtagaaaagaacttttctccttgaccctattttggtctggaggaaataatcaggaagaagaaaactgggaagaatcatttggttaatttgactggatcattaaccacatactggatctganctgactggtnctgggcacttccanctacttgaagaaccccaaccnctttggn

SEQ ID NO: 7164 - DNA, 467 bp, Homo sapiens
  misc_feature (435)..(435): "n" may be a, t, c, g, other or unknown
  misc_feature (452)..(452): "n" may be a, t, c, g, other or unknown
  misc_feature (458)..(459): "n" may be a, t, c, g, other or unknown
  misc_feature (462)..(463): "n" may be a, t, c, g, other or unknown
  misc_feature (466)..(466): "n" may be a, t, c, g, other or unknown
gagacgaagtctcgctctgtcacccagactggagtgcagtgacacgatctcggtgccaccacacctgcctaatttttgtatttttagtaagagacagtgtttcaccatgttagtcagcctgatcttgaacacctgacctcgtgatccacccgcctcaccctcccaaagtgttgggattacaggcgtgagccaccgcctgcacccggcctgaatactctttgagccaatcaaatgttataaattaaaatcacactaactcataatcttattccttaaaatgagtgacttacaggtgtcataacaggtgacttctcactgcttggagaatccactgcacagaaaaaaaagaaagaaaaaaaagatatgaatgtgagtattttctaattggctttggttttgacctatcaagtggagtatagttcctacatcactttnaacccaatttggggtgngggtgnnggnnggng

SEQ ID NO: 7165 - DNA, 504 bp, Homo sapiens
  misc_feature (457)..(457): "n" may be a, t, c, g, other or unknown
  misc_feature (466)..(466): "n" may be a, t, c, g, other or unknown
  misc_feature (472)..(473): "n" may be a, t, c, g, other or unknown
  misc_feature (484)..(484): "n" may be a, t, c, g, other or unknown
  misc_feature (500)..(500): "n" may be a, t, c, g, other or unknown
  misc_feature (504)..(504): "n" may be a, t, c, g, other or unknown
gtagagacagggttttaccatgttggccaggctggtcttgaactcctgacgtcaggtgatccacctgcctgggcctccaaaagtgctgggattactggcatgagccaccatgcccagccagtttagggatttttctacctgagagtgtgtggctctgtggtagccaggaagctaaagcctagtatctatgctcagggttccagtgatctggggatctagaacaatcctgggaaaagagcccttactctcagcaaagtcagtattccccatgtcctactagaagagagagagtatactttgaggtccttgtaaaaccatttagtcccaaactcagcttgagccacaggtagttgtcactggctgggtccagccagagagagtacctgaagaaatcactcagatgacagctgatcacttactgtgtgacctcaggcaagtcacctccctttcaagcctnagcttcctncactgnnaaaatgagaangctgacttgacctggnccan

SEQ ID NO: 7166 - DNA, 551 bp, Homo sapiens
  misc_feature (475)..(475): "n" may be a, t, c, g, other or unknown
  misc_feature (510)..(510): "n" may be a, t, c, g, other or unknown
  misc_feature (527)..(527): "n" may be a, t, c, g, other or unknown
gctttttaagctgttttgttaaaaagacacaaacacacacattaatccacgcatatacagggtcaggttcagtatcactgtcctccacattcacatcctgctccacgagaagtctttaggggcaataacatacatggagctatcatctctgtaataatgccttcatctggaatatctcatgaaggacctgcctgaggttgttttatagttaacttatttttataagtagaagtggtacattctaaaataacaaatataggatagtaagtatgtcaaccaataacataatctttattatcatgattagcattatgtaccatacacaattgtatgtgctatactttcatatgactggcagcacaatagatttgtttataccagcatcatcacgcacatgtgagtaacacattgtgctgtgatgttatgggcaactatgatgtcacttaggaataggaattttaattctattataacntatgagaccacggcacatatgtaacttggccttancgaacatcttatgtggngctgactaaagatcacccaaccaa

SEQ ID NO: 7167 - DNA, 545 bp, Homo sapiens
  misc_feature (477)..(477): "n" may be a, t, c, g, other or unknown
  misc_feature (506)..(506): "n" may be a, t, c, g, other or unknown
  misc_feature (508)..(508): "n" may be a, t, c, g, other or unknown
  misc_feature (521)..(521): "n" may be a, t, c, g, other or unknown
  misc_feature (533)..(533): "n" may be a, t, c, g, other or unknown
accgcaaactggttccctccacctgagtatcctacccattatgggctttgaatgtgtatgccctgcctcagacctttgagattagggtctaaacttaagttcacaaaagaagcatcacctccatagtgaatcaccttttcagcatgaagggtgaaatgtgaaatgatctaatctgcttgtacgcaatgcctaacgtggggttgcatagatgtgatgctggatggttttgtaaccattcctggaggcaagattcctccacaaccatgttccattactctgtggccatgttctaccttgctttgacagcctagcatagaacattttggcagtttcagatcctgactagatgtctgctggaggagttaaaagctgtagtcactgggacagatgcgtggtgaggctcccggcttaccatgtcttcatgtgccgaagctttttcatttcctctctggattcaagtggaagttacaagccttnaatattaccctcattatactgaggctganancaatcagtttacntcctagaaattncattagcccttc

SEQ ID NO: 7168 - DNA, 573 bp, Homo sapiens
  misc_feature (462)..(462): "n" may be a, t, c, g, other or unknown
  misc_feature (514)..(514): "n" may be a, t, c, g, other or unknown
  misc_feature (516)..(516): "n" may be a, t, c, g, other or unknown
  misc_feature (526)..(526): "n" may be a, t, c, g, other or unknown
  misc_feature (538)..(538): "n" may be a, t, c, g, other or unknown
  misc_feature (551)..(551): "n" may be a, t, c, g, other or unknown
gtagttggtgtttgttatttattgattctccctccaaaggggcctaagctcgacaaaaccgttacagttgtcagaacccagccacagggctcagcccccttcccccacgtcacgtctgcatcactactgtgggtgagcctggacggacgggggctggggctgcccgtggcagcggcaagggatgctttccagagacagccaccacgcaggagggaggatcaccccaggcaacccagacacgggtgttcacatgtgaggctgtgagctccacatagcacaaaggaggcttgctgactttgggcggccatgtctgctgggacctgggtgatccagtgcgtgccacagccagaagcaccattccctgcatatggccactagccaccctggggtgggacagcctgtctagacagacagcaccttgggggctcccctgagggtcagtgagggcctgaccccaggcangaactgcgtggacgcttgtcttcaaccgggacaaacctggccttcggttgcntntgcctaatgnattgggttccanactgggcccgganaaacctgggtgggaaacttggg

SEQ ID NO: 7169 - DNA, 572 bp, Homo sapiens
  misc_feature (409)..(409): "n" may be a, t, c, g, other or unknown
  misc_feature (453)..(453): "n" may be a, t, c, g, other or unknown
  misc_feature (509)..(509): "n" may be a, t, c, g, other or unknown
  misc_feature (523)..(523): "n" may be a, t, c, g, other or unknown
  misc_feature (528)..(528): "n" may be a, t, c, g, other or unknown
ggagacagggtctctctctgttgcccaggctggagtgcagtggcacgatcatagctcactgcatccttgacctcccaggctcaattagtcctcccacctcagcctcctgagtagctaggactacaggtgtgcaccaccacgcttggctaattttttagtttttttgtggaaagagggtttcacattgcccaggctggtctcgtgctcctggacttaagtgatcctcctgctttggcctctcaaagcactgggattacagacgtgagtcaccgcacccagccctatgaacaccgtcttactgaaccctcacagcaaccttaggaagaggatgctgaggctcaggtggggtaagcaagctgcccaaagacctgagccctcccaccacccggcagtccctccctggcgcggncaccagcctaccttcagcccgataacattctgcccgtctacctnacacacgtaatgggttggtgaagaacccgttgcggcccgcaaaattcctttgaccngagagacaatcttnccttnttggacaccaagccgactgggccatgctggccttggcatgggga

SEQ ID NO: 7170 - DNA, 547 bp, Homo sapiens
  misc_feature (84)..(84): "n" may be a, t, c, g, other or unknown
  misc_feature (417)..(417): "n" may be a, t, c, g, other or unknown
  misc_feature (450)..(450): "n" may be a, t, c, g, other or unknown
  misc_feature (460)..(460): "n" may be a, t, c, g, other or unknown
  misc_feature (474)..(475): "n" may be a, t, c, g, other or unknown
  misc_feature (498)..(498): "n" may be a, t, c, g, other or unknown
  misc_feature (513)..(513): "n" may be a, t, c, g, other or unknown
  misc_feature (535)..(535): "n" may be a, t, c, g, other or unknown
aataaatactcaatatgcagattttccccttttttctcactggtacctactgcaatgcccagaagcactggctctccatgctgnggaacatgcccaacactacgctaggcaatgagagatactgatgagcaaaacacacttgtggcctcatggaatgaatggaaggagggagatagcacataagtatttcaggtagtgacaagtgctatggaaaaaaacccaagacagggtggacacagtaacctcttcagatgcggcggtataggcaggaaggcttccttgagataccaggcaagctacgagctacctgatgaggaaccagtgggagaacatctggtggcgagggcttggccagggggaagggggctctgacacaggaacaaatttgatatgcttgaaaatcactaagatcactgnggctggaacacagtcagagagaaaaatgtgtantaaatgaggngggaaaaaaaagcnnggcccattcaaatcaaaactttnaaggccatggaaagnaatgccggaattgccctaagtnccaatggggaag

SEQ ID NO: 7171 - DNA, 352 bp, Homo sapiens
  misc_feature (70)..(70): "n" may be a, t, c, g, other or unknown
  misc_feature (83)..(83): "n" may be a, t, c, g, other or unknown
  misc_feature (138)..(138): "n" may be a, t, c, g, other or unknown
  misc_feature (140)..(140): "n" may be a, t, c, g, other or unknown
  misc_feature (218)..(218): "n" may be a, t, c, g, other or unknown
  misc_feature (224)..(224): "n" may be a, t, c, g, other or unknown
  misc_feature (257)..(257): "n" may be a, t, c, g, other or unknown
  misc_feature (278)..(278): "n" may be a, t, c, g, other or unknown
  misc_feature (321)..(321): "n" may be a, t, c, g, other or unknown
  misc_feature (336)..(336): "n" may be a, t, c, g, other or unknown
  misc_feature (339)..(339): "n" may be a, t, c, g, other or unknown
  misc_feature (345)..(346): "n" may be a, t, c, g, other or unknown
aaagagagcaggtcttgccatgtggcccaggctggtctccaactcctgggctcaggtaacgtcccacagnggccttgcaaagngctgggattacaggcatgagccaccacccctggcacattttttaattttttgtananatagggtctcgccatgttgcccagtctagtcatgaactcccgagttcaagcaatcagcccaccttggcctcccaaagngttganattacaggtgttgggccaccacacttggcctanaaatcattttccaggcacggnggctcatgcctataatcccggcacttttgggaggcgaggcggntggatcacctgaggncanaagttnnagacca

SEQ ID NO: 7172 - DNA, 550 bp, Homo sapiens
  misc_feature (93)..(93): "n" may be a, t, c, g, other or unknown
  misc_feature (386)..(386): "n" may be a, t, c, g, other or unknown
  misc_feature (524)..(525): "n" may be a, t, c, g, other or unknown
  misc_feature (532)..(532): "n" may be a, t, c, g, other or unknown
  misc_feature (540)..(540): "n" may be a, t, c, g, other or unknown
  misc_feature (543)..(543): "n" may be a, t, c, g, other or unknown
  misc_feature (547)..(547): "n" may be a, t, c, g, other or unknown
  misc_feature (549)..(549): "n" may be a, t, c, g, other or unknown
gagacctctgccactccttgatgcagggaccaaagtcaccagtcagagaacaagtcatttctctacctcagccaccattttgttctaaaaggnaacatagaacaaatgttaagttttccaaagtccagatttatgatcagagttaatgagctgaataatcagctgtaagaaacactgattaaaaacatttacatgagttaatttgtgttactgactttaactagaatgtaggcaccctcaccatgctggtgagggtgcctaaaagaaaaccatacttccaaactctcgctttagtaactgtaccgcttacaaagagcccaacagtagctgaagtttattaccgttatgttgctgtgaatgccaccaatatgtactgtcagacttgntttgggtgaaaaaaacaactgcaaaaccaatttttttttctaacatctgatagggacttgatgaagccgctaaatgctaggggttacatttcaggaaacaacttatttatggtatgggtgctattaatcccaaagggnntcatggngaaatacnggntttncnc

SEQ ID NO: 7173 - DNA, 563 bp, Homo sapiens
  misc_feature (460)..(460): "n" may be a, t, c, g, other or unknown
  misc_feature (472)..(472): "n" may be a, t, c, g, other or unknown
  misc_feature (477)..(477): "n" may be a, t, c, g, other or unknown
  misc_feature (510)..(510): "n" may be a, t, c, g, other or unknown
  misc_feature (523)..(523): "n" may be a, t, c, g, other or unknown
  misc_feature (552)..(552): "n" may be a, t, c, g, other or unknown
  misc_feature (561)..(561): "n" may be a, t, c, g, other or unknown
gtagagatgaaatctcaccatgttgcccaggctggccccgaactcctgcactccagtgatccacctgcctcagcctcccaaagagctgggatcacaggcgtgagccaccgtgcaagccctacaattttaaatacttaaatgtggtaagttttctgtttcctgactgtactctgatagatgcagtacttggcaccagaatgtgccatgagacagaccctaaaagacacagttgtgcaactgatttggttgtgttcctgtccttgtcctcacctgtggttgacaagaaagccgggctccctgggctctcaggtgtgcaggacttgccctcccagccttccccacgggagccactgccccttcagtggggtgctccagacaagggcgacatcctgcgctttcagggcccacagaacactgattttggtgaatgccaaattctggggccccaaaacaccatggngggccaccagcnaaagnggtggctgacggcaagggatcatgccactgggngtccaagttcatnttgaacttgggcctggaagttttgaaaancctgcttgngg

SEQ ID NO: 7174 - DNA, 524 bp, Homo sapiens
  misc_feature (459)..(459): "n" may be a, t, c, g, other or unknown
  misc_feature (464)..(464): "n" may be a, t, c, g, other or unknown
  misc_feature (473)..(473): "n" may be a, t, c, g, other or unknown
  misc_feature (475)..(475): "n" may be a, t, c, g, other or unknown
  misc_feature (485)..(485): "n" may be a, t, c, g, other or unknown
  misc_feature (501)..(501): "n" may be a, t, c, g, other or unknown
  misc_feature (519)..(519): "n" may be a, t, c, g, other or unknown
gagacgtagtctcactctgttgccaggctggggtgcagtggcgtgatcccggctaactgcaacctccacctcccagcaggttcaagcgattctcctgcctcagcctcctgagtggctgggactacaggtgcatgccaccacacctggctaatttttatatttttagtagagacagggtttcaccatgttggccaggatggtctcgatctcttgacctcgtgatccacccgcctcggactcccaaagtgctgggattacaggcgtgagccaccgtgcccggcctaaaggagtaaattttaagtgttctaaccacaaagaaatatgtgaagtaacgcatatgttaactggtttgatttagccactccacaatatacacgttatttcaaaacccacaggcatcacatcccatttctcacccatgagtagaataaatcatagaccacatcacagcaataaggngacanctgtgtcancnggggcaaggnctacaggacttaccancaaacatctaaggggctnttttg

SEQ ID NO: 7175 - DNA, 562 bp, Homo sapiens
  misc_feature (392)..(392): "n" may be a, t, c, g, other or unknown
  misc_feature (421)..(421): "n" may be a, t, c, g, other or unknown
  misc_feature (440)..(440): "n" may be a, t, c, g, other or unknown
  misc_feature (496)..(496): "n" may be a, t, c, g, other or unknown
  misc_feature (540)..(540): "n" may be a, t, c, g, other or unknown
gagacggagtctcgcttgttgcccaggctggagtgcaatggcacgatttcgactcaccacaatctccgcctcccaggttcaagcgattctcctgtctcagcctcccaagtagctgagattacaggcatgcaccactacacctgtctaattttgtattttcagtggagatggggtttctccatgttggtcaggctggtcttgaactcccgacctcaggtgatccacccgccttggcctgccaaagtgctgggattacaggcatgagccacagcacctggccctatttttgtatttttaatggagacgaggttttaccatgttggccaggctggtcttgaactcctgacctcaagtgatctgccagcctcaggtgccaaagtgctgggattacnggcaagaaccactgtgcccagcctactgncaagtatttttcagatganggaaaacccagacttcagagaaattaaggaatctgtccaaggcgtatagtcaaggnatcagaatctggaactggagcctttcaatccaaagtccaagctnttaatcttcaggccccactggt

SEQ ID NO: 7176 - DNA, 546 bp, Homo sapiens
  misc_feature (17)..(17): "n" may be a, t, c, g, other or unknown
  misc_feature (24)..(24): "n" may be a, t, c, g, other or unknown
  misc_feature (48)..(48): "n" may be a, t, c, g, other or unknown
  misc_feature (75)..(75): "n" may be a, t, c, g, other or unknown
  misc_feature (404)..(404): "n" may be a, t, c, g, other or unknown
  misc_feature (458)..(458): "n" may be a, t, c, g, other or unknown
  misc_feature (486)..(486): "n" may be a, t, c, g, other or unknown
  misc_feature (493)..(493): "n" may be a, t, c, g, other or unknown
  misc_feature (504)..(504): "n" may be a, t, c, g, other or unknown
  misc_feature (517)..(517): "n" may be a, t, c, g, other or unknown
  misc_feature (529)..(529): "n" may be a, t, c, g, other or unknown
  misc_feature (536)..(536): "n" may be a, t, c, g, other or unknown
ccccatttaaaaatatnttacagnggcataactttccctgtacaaatngggtttaagaaacaaaagggacaattngctaatcaatgatgagcctttaatccaaccattatatatcccctttccatccttagatcccttgaagagaccatttagttaagactaccaacaggtgacaccctgacctccttaccaaccttgccttttagaggtgaccagagacctgtgcttttccaaagtactgttatacgtgtaattagtataatatcaatgtggggaaactctacctttggattttgaggactctgcttttcttgaaaccctctgggttagagactgtttattcatatgcacctcaggaacttgaggccaagatgaagttcactgcttcctagtcctttgcttgntctcctggccattatgttccaccttcattcaaaatgccttctctttgaagctgnttataacccaagcaacaccattaaactnactgggngcttaactggnctcaatcaccacnttttccaagtcnacttttnccttttttca

SEQ ID NO: 7177 - DNA, 554 bp, Homo sapiens
  misc_feature (463)..(463): "n" may be a, t, c, g, other or unknown
  misc_feature (507)..(507): "n" may be a, t, c, g, other or unknown
  misc_feature (513)..(513): "n" may be a, t, c, g, other or unknown
  misc_feature (521)..(521): "n" may be a, t, c, g, other or unknown
  misc_feature (543)..(543): "n" may be a, t, c, g, other or unknown
  misc_feature (550)..(550): "n" may be a, t, c, g, other or unknown
atactgacaaccaagctttattactttattagagctgaacaagcatattaaaagttagggcatggaagggaggaagcaggaccagctcacgggctggagatgaaccaagaagggttgtccatgaggtgaagctgggtcagagggagcaggcatggtcgaggctgtggttaccatctagaaggagaaggagtagtggggagggaaatcactgctcctgggtgccccaggaaatgtagtctggctgggtggccgcatggtactcatcaatgagctcctgaacaacctccctagacctgtccatctcatcaaagttgtccttgaacatgtcctccttacggaactgctcgaggaaggcatcccgcttccgcagcttgtcaaactgctggcaggaactttcaaagagcgaggagatgctggtgtggttggccatcatgagcccgctgacccggtgggcccagggcangtagggagactttcttgacaggggccacctggatcttgccgggncccacnggatgaanttggccactttccgttcccggntcttttnggtt

SEQ ID NO: 7178 - DNA, 565 bp, Homo sapiens
  misc_feature (417)..(417): "n" may be a, t, c, g, other or unknown
  misc_feature (449)..(449): "n" may be a, t, c, g, other or unknown
  misc_feature (516)..(516): "n" may be a, t, c, g, other or unknown
  misc_feature (524)..(524): "n" may be a, t, c, g, other or unknown
  misc_feature (529)..(529): "n" may be a, t, c, g, other or unknown
  misc_feature (549)..(549): "n" may be a, t, c, g, other or unknown
ccgagacgaagtctcactctgtcccccaggctggagtgcagtggcgtgatgtcgactcactgcaacctccgcctcctgagatcaagcgattctcctgcctcagcctcctgcataactgggattacaggtgtgagccaccacgctcggccaacattctgagattactttttttttcatttggggagacgaatcccttactagcagagctgtattgagggttaacggtggtaatgggtctccagggcttggtgcagtttgtactcaacaagtacgtaattctctcctttggttgcccctgaatacaagagtggtcttgtacttccctgcctgaacagtccacagccaatggcactccagtccttgtcacatggttccactcttaggatgtaaattaggaggtaccagcttgagaggcanaggcaaaggcaaggttaagatgcagctgtgangctgggcacaatgggttcacgccctataatcccagcacccttgggaaggccgaaccgagcggaccancttgaggncaaanagttcgagaaccagcctggncaacacggggaaaaat

SEQ ID NO: 7179 - DNA, 551 bp, Homo sapiens
  misc_feature (440)..(440): "n" may be a, t, c, g, other or unknown
  misc_feature (509)..(509): "n" may be a, t, c, g, other or unknown
  misc_feature (513)..(513): "n" may be a, t, c, g, other or unknown
  misc_feature (521)..(521): "n" may be a, t, c, g, other or unknown
  misc_feature (534)..(534): "n" may be a, t, c, g, other or unknown
  misc_feature (536)..(536): "n" may be a, t, c, g, other or unknown
  misc_feature (539)..(539): "n" may be a, t, c, g, other or unknown
  misc_feature (545)..(545): "n" may be a, t, c, g, other or unknown
aagagagacaaagttttgccatgttgcccaggcaggtcctgaactcctgggctcaagcgatcctcccacctcggccttcccgagtgctgggactacaggcatgagccaccacacttagcctgtcggagtccttttgataataaggtgacttgaggagacaggaaggaaacactaaagccagcacagggtgtcccggggcaagtgcattccaggccaggaagcatacgaggcaggatgtgctcggcatgttcaagacttcagggacaccaggggcagatggaggatggcagagaatggtgagaggaggccagagcaggcaagaggcctttaggactctggcttttactgagggacatggacgccgttggaaggtctgagctcggaatgacctgactgacctgtcttacagggacaacttgtctgtggggggacactggcanggaagcttggcttgtggccacccaccggccggcactggcaacctcgtccttgcctttcacaatggaccnggcntgggctgngtgaccccagatncngancttatngggaat

SEQ ID NO: 7180 - DNA, 518 bp, Homo sapiens
  misc_feature (411)..(411): "n" may be a, t, c, g, other or unknown
  misc_feature (470)..(470): "n" may be a, t, c, g, other or unknown
  misc_feature (483)..(483): "n" may be a, t, c, g, other or unknown
  misc_feature (494)..(494): "n" may be a, t, c, g, other or unknown
  misc_feature (500)..(500): "n" may be a, t, c, g, other or unknown
  misc_feature (508)..(508): "n" may be a, t, c, g, other or unknown
  misc_feature (512)..(512): "n" may be a, t, c, g, other or unknown
  misc_feature (517)..(517): "n" may be a, t, c, g, other or unknown
aaaaaatgttttggcttttaagagagtttgatgtattttgagccccaataatagatcaggcagctgagagcagcctgcctggtcctccgggcagtggagggaaggaggatgaaagtaatgaagcagattcttgtagctgattgctaggacttgggaggagagctgagagcatgtcctatgggaagaaaggagggaagagccttctgccagagtgtctcagtcagcaggagccgaggagcatggcagcccaggctaaagggtggcactctctccaacacagggcaatatgaggtctgtagaagaggctaggaggaaaccgcacatgaggaaaaacaagcgactcatggcatgttatagcgactccaccaaggcatttatttctctacactcaccatgaagacaatggaaggntatagaatgtgggatggggaagccggaagtcataattcatttaaaatccccttctgggnttaatatttgganggttcaatggnccgganaagaaccntttnaaaanc

SEQ ID NO: 7181 - DNA, 487 bp, Homo sapiens
  misc_feature (359)..(359): "n" may be a, t, c, g, other or unknown
  misc_feature (404)..(404): "n" may be a, t, c, g, other or unknown
  misc_feature (420)..(420): "n" may be a, t, c, g, other or unknown
  misc_feature (425)..(425): "n" may be a, t, c, g, other or unknown
  misc_feature (430)..(430): "n" may be a, t, c, g, other or unknown
  misc_feature (464)..(464): "n" may be a, t, c, g, other or unknown
  misc_feature (476)..(476): "n" may be a, t, c, g, other or unknown
  misc_feature (480)..(480): "n" may be a, t, c, g, other or unknown
aatagagacacggtctatgttgcccatgctggtctcaaactcctgggctcaagcaatcctcctgcttcagtctcctaaagtgagccaccatgcctggccggaactcttgttgcaagaacaataagcatccactactgcagctgaaaacatccctgacagacccatctccctggtattcagggagggatggactaggcaatgattcagaagtcatactgaaaagctgcccttttcctactggtgcccctgcagtctgagcccaagcagacacatacttcagaggtgctacatttgtgctacaaagcacagatccttcttgacctggaggccagccttacccactgagaccaggttcctgnagttctccagcatcacttccctgtacagggacttctggttgaggnccaacagtccccactntttcngggtnaaacccagggtacatttttcaaaggcaatgggtnctaaaaatcccnattnttgttaa

SEQ ID NO: 7182 - DNA, 532 bp, Homo sapiens
  misc_feature (447)..(447): "n" may be a, t, c, g, other or unknown
  misc_feature (455)..(455): "n" may be a, t, c, g, other or unknown
  misc_feature (490)..(490): "n" may be a, t, c, g, other or unknown
  misc_feature (503)..(503): "n" may be a, t, c, g, other or unknown
  misc_feature (520)..(521): "n" may be a, t, c, g, other or unknown
  misc_feature (524)..(524): "n" may be a, t, c, g, other or unknown
gagacacaatctcattctgttgcccaggctggagtgctgtggtgtgatctcggtttactgcaacctccgcctcctgggttcacgcgattttcctgcctcagcctcccgagtagctaggattagaggcgcacaccaccatgcctggctaatttttggtgtatttttagtatagacagggtttcactatgttggccagactggtctcgaactcctgacctcatgatccacctgcctcaccctcccaaagtgctgggattacaggcgtgagccaccgcgcctggcacccataggcaactttcttagtctgtttgtgctgctataacaaaatacctgatttataaagaacagaaatgtatcacagttctgtagtttatgaagtccaagatcaaggcatcatcaggttcaaatgtcctcttccaaggggtgccttgatgctgcatccttcanaaaggacntgtgcctcacgtgccaaaagggaggacaaggaaanctgcattgagccnctttatgaaaggtggannccntttccaaa

SEQ ID NO: 7183 - DNA, 506 bp, Homo sapiens
  misc_feature (430)..(430): "n" may be a, t, c, g, other or unknown
  misc_feature (446)..(446): "n" may be a, t, c, g, other or unknown
  misc_feature (453)..(453): "n" may be a, t, c, g, other or unknown
  misc_feature (469)..(469): "n" may be a, t, c, g, other or unknown
  misc_feature (485)..(485): "n" may be a, t, c, g, other or unknown
  misc_feature (487)..(488): "n" may be a, t, c, g, other or unknown
gagacagagttttcttttctttctttttttttttttttttgagaggaagttttgctcgtgttgcctaggctggaatgcaatggcatgatctcgactcactgcaacctccacctcctgggttcaagagattctcctgcctcagcctcccaagtagttgggattacaggcgtttgccaccatgcctggctaatttttgtatttttagcagagacagggtttcaccatgttggcaggctggtctcgaactcctggcctcaggtgatctgcccgcctcagcctcccagagtgctgggattacatgcgtgagccaccacacctggtctctcttctctttagaatgggcttcctaacagatgacattttatttatttctcttggctgctttgctactctcccactagaaatcaactgcatgaaggcccgggctttnggttgctttggttggnttaactncagtgcctggaactgnccctgggacatagcangnnccatataagattgctgag

SEQ ID NO: 7184 - DNA, 183 bp, Homo sapiens
  misc_feature (114)..(114): "n" may be a, t, c, g, other or unknown
  misc_feature (116)..(116): "n" may be a, t, c, g, other or unknown
  misc_feature (136)..(136): "n" may be a, t, c, g, other or unknown
  misc_feature (141)..(141): "n" may be a, t, c, g, other or unknown
  misc_feature (155)..(155): "n" may be a, t, c, g, other or unknown
  misc_feature (159)..(159): "n" may be a, t, c, g, other or unknown
  misc_feature (163)..(163): "n" may be a, t, c, g, other or unknown
ctttttttagaaaaataggccgggtgcagtgactcacacctgaaatcccagactagggaggccaaggccagtggatcacttgaagtcaggagttcaagaccagcctgacctcangngatctgcccgccttggcttnccaangctctgggattacncgcntganccactgcacctggcctatcc

SEQ ID NO: 7185 - DNA, 430 bp, Homo sapiens
  misc_feature (3)..(3): "n" may be a, t, c, g, other or unknown
  misc_feature (35)..(35): "n" may be a, t, c, g, other or unknown
  misc_feature (44)..(44): "n" may be a, t, c, g, other or unknown
  misc_feature (68)..(68): "n" may be a, t, c, g, other or unknown
  misc_feature (78)..(78): "n" may be a, t, c, g, other or unknown
  misc_feature (99)..(99): "n" may be a, t, c, g, other or unknown
  misc_feature (144)..(144): "n" may be a, t, c, g, other or unknown
  misc_feature (150)..(150): "n" may be a, t, c, g, other or unknown
  misc_feature (200)..(200): "n" may be a, t, c, g, other or unknown
  misc_feature (373)..(373): "n" may be a, t, c, g, other or unknown
  misc_feature (394)..(394): "n" may be a, t, c, g, other or unknown
  misc_feature (400)..(400): "n" may be a, t, c, g, other or unknown
  misc_feature (414)..(414): "n" may be a, t, c, g, other or unknown
  misc_feature (421)..(421): "n" may be a, t, c, g, other or unknown
  misc_feature (424)..(424): "n" may be a, t, c, g, other or unknown
  misc_feature (427)..(427): "n" may be a, t, c, g, other or unknown
ganatggagtctggctctgtcgcccaggctagagngagaccatntcaacaacaacaagaaaagaaggnggccatcatntgcaagccaaggagagagaanaaaccaaacctgctgacacattgatcttggacttctagtctctanaattgngagaaaagagatttctgttgtttaccacccattctggggtattttgttgnggaaaccctagtaaacatactatattaaaattcttccttatgtccatatgaaatactcccaactttaatttattcataatccactttctttagtttacagagtcctcataaaacacaatctatacttgaatgcagtgagtacactgcactttgaccttttttttttttttttnttttttttttttttttttganatggantctgggctttgtcncccaggntanaangca

SEQ ID NO: 7186 - DNA, 498 bp, Homo sapiens
  misc_feature (3)..(3): "n" may be a, t, c, g, other or unknown
  misc_feature (11)..(11): "n" may be a, t, c, g, other or unknown
  misc_feature (15)..(15): "n" may be a, t, c, g, other or unknown
  misc_feature (32)..(32): "n" may be a, t, c, g, other or unknown
  misc_feature (51)..(51): "n" may be a, t, c, g, other or unknown
  misc_feature (96)..(96): "n" may be a, t, c, g, other or unknown
  misc_feature (153)..(153): "n" may be a, t, c, g, other or unknown
  misc_feature (174)..(174): "n" may be a, t, c, g, other or unknown
  misc_feature (191)..(191): "n" may be a, t, c, g, other or unknown
  misc_feature (205)..(205): "n" may be a, t, c, g, other or unknown
  misc_feature (215)..(215): "n" may be a, t, c, g, other or unknown
  misc_feature (279)..(279): "n" may be a, t, c, g, other or unknown
  misc_feature (297)..(297): "n" may be a, t, c, g, other or unknown
  misc_feature (333)..(333): "n" may be a, t, c, g, other or unknown
  misc_feature (402)..(402): "n" may be a, t, c, g, other or unknown
  misc_feature (415)..(415): "n" may be a, t, c, g, other or unknown
  misc_feature (420)..(420): "n" may be a, t, c, g, other or unknown
  misc_feature (445)..(445): "n" may be a, t, c, g, other or unknown
  misc_feature (458)..(458): "n" may be a, t, c, g, other or unknown
  misc_feature (481)..(481): "n" may be a, t, c, g, other or unknown
  misc_feature (492)..(492): "n" may be a, t, c, g, other or unknown
ganacagtctnactntgttgctaggctggagngcaggggcacaatctcggntccctgcaacctccccctcctgtattcaaggaattctcctgcctnagcctcccgagtagctgggactacaggtccgcgccaccacgcccggctaatttctgnatttttagtacatcctgttgnacatcctgttggccagnatggtctcgatctnttgacctcgngatctgcctgcctgggcctcctaaagcgttgggattacaggcatgagccaccgcacctggccanaaaatatttttatataanggaaccagaaagacatgccattttcaaaactggcanaattaaatcctgaattttcaaaatatttcaaaaatggttttaaaagagccactcactgggtttcctccngacattcatttantaagngggcctatagcatcattccattttntggaaacagtgcnttttaggaatcaaactggcttantaaaggggggngccccc

SEQ ID NO: 7187 - DNA, 542 bp, Homo sapiens
  misc_feature (474)..(474): "n" may be a, t, c, g, other or unknown
  misc_feature (513)..(513): "n" may be a, t, c, g, other or unknown
  misc_feature (516)..(516): "n" may be a, t, c, g, other or unknown
  misc_feature (530)..(530): "n" may be a, t, c, g, other or unknown
caaattactagaattttattagccaagggatagcagctggaggagaaataacaaaaaaatacatcttaagaatccttaagtacagtgcatatttacaatttaagtgtcatattttagaaggccactgtccatcagctcagtaaatgtaccagcttctaaagccatgatgccataggtccatttgttgatgaaattcctacccactgtcctcgggcatctgactctggtctctgcactggcatcaagagaacgctgctcggtggtttaaggctaacaccttacagggtaacactgtaacactggccctggagccaggtgcttttctccatgaaaacttccaccttggtagctcagccgacatagacaacacacaaagcgcagctctgcacttctgtccttatcttcacacagtgacatccacaccaggtggccaaacagaagagaaggcagaggcccaccaagagctgatgctgngcaatccttgggggacatccttcggcttactgggggacnaanccaggttttggagncttttccctgaa

SEQ ID NO: 7188 - DNA, 544 bp, Homo sapiens
  misc_feature (417)..(417): "n" may be a, t, c, g, other or unknown
  misc_feature (429)..(429): "n" may be a, t, c, g, other or unknown
  misc_feature (466)..(466): "n" may be a, t, c, g, other or unknown
gagatggagtctcgctctgctgccgggctggagtgctgtagcatctcagctcaccgcaacctctacctcgcgggttcaagcgattctcctgcctcagcctcccgagtagctgggactacaggcacgcgccactggccaagatggtctcgatctcttgaccttgtgatccacccgcctcggcctcccaaaatgctgggactacaggcatgagccaccgcgcccagccccagacttttttttttttaagatggagtctcgctctgtcgcccaggctggagtgcagtggcatgatcttggctcactgcaacctccacctcctgggttcaagctattctcctgcctcagcctcccaagtagctgggactacaggcatgtgccaccatgcccaagctaatttttttggctttttttttttcnttttggagaacnggaatttaaactgttgccaaaatggatgcaatgggcnactgggtcactacaactcgcttctgggttaagcattttctggctaagcttccaaggactgggatacggggcctgcacc

SEQ ID NO: 7189 - DNA, 550 bp, Homo sapiens
  misc_feature (469)..(469): "n" may be a, t, c, g, other or unknown
  misc_feature (473)..(473): "n" may be a, t, c, g, other or unknown
  misc_feature (479)..(479): "n" may be a, t, c, g, other or unknown
  misc_feature (494)..(494): "n" may be a, t, c, g, other or unknown
  misc_feature (523)..(523): "n" may be a, t, c, g, other or unknown
  misc_feature (540)..(540): "n" may be a, t, c, g, other or unknown
  misc_feature (545)..(545): "n" may be a, t, c, g, other or unknown
aagacggagtctcgctctgtcacccacgctggagtgcagtggcaagacctcggctcactgcaacctccgcttcccgggttcatgccattctcctgtctcagcctcccgagtagctgggactacaggcgcccgccaccatgcccagctaattttttgtatttttagtagagacagggtttcaccatgttggtcaggctggtctccatctcctgacctcgtgatccacccaccttggcctcccaaagtgctgggattacaggcgtgagccaccacgcccagatatccccagcttcttttaatgccatcttacctcctcagcctcctcaaaccaaagccaacgtcttctcattttggtgctgtcctcgtttgcggaataactaatgacatttaaaatcaaacggtgatctgccttcctagaaaacccagcccccacctagagaacacccttcccacgcgtctggggcccctntggnacctgnagtctgatccacgangaccgcgaagttgatgaatccggccaaancgagagaacatggcttntacgnccttt

SEQ ID NO: 7190 - DNA, 574 bp, Homo sapiens
  misc_feature (515)..(515): "n" may be a, t, c, g, other or unknown
  misc_feature (536)..(536): "n" may be a, t, c, g, other or unknown
  misc_feature (547)..(547): "n" may be a, t, c, g, other or unknown
  misc_feature (573)..(573): "n" may be a, t, c, g, other or unknown
acaatttctcatatggcaagatctgggagggctttgtttcaccttttttttgaaggcagcattactagaaataagatcatggttcacaaagcttttgtcctttgagtactttgaatgtatcatcccactgccttcatcccctccattgtttctgatgagaagtttgctgttaatctattggggtacccttgtggcacattgtttttctcttacagctttcaacatttcctttcacttttaacatttttactatgacgtgtctgtttgtggatatgtttgcattcattctgttcacagtttgttgagatgcttgtgagtatagattaatgtttgttcaataaattgtggatgtttttagccattatttctttgaatatttttgtgcttctctttctcctcaccttatggtattctcattacatgtacactggtgcactgaaaggcgtcctgaatttctctgaggctctggttataattctttggtctaatttcttaatctaattcttcaatttccnaatctaatttctaatgggaanatggaattganggtgcataattctatggactatttgna

SEQ ID NO: 7191 - DNA, 522 bp, Homo sapiens
  misc_feature (469)..(469): "n" may be a, t, c, g, other or unknown
  misc_feature (500)..(500): "n" may be a, t, c, g, other or unknown
  misc_feature (502)..(502): "n" may be a, t, c, g, other or unknown
  misc_feature (509)..(509): "n" may be a, t, c, g, other or unknown
  misc_feature (513)..(513): "n" may be a, t, c, g, other or unknown
  misc_feature (516)..(516): "n" may be a, t, c, g, other or unknown
  misc_feature (519)..(519): "n" may be a, t, c, g, other or unknown
aagtatggaggctcaagtataagatgtagatttttttcttaagctttacaaaaaaacaaaataaaacaaaaacctccttttgcattccatagaaattgacagaaaagcacctggccggaagagcggaacggtcggcggcaccccccccagcccccaccccgcggcctccgtgggacgggagagtctgcgcaggacggcaccgagggccacctctgctcccagagctgtcccctgtccccacgacccccaaccccaagcaactcccaaacacacacggaataagatttccagtttttcttctctctttcacacaccacagttagttcataaaatttttttgttttacattttttacaccaatgtaccaaaaaggtgggagggaagggaggctggcagacagtggattttatgcctataaatggggggacagggaggaggacggggggcccgggtgaacaaaaaccacacngtctctatggaaatgtggagagaactgaaancnaagtgtngcanaancangct

SEQ ID NO: 7192 - DNA, 578 bp, Homo sapiens
  misc_feature (454)..(454): "n" may be a, t, c, g, other or unknown
  misc_feature (474)..(474): "n" may be a, t, c, g, other or unknown
  misc_feature (510)..(510): "n" may be a, t, c, g, other or unknown
  misc_feature (519)..(519): "n" may be a, t, c, g, other or unknown
  misc_feature (529)..(529): "n" may be a, t, c, g, other or unknown
  misc_feature (533)..(533): "n" may be a, t, c, g, other or unknown
  misc_feature (575)..(575): "n" may be a, t, c, g, other or unknown
  misc_feature (578)..(578): "n" may be a, t, c, g, other or unknown
gagacggagtcttgctctgttgcccaggctggagtgcagtggctaaatctcggctcaccgcaacctctgcctcccaggttcaagcaattccccttcctcagcctcccaagtagctgggattacagccgcctgccatcatgcctggctaatttttgtatttttagtagagatggggtttcaccatgttgtccaggttaatttcgaactcctggcctcaagggatccgcccacctcggcctcccaaactgctaggatcacaggcatgaatcaccgcgcccggaccagtgtaagcatttggtgtgctgccaatcaaggacttatttacctttgcatccctgctctgaggccagcacaatcctgtcacacagtaggtacacaatgcacatttgtctagcaaaaagtactggaaagcagaagggtggatagagctctgcctgggttcaaatccaggctntggcatttactaactgaaanctttgggcaagttggttaacctctctgggcctgttnctgactggngaaacagacngaanctttcttatgaggtggattaaagacccaatggaattaatatnccn

SEQ ID NO: 7193 - DNA, 568 bp, Homo sapiens
  misc_feature (536)..(536): "n" may be a, t, c, g, other or unknown
  misc_feature (541)..(541): "n" may be a, t, c, g, other or unknown
  misc_feature (556)..(556): "n" may be a, t, c, g, other or unknown
  misc_feature (558)..(558): "n" may be a, t, c, g, other or unknown
agacagagtctctctctgttacccaggctttaaggtttttggtagacacagggtctcactatgttgcccagtctggtttcaagctcctggcctcaaatgatcctcctgtctcagcctcccaaagtactcatattacaggcatgagccaccatgccctgctgtaaattgttttgaacagagggtgaaataggcttagggaggaacatactgagtctgaaatagaacatccaggtggaggatcagccatcagtgagagctgcacaaaggtcatgattagagcattgactcagcttagagaagggagtcagagttcagacagccacaggcaattcctagagtaagtgaagagaacaattttgaaaggcacctgctgaagaaaagcaattattcattcctaaaaggcactgccgatccttcacattgaacatcagaaaaggtcacttctgaaacaaggcttctgtgggacaaagaaaaactctattctggtcttaaaaatctcaaaacccgacccttttatgggaaggttcatttaaggncctanttagaaaaccgttcncngaattggaac

SEQ ID NO: 7194 - DNA, 574 bp, Homo sapiens
  misc_feature (444)..(444): "n" may be a, t, c, g, other or unknown
  misc_feature (449)..(449): "n" may be a, t, c, g, other or unknown
  misc_feature (476)..(476): "n" may be a, t, c, g, other or unknown
  misc_feature (510)..(510): "n" may be a, t, c, g, other or unknown
  misc_feature (536)..(536): "n" may be a, t, c, g, other or unknown
  misc_feature (543)..(543): "n" may be a, t, c, g, other or unknown
  misc_feature (566)..(566): "n" may be a, t, c, g, other or unknown
gagacggagtttcactcctcttgcccaggctggagtgcaatggcgtgatctcggctcactgcaacctccgcctcctgggttcaagcgattctcctgcctcagcctcccgagtagctgggactacgggcgcgtgccaccacacccagctaatttcgtatttgtagtagagatgggatttttccatgttggtcaggctggtctcgaactcccgacctcaggtgatctgcccgccttggcctcccaaagtgctgggattacaggcgtgagccactgcacccagcccatatattcatgttttagctcatgaatacaaccaatttctctgaagatgatggattctattaaaaacaggtgtttgtcacatgactggggattgtagtttactgaaacacaaccaaattaggtagaaatcatgatctaataaagttagcatgttaaatatgnatctncaattccaggatttccatgagacttgnagaacttcttttttttttttttaagaaacagcangacattaaacctttactgggttttcncataagnctgggcccaccgttggggcctcnattccaag

SEQ ID NO: 7195 - DNA, 547 bp, Homo sapiens
  misc_feature (481)..(481): "n" may be a, t, c, g, other or unknown
  misc_feature (490)..(490): "n" may be a, t, c, g, other or unknown
  misc_feature (519)..(519): "n" may be a, t, c, g, other or unknown
  misc_feature (521)..(521): "n" may be a, t, c, g, other or unknown
  misc_feature (527)..(527): "n" may be a, t, c, g, other or unknown
  misc_feature (539)..(539): "n" may be a, t, c, g, other or unknown
  misc_feature (544)..(544): "n" may be a, t, c, g, other or unknown
aatttcatctgtttctctttatattttttatattggatacaaacaaattaacaattacagactatcgccaacttataatgcttaaactttatgatcaatagtaataaattacacgagatattcacactttattataaaatagggtttgtgtaagatgatttttcccaactgtaggttaacatcagtgttctgagcacatttaaggtaggcttggctaagctatgatattcagtagggtatgtgtatttcatgcattttttacttacaatattttcaacttatggtggatttattgggacataaacccatcctaagtcaaggagcatctgtatacatgaagctaacattctattcctatcagacagtgctgctctaaagtatgtcactgcaaaacttaagccttcaagtaaaatgatcagatttgcattctagaaagattatatgccctggtgagactgggttaaagattgaaagccgatgnaagctattncagttgctggggcaaacaatggttagggncnggtttnaaacatgtgccntaaanggt

SEQ ID NO: 7196 - DNA, 556 bp, Homo sapiens
  misc_feature (426)..(426): "n" may be a, t, c, g, other or unknown
  misc_feature (450)..(450): "n" may be a, t, c, g, other or unknown
  misc_feature (462)..(462): "n" may be a, t, c, g, other or unknown
  misc_feature (470)..(470): "n" may be a, t, c, g, other or unknown
  misc_feature (474)..(474): "n" may be a, t, c, g, other or unknown
  misc_feature (507)..(507): "n" may be a, t, c, g, other or unknown
  misc_feature (519)..(519): "n" may be a, t, c, g, other or unknown
gccattacttttaatgactgctgcaccaacctattagaatcatttatatttattcatccatcatctgccttcccctctagaaaggaagctccatgagaatagaggccaaatctactcaaataactccaccttcccacacattgtcaataatcatttaccaactgactgatagagaagtgccttccctgttgctgggatgaggcacatgacacgcccctttgaaagtcactgtcatggacagttggcatttgctcttcactgctgcacccgtggcgtggctgggcttaggctgatctagtctggccttgactctaggctgagggtgggaaccatgcctgctccacacgcctctcattccacagccagagccgccgttccctggggcacgcatatctcgtggggaaaatcaagagcctaagaaggcangcctggcaatgccacacatttcangcttctggttgngcccgtgnctgngaaaatcttggtggcagaagcaagtacccagcncaagcaacactntaagccatcaccttcttcggcctggcaaggatgcggt

SEQ ID NO: 7197 - DNA, 562 bp, Homo sapiens
  misc_feature (477)..(477): "n" may be a, t, c, g, other or unknown
  misc_feature (507)..(507): "n" may be a, t, c, g, other or unknown
  misc_feature (522)..(522): "n" may be a, t, c, g, other or unknown
  misc_feature (524)..(524): "n" may be a, t, c, g, other or unknown
agagaacactcaccaaagctcaagaagcagtgactattcaggatgattacagaggtaagagaaactaggaattgttactaggagcacctgatatatcaaaatgaaataaatggcacccagctctcctagcacaaaccctacctctcaggggagtccagcagtctcttcctcctgataacatttttccatttattctaggtcataggccctacatagctatgagagggagaccaggagactgaatgtgcctggcaatagctatcttccataggaatggctcattaagaatatcatttcatgtcagatgggtagactgtatcgaataccatgagtggcaagggttctgcttggcaaggctctgtttcaaggactttcatgaccttatgtgatccagtacatgcattccccaattgcaatcactgcccactatcctcatcatccagcttcaattgagatgaggcataaaggtaagtctgnggacccttctagcagaaaaaaatgccaganggaatcacatgtgangnttttaaggctttactctggctgaactggggtaaaccta

SEQ ID NO: 7198 - DNA, 551 bp, Homo sapiens
  misc_feature (134)..(134): "n" may be a, t, c, g, other or unknown
  misc_feature (174)..(174): "n" may be a, t, c, g, other or unknown
  misc_feature (189)..(189): "n" may be a, t, c, g, other or unknown
  misc_feature (207)..(207): "n" may be a, t, c, g, other or unknown
  misc_feature (221)..(221): "n" may be a, t, c, g, other or unknown
  misc_feature (241)..(241): "n" may be a, t, c, g, other or unknown
  misc_feature (279)..(279): "n" may be a, t, c, g, other or unknown
  misc_feature (486)..(486): "n" may be a, t, c, g, other or unknown
  misc_feature (534)..(534): "n" may be a, t, c, g, other or unknown
cacgtttagtattttattatgaatcattatttcaaagtcccatactgcatattcatataaggcaacacggcacaatttcaggcttcatcacaaaggatgaaaaagactgtttctaactccctcctaatttgcanacatgcttgaacacttaatggaaggtgaagtttattttgnggcccctcagttctntttcaagtcctctagtanaaagtctccatggngtgatcttctgactgggtanaacccgcaattctctgctgtttttagtctttgttccanatgactaattacatgacttggctgcatttgtgaggggccgacaccaacacaattaaaccagtgcaccattcagggccatagggtaggaggcaccagggttcaagaaggaacttgcgtgttgtaggatctgagttggggcggctctattccgactatccatcgatctcctttcctcatcctcaaaagctttctcccggcattggcggnggcatcctgggactggtgggacctcggatcccaaggtcgtcatggtgntctccgcctcggggaac

SEQ ID NO: 7199 - DNA, 562 bp, Homo sapiens
  misc_feature (435)..(435): "n" may be a, t, c, g, other or unknown
  misc_feature (462)..(462): "n" may be a, t, c, g, other or unknown
  misc_feature (476)..(476): "n" may be a, t, c, g, other or unknown
  misc_feature (484)..(484): "n" may be a, t, c, g, other or unknown
  misc_feature (489)..(489): "n" may be a, t, c, g, other or unknown
  misc_feature (548)..(548): "n" may be a, t, c, g, other or unknown
cttttttcgattaagtctcgctttgtcacccaggctggagtgcagtggtgaaatctcagctcactgtaacctccacctcccgggttcaaacacttctcctgcctcagcctcccgagtagctggggttacagctgcgtgccaccatgcccagctaatttttgtatttttagtagagacggggtttcgccatgttggccaggctgatcttgaactcccgacctcaagtgatcagcctgccttggcctcccaaagtgctgggattacaggtgtgagccgccgcgcctggcctgcctttacttttgattttgtatattaagcacagctacattttagaaatcttaaccaaaggccttaaacgttcagaatacatttattcactcaactcagaataccttttccttggtaaattctgagttctaattttaaaagccctangtggcctttccgatgggtattacaggngtaaagggaaatgngatttggnaggtnaataacccttacccataaataaggatactagaagtaagacttacattttaaccaagttnaataatctaatagc

SEQ ID NO: 7200 - DNA, 567 bp, Homo sapiens
  misc_feature (378)..(378): "n" may be a, t, c, g, other or unknown
  misc_feature (435)..(435): "n" may be a, t, c, g, other or unknown
  misc_feature (477)..(477): "n" may be a, t, c, g, other or unknown
  misc_feature (522)..(522): "n" may be a, t, c, g, other or unknown
  misc_feature (536)..(537): "n" may be a, t, c, g, other or unknown
  misc_feature (552)..(552): "n" may be a, t, c, g, other or unknown
  misc_feature (567)..(567): "n" may be a, t, c, g, other or unknown
agcacattgagcctatgtgtcaaagccgttttcaacaccggcgtgtgctgattccatcctttcattgctaggcctgttcgtttttatttaagacttttattaacaggtgcttgcagtttgttacttttttgaaaaaatcaagttgtaaacttttatgacaaattaaaaatgaagttcttaaaaatctcaacttgagcagatatgaaataattttaaaacctttaaaggcgtattgagaaaaaccaggctttttaaaaaaacactttgttattaccaaaaagagacgtctttaggtaaaaataattggaaaccccatgccccacagataatgcagctagttctagttatctggtcagtggacgaaaagcaagcacttanggtcttcagctccaattttcgttcatttcttatcgctggaattcctagtcttggttngatgactaaaccgggtgatggtagaaggtaagcagcccgcanttgcccacctggaaccgaggaattcttaactggtgggacaactgnttctgggggctttnncatcttggggtttanggttttctgggccan

SEQ ID NO: 7201 - DNA, 562 bp, Homo sapiens
  misc_feature (456)..(456): "n" may be a, t, c, g, other or unknown
  misc_feature (468)..(468): "n" may be a, t, c, g, other or unknown
  misc_feature (485)..(485): "n" may be a, t, c, g, other or unknown
atacatgtatattatttattgttgattctgtacaccaaatggattacaagcagcatccagcagaagacagaccccccaaccctgcccaccagggctcacactctacaaaaccctgagggcctagaaatctgtaaatgcatcgccaagcactggggctgatttgcagtaattctctaagcaaggcaaacatgatctagctttgaaggcagcatgaaggcagcgggttggtgagaacaatctctccttaagagaagaagaaacctggggcggaaggagttttccccggaagtggcttgccagcccaccctctctgaaccacagccatggcttccttcccaaggccactgctggcttcccaacaacgcagattcagttctgactgtgggatctgggggctgaatctttgaatggtttatggctaaaagctaggatacatctaacatctggcgacaactntgggtcccgagntatctctaactggctgntctttggaaactttctgagttggaagttctttccaatagctttacatagcatctgaaaggttgtggaaattgggtcc

SEQ ID NO: 7202 - DNA, 564 bp, Homo sapiens
  misc_feature (452)..(452): "n" may be a, t, c, g, other or unknown
  misc_feature (482)..(482): "n" may be a, t, c, g, other or unknown
  misc_feature (527)..(527): "n" may be a, t, c, g, other or unknown
  misc_feature (532)..(532): "n" may be a, t, c, g, other or unknown
  misc_feature (549)..(549): "n" may be a, t, c, g, other or unknown
  misc_feature (558)..(558): "n" may be a, t, c, g, other or unknown
ggctttttatataaagaatttttattttcttttgtttaaaacacccatttattctctctcaattttcatggatcaggccgggcgcagtggctcacgcctgtaatcccagcactttgggaggccgaggttagcggatcatgaggtcaggagatggagaccatcctggctaacacagtgaaaccccatctctactaaaaatacaaaaaaattagccaggcgtggtggcgggcgcctgtagtcccagctacttgggaggctgaggcaggagaatggcatgaacctgggaggcagagcttgcagtgagctgagattgcgccactgcactccagcctgggcaacagagcgagactccgtctcaaaaaaagaaaaaaagaaaagaaaaagatattggcagaattcaactgtatgcaatggaaggacggaagtccctggttcctttgcttggctattgnctgggggcattcccagctactagagtctgnctgcatagaaatggtaggtagaagtcttctaacacttctctctgntctgntctcctttctaccttanctcttctgntttaac

SEQ ID NO: 7203 - DNA, 565 bp, Homo sapiens
  misc_feature (417)..(417): "n" may be a, t, c, g, other or unknown
  misc_feature (463)..(463): "n" may be a, t, c, g, other or unknown
  misc_feature (535)..(535): "n" may be a, t, c, g, other or unknown
  misc_feature (538)..(538): "n" may be a, t, c, g, other or unknown
  misc_feature (545)..(545): "n" may be a, t, c, g, other or unknown
  misc_feature (555)..(555): "n" may be a, t, c, g, other or unknown
  misc_feature (558)..(559): "n" may be a, t, c, g, other or unknown
  misc_feature (564)..(564): "n" may be a, t, c, g, other or unknown
ctttctctctctctctctttctctttctttttccttccttccttccatctttccctttctttctttctttctttctctctctttctttctttctttctctctttctttcagacagggtctcactctgtcccgcaggctggagtgcagcagtgccatcataactcactgcagcctcaaactcctggcctcaagtgatccttccacctcagcctctgaagtagccaggatcacaggcatgcaccaccacacccagctaatttttagattttgtggttgttgttgagataaggcctcactgtgttgcctaggctagtctcaaactcctggcctcaagcgatcctccttcctcagccttccaaagtgctgggtgtataggcgtgagccaccacactcagcctgaaatccttttgaagttgnattatgatgatcaccattttacagataaggaaacaaaatcagaganggagtgtgactggccaaggacacaggccagacgtggctaagttgggattgggctcaaccaggctggattcanggnacaacantccaaatggnggnnggttnt

SEQ ID NO: 7204 - DNA, 564 bp, Homo sapiens
  misc_feature (444)..(444): "n" may be a, t, c, g, other or unknown
  misc_feature (473)..(473): "n" may be a, t, c, g, other or unknown
  misc_feature (478)..(478): "n" may be a, t, c, g, other or unknown
  misc_feature (523)..(523): "n" may be a, t, c, g, other or unknown
ggagtgagaatcctttaataactatatttatttccagagaacaataaatacagaaattgcaagcagtatatgtaacagtaatattttctttaaatacagaatcacctacttttatacaacttaacaggcaaacatgttattttgttgttgttgtttggaaattagcattgggaaaagctatataacagaggaaattccaagtaaaatcaaacagtgttcactcttaactctaaacacagtgctcccactactggttctgcattgaggcggaggggaaggccagaggcaggcttagcttcgggcggcagcggtctggggctgctcggactggagctgcttgccaaggtattcccagttgtgcaccatgagcttctgcacggccagcagagcattatagcggacctgctggtcttcatgatgcatgtggtcatgaccagctgcttnccaccgagctgctcgatgaccccgtttgnctcgnggataatgccgcaccatattcttccaacatcgtgagccagcaacnggttaaaacttggggacatctgccctttccaaagtttggca

SEQ ID NO: 7205 - DNA, 558 bp, Homo sapiens
  misc_feature (424)..(424): "n" may be a, t, c, g, other or unknown
  misc_feature (457)..(457): "n" may be a, t, c, g, other or unknown
  misc_feature (499)..(499): "n" may be a, t, c, g, other or unknown
  misc_feature (512)..(512): "n" may be a, t, c, g, other or unknown
  misc_feature (518)..(518): "n" may be a, t, c, g, other or unknown
  misc_feature (538)..(538): "n" may be a, t, c, g, other or unknown
  misc_feature (551)..(551): "n" may be a, t, c, g, other or unknown
ccattctccagggcagtgattctcaagctagatacacaacagaatcatctggaggacttgttaaaacagaatgctaagccccatccccagtctccaattctgtggatctggggcagagtccagtaatttgcatgtgtgatgccgctgctgctgctgttcttggaagcacaccttgagaaccactgcctggggaacagcttagctgctatgagaatctgattctgtgttcatattccgtatcacagatagctcttggcttttcaattgtggtttctttttttaatgtcttactaagggggaaaaaaaggaacgccactttatataaacctgaccttttggtaagcctgggtagtaacttcccatgtggagtaaattaatctctttcatgcatgcctcgtgctctggaaaaagtaaaacagattgngttagacatttaccaagtactttttctggtggnggtcactgccctaacctatcaaaactgggttctacccttaanaacttacatggantaaggnggcatccaacaaaccagacntggagtcatgggngaggggc

SEQ ID NO: 7206 - DNA, 480 bp, Homo sapiens
  misc_feature (21)..(21): "n" may be a, t, c, g, other or unknown
  misc_feature (55)..(55): "n" may be a, t, c, g, other or unknown
  misc_feature (108)..(108): "n" may be a, t, c, g, other or unknown
  misc_feature (112)..(112): "n" may be a, t, c, g, other or unknown
  misc_feature (208)..(208): "n" may be a, t, c, g, other or unknown
  misc_feature (226)..(226): "n" may be a, t, c, g, other or unknown
  misc_feature (265)..(265): "n" may be a, t, c, g, other or unknown
  misc_feature (293)..(293): "n" may be a, t, c, g, other or unknown
  misc_feature (325)..(325): "n" may be a, t, c, g, other or unknown
  misc_feature (359)..(359): "n" may be a, t, c, g, other or unknown
  misc_feature (361)..(361): "n" may be a, t, c, g, other or unknown
  misc_feature (385)..(385): "n" may be a, t, c, g, other or unknown
  misc_feature (389)..(389): "n" may be a, t, c, g, other or unknown
  misc_feature (391)..(391): "n" may be a, t, c, g, other or unknown
  misc_feature (426)..(426): "n" may be a, t, c, g, other or unknown
  misc_feature (440)..(440): "n" may be a, t, c, g, other or unknown
  misc_feature (468)..(468): "n" may be a, t, c, g, other or unknown
  misc_feature (475)..(475): "n" may be a, t, c, g, other or unknown
atgctgaaaatattccaaggnttattgaaaaaagaaaattaatctacagattcanaaagttcagtgagccccagccaagatgaatgcaaagaaagtcctatttaggcncatnatgggcagactgctgaaaatcaaagagagagaatgtggaaagcagctggggtgagtggggtgggaggagacaattatacataggaaaacaacgctncaaaagactgcagacttntcatagaatcaatgcaagtcagcaaacaatggaacggcntcgatggatctgccagtgtcagtcccanagcggaccccaaaagtgttcaggcgtggactngcactgtctgacatttccatcgatggcctgcatnangaatgggcggtgaacatcctcttncatntncactgggggtggaagggttgaacctgcccccccanaaggaagcccgttnccgaatcaaatggcttaagcttgggctnttgtggngcctt

SEQ ID NO: 7207 - DNA, 560 bp, Homo sapiens
  misc_feature (496)..(496): "n" may be a, t, c, g, other or unknown
  misc_feature (511)..(511): "n" may be a, t, c, g, other or unknown
  misc_feature (520)..(520): "n" may be a, t, c, g, other or unknown
  misc_feature (523)..(523): "n" may be a, t, c, g, other or unknown
  misc_feature (533)..(533): "n" may be a, t, c, g, other or unknown
  misc_feature (547)..(547): "n" may be a, t, c, g, other or unknown
  misc_feature (549)..(549): "n" may be a, t, c, g, other or unknown
cttttccattcagaaataatacttttggttgacttgaatgtttattggctaggactctaattgaggaaaaaaatacaaaaaaaggatgcaaaatattaattcctatttagaaggatttttttttctagatttcctgctactgctttactttcttgttgctgaaagaaaattattttgtcttcccgtgttctatttaaagtggagaataaaaatgccaaattaatgctatgtattaatgaagcagagataaatcctgtttggtaagaaaacctaaaggttcaattccaacccagctatcaaatctaaggctgatttttattggtttatttttgccttaaatgtattcaagcaatatttgttctaaaaaaaatttgtagggaggtagatatctttgtgaacaggttgagctctccttacaacgaacagcagcttctatctttcaatgcaatctggcagaaagactagctcatcacaaagcagaaaaggaattcattanttaaaggtgaaggantggccccanccnttagccgaanaaaattggctggcncngaaagaccggt

SEQ ID NO: 7208 - DNA, 558 bp, Homo sapiens
  misc_feature (446)..(446): "n" may be a, t, c, g, other or unknown
  misc_feature (489)..(489): "n" may be a, t, c, g, other or unknown
  misc_feature (498)..(498): "n" may be a, t, c, g, other or unknown
  misc_feature (502)..(502): "n" may be a, t, c, g, other or unknown
  misc_feature (533)..(533): "n" may be a, t, c, g, other or unknown
  misc_feature (541)..(541): "n" may be a, t, c, g, other or unknown
  misc_feature (546)..(546): "n" may be a, t, c, g, other or unknown
  misc_feature (558)..(558): "n" may be a, t, c, g, other or unknown
gagacacagtttcactctgctgcccagtctggagtgcagcgggcaccatctcagctcactgcaacctccacctcctggttcaagtgattctggtgcctcagcctccagagtaggaactacaggcatgtgccaccatgcccggcttattttttgtatttttagcagagacggggtttcaccatcttggccaggctggtctcgaactcctgacctcaggtgatccacccacctcagcctcccaaagtattgagattgcaggcgtgagccaccgcgcccggccaaaataataatatgttttttatcctgacaaacatgtacaatttagtgaaccactttggaactagtaccgtgcactttacgtatactttagattctgaatatacgaaaatcctaatattccagaggagtaacactggctagaaagttgcacaatgaaaattctatgncatttaacaagtttttggtatttttaagaaccccccaaggttntagaagccnggtnttgatagctagggccctggccttaaggcccnaggtctanatagncaaggaaaaatn

SEQ ID NO: 7209 - DNA, 154 bp, Homo sapiens
  misc_feature (124)..(124): "n" may be a, t, c, g, other or unknown
  misc_feature (128)..(128): "n" may be a, t, c, g, other or unknown
  misc_feature (132)..(132): "n" may be a, t, c, g, other or unknown
  misc_feature (145)..(146): "n" may be a, t, c, g, other or unknown
  misc_feature (152)..(153): "n" may be a, t, c, g, other or unknown
cttttgagatggagtcttgctctgcttcccaggctggggtgcagtggcgtgatctcggctcactgcaatatccaactcccggattcaagtgattatcttgacttaaccttctgagtagctgggncaanagantcgcgcgaacccnntaggcnna

SEQ ID NO: 7210 - DNA, 567 bp, Homo sapiens
  misc_feature (430)..(430): "n" may be a, t, c, g, other or unknown
  misc_feature (440)..(440): "n" may be a, t, c, g, other or unknown
  misc_feature (455)..(455): "n" may be a, t, c, g, other or unknown
  misc_feature (532)..(532): "n" may be a, t, c, g, other or unknown
  misc_feature (550)..(550): "n" may be a, t, c, g, other or unknown
  misc_feature (561)..(561): "n" may be a, t, c, g, other or unknown
  misc_feature (566)..(567): "n" may be a, t, c, g, other or unknown
aagccttatatttttaataaaaaataaacagtctctgacaagcagttttctgaatcccaaaacaaaggaaaagggagggggagaggtgaaggggtcagctagggtaaaggagtgaagaaggctcagattacccctgccattctgccagggcagaagggatcagagtctgccccaactgaagcaagaagaaaggtggtcagacttcagggaagacttcctgggagtcagcggtgcacgactggtaagggaagcaggagggagcagatccctgcatgaccctgggagaagggagtgttggtgtccaaagcggcagcttcagagtggagtttccaggagtggcatgttagcatatgattgtttagatgtttggtgttcattaccataggggtcctgggacaggcaggttttttagggtctcttgaaacactgngtttctgganggtccctggaatggncagaacttgaaggatcctcttcagggtcttcaatatcagtgtaggaaccagtcttgggggtagcccccaccttgttnaaaagctcatggcttggnaaaaagggagnccctnn

SEQ ID NO: 7211 - DNA, 540 bp, Homo sapiens
  misc_feature (3)..(3): "n" may be a, t, c, g, other or unknown
  misc_feature (113)..(113): "n" may be a, t, c, g, other or unknown
  misc_feature (168)..(168): "n" may be a, t, c, g, other or unknown
  misc_feature (170)..(170): "n" may be a, t, c, g, other or unknown
  misc_feature (221)..(221): "n" may be a, t, c, g, other or unknown
  misc_feature (288)..(288): "n" may be a, t, c, g, other or unknown
  misc_feature (293)..(293): "n" may be a, t, c, g, other or unknown
  misc_feature (302)..(302): "n" may be a, t, c, g, other or unknown
  misc_feature (378)..(378): "n" may be a, t, c, g, other or unknown
  misc_feature (404)..(404): "n" may be a, t, c, g, other or unknown
  misc_feature (447)..(447): "n" may be a, t, c, g, other or unknown
  misc_feature (466)..(466): "n" may be a, t, c, g, other or unknown
  misc_feature (470)..(470): "n" may be a, t, c, g, other or unknown
  misc_feature (497)..(497): "n" may be a, t, c, g, other or unknown
  misc_feature (503)..(503): "n" may be a, t, c, g, other or unknown
  misc_feature (517)..(517): "n" may be a, t, c, g, other or unknown
canatggagtatcactctgtcgcccaggctggagtgcactggtgcaatcttggctcactgcaacctccgccttctgggttcaagtgattctcctgcctcagcctccacagtanatgggactactggcatgcaccaccatgcctggctgatttttttttttttaagtananagggggtttcaccatgttggccaggctggtctcgaactcccaacctcaggngatccacctgccttggcctcccaaaatgctgggattacaggcatgagccacacccagccaatggaanaggcnctttttaanaatggaaaaaagtgcctgacatgactttcacttttccataaagagtggacgttttaactaaaggcaacaagaaacntaacatacaggagagaaaaactcatnccaaagggagagagaaaaagaataaagggggatcctgaaaaantgctactttaaaaggcatntgcnccctgataaaggatttgaccctctaanggggcncagttttttttacnctacgtcttttgggcttacccaa

SEQ ID NO: 7212 - DNA, 553 bp, Homo sapiens
  misc_feature (430)..(430): "n" may be a, t, c, g, other or unknown
  misc_feature (454)..(454): "n" may be a, t, c, g, other or unknown
  misc_feature (513)..(513): "n" may be a, t, c, g, other or unknown
  misc_feature (535)..(535): "n" may be a, t, c, g, other or unknown
gctctgtcaccaggctggagtgcagtggtgcgatctcggctcactgcagtctccgcctcgcgggttcaggcaattctgcctcacccttctgagtagctgggactacaggcatgccccaccatgcccagctaatttttgtatttttagtagagacggggtttcaccatgttggccaggatggtctcgatctctggaccttgtgatccgcctgcctcggcctcccaaagtgctgggattacaggcgtgagccaccacgcccagccaggcacttcaaattttttgtctctgtgtgtctgcgaataactgagaaagtgccacagtattgatttgggggttacaaacatattttagtgagtaggcaaattctcaaatacaaaatctatgaataaggatcaagtatacgttcatttggcattttaagtacccaagntccctcattatctgagggaggcancatatgaaacttaattagacttcttcttaacattaaaggaattatttgaaacaggatgntgttgcccagctggagtatagnggcccgactcggttaatg

SEQ ID NO: 7213 - DNA, 532 bp, Homo sapiens
  misc_feature (453)..(453): "n" may be a, t, c, g, other or unknown
  misc_feature (459)..(459): "n" may be a, t, c, g, other or unknown
  misc_feature (487)..(487): "n" may be a, t, c, g, other or unknown
  misc_feature (507)..(507): "n" may be a, t, c, g, other or unknown
  misc_feature (510)..(510): "n" may be a, t, c, g, other or unknown
  misc_feature (525)..(525): "n" may be a, t, c, g, other or unknown
  misc_feature (530)..(530): "n" may be a, t, c, g, other or unknown
gcgggaaggaggtaggagtcaagtccaataaataagtgtaaaaatattcagtacatggcatggttatttaatacaacagaatttgctctgagttggaaggacaggggtttcagcctatgtgtttatgatacaacaaagggacttttaggctgataaagttatggaacatgagacttcagtcttcttattaaatggccaaatggaccaagtgtttgcatgaaagctaatctttcctttcatgaaaaggaaattaaacccacttgctcccgaatgggatgattttcaggagtcctgagccatgttctggcagaaagctggggtctgtgaccataaagcaggactgctgtcatccaggcagataattattatcaggaacgcctaacattgcttctttctgcagtttcatgtgccttggtgaagatgtaagctttctgaagactaccttgcatcagnctttgngggctactccatatatgagaaatggaantttaaactagctttaggaanaanatgaacctttgaaancctgntt

SEQ ID NO: 7214 - DNA, 566 bp, Homo sapiens
  misc_feature (500)..(500): "n" may be a, t, c, g, other or unknown
  misc_feature (512)..(512): "n" may be a, t, c, g, other or unknown
  misc_feature (523)..(523): "n" may be a, t, c, g, other or unknown
  misc_feature (527)..(527): "n" may be a, t, c, g, other or unknown
  misc_feature (538)..(538): "n" may be a, t, c, g, other or unknown
  misc_feature (547)..(547): "n" may be a, t, c, g, other or unknown
  misc_feature (565)..(565): "n" may be a, t, c, g, other or unknown
gagatgttctccctctgtcatccaggctggagtgcagcggtgcaatctcagctcactgcaacctccacctcctgagttcaagcaattctcccgcctcagcctcccgagtagctgggtccacaggcacgtgccaccaggcccagccaatttttgcattcttaatagagacggggtttcaccatgttggtcaggctgatcttgaactcctgacctcaggtgatccacttgcttcggcctcccaaagtcctggggttacaggcgtgagctaccgtgcctggccttaagtatgtgaagtatcttgcacagtgtctggcacatatgaggtaacaaatatgaccaagtttgccccgagaattagtgacagggccaggactagagcccaggtctctggactctatgtcccagacatgattctttgatctcttggtggtagcagggttgcaactagtgtccaaactaatgcttggtgatgaggacagtggcttggttgaagtccatangggaactggcangcacaaccttncttnaggatcttggntggcaaagnttgcttttactgaggccng

SEQ ID NO: 7215 - DNA, 547 bp, Homo sapiens
  misc_feature (461)..(461): "n" may be a, t, c, g, other or unknown
  misc_feature (484)..(484): "n" may be a, t, c, g, other or unknown
  misc_feature (494)..(494): "n" may be a, t, c, g, other or unknown
  misc_feature (500)..(500): "n" may be a, t, c, g, other or unknown
  misc_feature (525)..(525): "n" may be a, t, c, g, other or unknown
  misc_feature (533)..(533): "n" may be a, t, c, g, other or unknown
  misc_feature (544)..(544): "n" may be a, t, c, g, other or unknown
cttgagacaggggtctcactcagtcacctaggctggggtacagtggcatgttcacagcttactgtagccttggcctcccaggctcaagtgatcctcctgcctcagcctcccaagtgactgggattacaggcatgagccaccatgcctggctaatttttgtatttttcgtagagacggggtctcaccatgttgcccaggctggttttgaactcctgggatcaagtgatccgctcgcctcgcctcccaaagtgctgggattacaggagtgagccactgcgcccacctctgctttcattttacctcatgtgctctacatagcaatcagtataatcccttaaaaatatagttctaacgtaggaacagaaaaccaaacactgcatgttctcacttataagtgggagctgaacgataagaacacatggacacactgtcgggggaacagcacgaactggggccccttngggggtgcaaggtggaaaggaanggagaacatnaggaanaatagcttatggatgctggggtaanacctaggngaccgggttanctg

SEQ ID NO: 7216 - DNA, 528 bp, Homo sapiens
  misc_feature (409)..(409): "n" may be a, t, c, g, other or unknown
  misc_feature (478)..(478): "n" may be a, t, c, g, other or unknown
  misc_feature (488)..(488): "n" may be a, t, c, g, other or unknown
  misc_feature (496)..(496): "n" may be a, t, c, g, other or unknown
  misc_feature (502)..(503): "n" may be a, t, c, g, other or unknown
  misc_feature (506)..(506): "n" may be a, t, c, g, other or unknown
  misc_feature (527)..(527): "n" may be a, t, c, g, other or unknown
atttttaaatggctttagtcaggctgccaagagtgatatcaggtttgattctcacatacataaatgccagtcccaaaaagcaactctaacttgtgcacctggcttaaaacaaaatgtactgaaaactttgtatttgttaattgggataacccacccattcaggcctcaattccctttggacttgcacgcgcacttcctacacacagaagtggcctgttatgcagcaataatcatagtgaaaagcagcaattccgtgaaggctccacagagaaatcgcgtttgcatttcaaacaagtttcctcaaagtaagcgtctttcgattaaatgaaatcacaattccagcttcttatccacagaaaacagcattcactatgtaacttactgctttttataagtgcataatttctgncacagttacccacatatttataccatttaacaatactaaggtaaataatggatttatgggttggttcangaaccctggngaccttgntgggcnnggntttacaagtttgggattttgng

SEQ ID NO: 7217 - DNA, 558 bp, Homo sapiens
  misc_feature (435)..(435): "n" may be a, t, c, g, other or unknown
  misc_feature (437)..(437): "n" may be a, t, c, g, other or unknown
  misc_feature (496)..(496): "n" may be a, t, c, g, other or unknown
  misc_feature (506)..(506): "n" may be a, t, c, g, other or unknown
  misc_feature (555)..(555): "n" may be a, t, c, g, other or unknown
ggagacaagctctcggtctgtcgcctaggctggagtgcagtggtgtctaagtgcttttttgaagcaagagtttaatcccttattgctaaattgtagatttttatttttatttttggtggtatatgtggactctaaaaattatatgttctctcttttttcaggttttctttgtggcctaagttatagttgatttttacaagttaagaaaataatatgaattatttatttgaagggtgctgttaaatatccattaatcattttttgattcgatttaattaaagcctctatatcttttatttactttttcatctgcttgctttattgaagtccaagggtggttgtgagtttattaagttacttttctccaacgttttacacaattatatttgcacaaactttgctctttaatcactgggccacccaagagtagcacananggtgctctttcaaggctctcttgggcagaaggaaaatcttccaccccaataaatcttgnttcccgttgngggggggggagcttatctgccaaaggggggtggcaattttttcccccgnggg

SEQ ID NO: 7218 - DNA, 545 bp, Homo sapiens
  misc_feature (416)..(416): "n" may be a, t, c, g, other or unknown
  misc_feature (421)..(421): "n" may be a, t, c, g, other or unknown
  misc_feature (440)..(440): "n" may be a, t, c, g, other or unknown
  misc_feature (476)..(476): "n" may be a, t, c, g, other or unknown
  misc_feature (495)..(495): "n" may be a, t, c, g, other or unknown
  misc_feature (506)..(506): "n" may be a, t, c, g, other or unknown
  misc_feature (523)..(523): "n" may be a, t, c, g, other or unknown
  misc_feature (531)..(531): "n" may be a, t, c, g, other or unknown
gagacggagtctctctctgtcacccaggctggagtgcagtggcacaatctcggctcactgcaacttctgccccccacccgccggattcaagcgattctcctgcctcagcctcctaagtagctgggattataggcgtgtaccaccacacccagctaatttttgtatttttagtagagatgggggtttcaccatgttggccaggctggtctcgaactcctgacctcgtgatctgcccacctggggctcccaaagtgctgggattacaggcgtgagccaccgcgcccggccgcatgtataatttcttaaccaaactggaaaacagcactgacattattgggtggtcatcttttttcatgtgtcactgatgaagtttgaatgttttgccctaaccccacctttcccatgagtcctctggntttgngtgattttgctaacttggngatttttaggaatgaatatgtcaagtgatagtaacnctaatgggatgaacaattnccaaatttcanttctatccaaatatttntttggaanaagggacccttttt

SEQ ID NO: 7219 - DNA, 553 bp, Homo sapiens
  misc_feature (450)..(450): "n" may be a, t, c, g, other or unknown
  misc_feature (517)..(517): "n" may be a, t, c, g, other or unknown
  misc_feature (519)..(519): "n" may be a, t, c, g, other or unknown
  misc_feature (528)..(528): "n" may be a, t, c, g, other or unknown
  misc_feature (544)..(544): "n" may be a, t, c, g, other or unknown
  misc_feature (547)..(547): "n" may be a, t, c, g, other or unknown
  misc_feature (553)..(553): "n" may be a, t, c, g, other or unknown
gcagggggagggggatggtgaggtaggggaggtgatgaatttaactgtactgaaaatggtacaaggaaatcaaactgcagaaaaaaacagttccacatttagttacattttagttttgggttttccccagacattgcaggccaaattagagttaagatgaggaaatcctttcagtcctcacagaccagacttggctttataaaacataatcaagtcccactatacaacctaggtgttaggaagcaactagagttttcaaggtagatctgggcaacacgcagacacctccatttctgaggctgaaggaaacatgcaccagtgctaactgccacgcatatgaaaaatgtgaactcctagcacggtgacagtagctgtatgctgaataccatttaatttaataagcatttgtttgttgaataccttatgcattcaaataacagagcacttctnatcaacaatgcttcagcctaccaggattctgaaaaggagtcccaaatagctcaattttacctttggnantttctgctnaaaaataaaagtgaanccncccctn

SEQ ID NO: 7220 - DNA, 542 bp, Homo sapiens
  misc_feature (108)..(108): "n" may be a, t, c, g, other or unknown
  misc_feature (168)..(168): "n" may be a, t, c, g, other or unknown
  misc_feature (185)..(185): "n" may be a, t, c, g, other or unknown
  misc_feature (246)..(246): "n" may be a, t, c, g, other or unknown
  misc_feature (448)..(448): "n" may be a, t, c, g, other or unknown
  misc_feature (450)..(450): "n" may be a, t, c, g, other or unknown
  misc_feature (466)..(466): "n" may be a, t, c, g, other or unknown
  misc_feature (470)..(470): "n" may be a, t, c, g, other or unknown
  misc_feature (483)..(483): "n" may be a, t, c, g, other or unknown
  misc_feature (502)..(502): "n" may be a, t, c, g, other or unknown
  misc_feature (509)..(509): "n" may be a, t, c, g, other or unknown
gagacggagtctcgctctgtcacccaggctggagtgcagtggcgcgatctcggctcattgcaagctccgcctcccgggttcacgccattctcctgcctcagcctccanagtagctgggactacaggcacccaccaccacgcccggctaatgttttgtatttttagtanagatggggtatcactgngttagccaggatgatctcgacctcctgacctcgtgatccgcctgcttcggcctcccaaagngctgggattacaggcgtgagccaccgcgcccggccctattttttgaaatcatatccatcttaaactcattgaatattcaaatatgaggcttggaaaacccacagcacagctggggcatgaaaatgggcttgttagacaagctgattcaactaggggggaaaaaagaggagggaagaaagcggcaatttatatgtgtgaaatncncaactgggaatcaagnttanctgtttggaaatnttccagctcattgggagtntttgaantccagaaaacttgggcttttaaagatgggggga

SEQ ID NO: 7221 - DNA, 444 bp, Homo sapiens
  misc_feature (75)..(75): "n" may be a, t, c, g, other or unknown
  misc_feature (110)..(110): "n" may be a, t, c, g, other or unknown
  misc_feature (162)..(162): "n" may be a, t, c, g, other or unknown
  misc_feature (173)..(173): "n" may be a, t, c, g, other or unknown
  misc_feature (196)..(196): "n" may be a, t, c, g, other or unknown
  misc_feature (211)..(211): "n" may be a, t, c, g, other or unknown
  misc_feature (230)..(230): "n" may be a, t, c, g, other or unknown
  misc_feature (233)..(233): "n" may be a, t, c, g, other or unknown
  misc_feature (272)..(272): "n" may be a, t, c, g, other or unknown
  misc_feature (309)..(309): "n" may be a, t, c, g, other or unknown
  misc_feature (362)..(362): "n" may be a, t, c, g, other or unknown
  misc_feature (380)..(380): "n" may be a, t, c, g, other or unknown
  misc_feature (407)..(407): "n" may be a, t, c, g, other or unknown
  misc_feature (410)..(410): "n" may be a, t, c, g, other or unknown
  misc_feature (413)..(413): "n" may be a, t, c, g, other or unknown
  misc_feature (432)..(432): "n" may be a, t, c, g, other or unknown
  misc_feature (442)..(442): "n" may be a, t, c, g, other or unknown
cttttgagactgagtcttgctctgtcgcccaggctggagtgcagtggcacgatcctggctcactgcacactctgnctcccaggttcacgccgttctccagcctcagcctntggggtagctgggaccacaggcgcgcaccaccatgtccagctatttttttgnatttttagtanagacggagggaaggtttcaccgngttagccaggatggnctcgatctcctgacctcgnganccgcctgccttggcctcccaaagtgctgggaccacaggngtgagccaccacgcccagcctaaatgtgactcaatgntaaattagtttgcattttaggctgggtgcaatggcttatgcctgtaatcccancactgtgggaaggcccangaaagcgggatcacttgagcccagganttnaanaccaacctgggcaacctangggaaacttngc

SEQ ID NO: 7222 - DNA, 549 bp, Homo sapiens
  misc_feature (513)..(513): "n" may be a, t, c, g, other or unknown
  misc_feature (532)..(532): "n" may be a, t, c, g, other or unknown
gaaatggaatctcgctctgtcacccaggctgaagtgcagtgtcacattctgactctacttagcctctgttctcaccagactctctgatttcatgttgttggagaattctggatgaatatttcagttcctgattattgcctgcattgtcagactgatttttttctacaagtagggtttgcagaaactggatggtcatgattaaagcccatgaatggaaagtaacaatgacataaaaagctttctctgtattcattttttaaatgctgagttttccccaattttagttatatacagttctgaagtatcacatacattctgataaagaacatgtaagatctaaccactatcagtatttagggaaagaacatcagattactgaaacaagacagccagtgccttgttaaagcagatatgaaagcaatgtctgagcacttagaggcaaacaatagaatccagtttcatcatattaattaagccaaatcctatttattaagagatattaaggggtctcanaatcttcaggagggcccanggtaagttacctgccca

SEQ ID NO: 7223 - DNA, 536 bp, Homo sapiens
  misc_feature (76)..(76): "n" may be a, t, c, g, other or unknown
  misc_feature (121)..(121): "n" may be a, t, c, g, other or unknown
  misc_feature (203)..(203): "n" may be a, t, c, g, other or unknown
  misc_feature (283)..(283): "n" may be a, t, c, g, other or unknown
  misc_feature (361)..(361): "n" may be a, t, c, g, other or unknown
  misc_feature (372)..(372): "n" may be a, t, c, g, other or unknown
  misc_feature (421)..(421): "n" may be a, t, c, g, other or unknown
  misc_feature (435)..(435): "n" may be a, t, c, g, other or unknown
  misc_feature (478)..(478): "n" may be a, t, c, g, other or unknown
  misc_feature (493)..(493): "n" may be a, t, c, g, other or unknown
  misc_feature (503)..(503): "n" may be a, t, c, g, other or unknown
  misc_feature (514)..(514): "n" may be a, t, c, g, other or unknown
aacatatcaaaatgacagcactttatttctttttttgagatggagtctcgctctgttgcccaggctggagtgcagnggcatgatctcagctcactgcaacttccgcctcctgggttcaagngattctcctacctcagcctcccgaatagctgggcttacaggcatgcaccaccatgcccggctcatttttgtatttttagtanagacagaatttcaccatgttggccaggctggtttcaaactcctgatctcaaatgatctgcctgccttggcctcccaaagngctgggattataggcgtgagccaccacgcccagccgacagcactttattttgatgaattctttggtgtcggataaggngtgtactttgnctaaatctttccccacattcaagacatttgtaaggcttttccccagtgngaattctctggggnttaatgagggtttgcactctgattgaaacgtttcccacaaacnggacatcctaagggnttttccccangggggattttnggggggttaaaaaggccaaccc

SEQ ID NO: 7224 - DNA, 131 bp, Homo sapiens
  misc_feature (119)..(119): "n" may be a, t, c, g, other or unknown
  misc_feature (121)..(123): "n" may be a, t, c, g, other or unknown
  misc_feature (127)..(127): "n" may be a, t, c, g, other or unknown
  misc_feature (129)..(130): "n" may be a, t, c, g, other or unknown
gagatggagtctcactctgtcacccaggctggggtgcagtggtgcgatctcagctcactgcaagctctgcctcctgggtttatgccattctcctgtttcagcttcccgagtagctgagncnnnagantnnc

SEQ ID NO: 7225 - DNA, 552 bp, Homo sapiens
  misc_feature (481)..(481): "n" may be a, t, c, g, other or unknown
  misc_feature (549)..(550): "n" may be a, t, c, g, other or unknown
  misc_feature (552)..(552): "n" may be a, t, c, g, other or unknown
gagacagagtttcactcttgttgcccaggctggagtacagtggcgtgatctcggctcaccacaacctccgcctcccaggttcaagtgattctcctgcctcagcctcccgagtagctggaattacaggcatgtgccgccacgtccggctaacttttgtatttttagtagagatggggtttctccatgttggtcaggctggtcatgaactcttgacctcaggtgaaccgcctgccttggcctcccaaagtgctgggattacaggcgggagccactgcgcctggcccagtacctacttcttagagtagtggtaaagaatacttaaactatcacacttcaccagcttacaacagggccaggcacatgggaagcaatcagttggtatcagtatttactatgactgatgccaccgccatgtcaccagtcaatggccttccttccctcctccaggatttactaacatacatgtttaatggggtaaccnttcttaaggtttccatggtaaacctttttctaggaaggaaaactggagttaacattgaaaactggggnncn

SEQ ID NO: 7226 - DNA, 547 bp, Homo sapiens
  misc_feature (425)..(425): "n" may be a, t, c, g, other or unknown
  misc_feature (435)..(435): "n" may be a, t, c, g, other or unknown
  misc_feature (451)..(451): "n" may be a, t, c, g, other or unknown
  misc_feature (479)..(479): "n" may be a, t, c, g, other or unknown
  misc_feature (487)..(487): "n" may be a, t, c, g, other or unknown
  misc_feature (495)..(495): "n" may be a, t, c, g, other or unknown
  misc_feature (523)..(523): "n" may be a, t, c, g, other or unknown
  misc_feature (533)..(533): "n" may be a, t, c, g, other or unknown
  misc_feature (537)..(537): "n" may be a, t, c, g, other or unknown
gagaaagggtctctcgctctgttgcccaggctggagtgcagtggcgtgatctcagctcactgcaacctctgcctccagggttcaagagattctcccaccttagcctccttagctgggaccacaggcacctgccaccacagccggctaatttttctattttttgtagagatggagtttcaccatgttgcccagggtggcctcgaactcctgacctcaagggatccgcccacctcagtttctcaaagtgctgggattacaagtgtaagccactgctccacatttaactccaatgatgctgagcacaacccagcactctaattacaaaaatttgttttgttataactgaacattccctttctattttagactttcttggctgaacatctctctcccccagccctattcattttcatcaccatcagatntaagaaaacncgagatcttataaagncaattttaaaaaccaggaccatggttgntaattcanggaaatgngaatttggaatccctatactcaggctgnggcaatcaancganttctgggtac

SEQ ID NO: 7227 - DNA, 553 bp, Homo sapiens
  misc_feature (399)..(399): "n" may be a, t, c, g, other or unknown
  misc_feature (451)..(451): "n" may be a, t, c, g, other or unknown
  misc_feature (492)..(492): "n" may be a, t, c, g, other or unknown
  misc_feature (501)..(501): "n" may be a, t, c, g, other or unknown
  misc_feature (530)..(530): "n" may be a, t, c, g, other or unknown
gcgacggagtttcgctcttgttgtccaggctggagtgcaatggcacaatcacagctcaccacaaccgccgcctccctggttcaagcaattctcctgcctcagcctcctgagtagctgggattataggcatgtgccaccacacccagctaattttgtatttttagtagagatggggtttctccatgtcggtcaggctggtctttaactcccaacctcaggggatccgcccacttcggcctctcaaagtgctgggattccaggcgtgagccaccgcgcccggccgggaaatccaattttacgtgaatcctacattacagtactaccttaagagcggcgtggagggcatcgtctcagctcaactacaccagatgcctgaaagggtgacgccaaggccccctntgcttttggaacttgacaaggtccaatggcacctgcaaacctgagtggcctngcctggggggaatttgctgaactgaaggggggaatggctanaataactgntttactgatgggactccggcttcctttangggacatccccaactgaatttgg

SEQ ID NO: 7228 - DNA, 570 bp, Homo sapiens
  misc_feature (443)..(443): "n" may be a, t, c, g, other or unknown
  misc_feature (488)..(488): "n" may be a, t, c, g, other or unknown
  misc_feature (529)..(529): "n" may be a, t, c, g, other or unknown
  misc_feature (564)..(564): "n" may be a, t, c, g, other or unknown
gagcatgttcaaagacagaagtgtaggcctgtgggctttggcactcaagtctgagtatggtgagccaaaaattgacgtatgcttgaggactgagtggggactcttaaatgctgttctgtgggaaaatcttctagaaggtagagttcatgaaatttccaaatatctcaatgttacaaaaactcaaaatggtggccatagtcataaagtatggcctccagtggatgagtggacgcgtggagttagaaataaggaaggtatctatttattttattttacgatttttttttgagacagagtcttactctgttgcccaggctggagtgcagtggtgtgatctcggcttactgcaacctctgcctcccgtatccaagcaatttgtcctgcctcaacctcccgagtagctgggattacaggcgcccgccatcaagctcagctaattttgnatttttatagagatgtcgtttcaccatgttggccagctaaaaatnccaaaaattaactgggcatggtggtgcaccctggaatcttnggcccctgggaagcttaacccggaaattctttgancccgga

SEQ ID NO: 7229 - DNA, 569 bp, Homo sapiens
  misc_feature (1)..(569): "n" may be a, t, c, g, other or unknown
nnnnnnnnnnnnnnnnnnnnnnnnnnnnnnnnnnnnnnnnnnnnnnnnnnnnnnnnnnnnnnnnnnnnnnnnnnnnnnnnnnnnnnnnnnnnnnnnnnnnnnnnnnnnnnnnnnnnnnnnnnnnnnnnnnnnnnnnnnnnnnnnnnnnnnnnnnnnnnnnnnnnnnnnnnnnnnnnnnnnnnnnnnnnnnnnnnnnnnnnnnnnnnnnnnnnnnnnnnnnnnnnnnnnnnnnnnnnnnnnnnnnnnnnnnnnnnnnnnnnnnnnnnnnnnnnnnnnnnnnnnnnnnnnnnnnnnnnnnnnnnnnnnnnnnnnnnnnnnnnnnnnnnnnnnnnnnnnnnnnnnnnnnnnnnnnnnnnnnnnnnnnnnnnnnnnnnnnnnnnnnnnnnnnnnnnnnnnnnnnnnnnnnnnnnnnnnnnnnnnnnnnnnnnnnnnnnnnnnnnnnnnnnnnnnnnnnnnnnnnnnnnnnnnnnnnnnnnnnnnnnnnnnnnnnnnnnnnnnnnnnnnnnnnnnnnnnnnnnnnnnnnnnnnnnnnnnnnnnnnnnnnnnnnnnnnnnnnnnnnnnnnnnnnn

SEQ ID NO: 7230 - DNA, 573 bp, Homo sapiens
  misc_feature (360)..(360): "n" may be a, t, c, g, other or unknown
  misc_feature (478)..(478): "n" may be a, t, c, g, other or unknown
  misc_feature (486)..(486): "n" may be a, t, c, g, other or unknown
  misc_feature (518)..(518): "n" may be a, t, c, g, other or unknown
  misc_feature (527)..(527): "n" may be a, t, c, g, other or unknown
  misc_feature (539)..(539): "n" may be a, t, c, g, other or unknown
  misc_feature (550)..(550): "n" may be a, t, c, g, other or unknown
  misc_feature (554)..(554): "n" may be a, t, c, g, other or unknown
gagactgattttcactcttgttgcccaggctgaagtgcaatggcacgatcttggctcacggcagcctccgcctcctgggttcaagcaattctcctgactcagcctccccagtagctgggattacaggcgcccgccaccatgcccagctaattctttgtatttttagtagagacagggtttcaccatgttggtcagactagtctcaaactcctgacttcaggtgatccacccgccctggcctcccaaagtgctgggattacaggcatgagccaccacgcccggcccattttagccatttttaagtgcacattcagtagtgctaggtatattcgcattgttgtgaaaaagatctcccaatgntttcatctggcaaaacaaactctgtacccattagacagctcccatttctgccttcccacaagcaaccaccattctactggttctatttatggaccccatattagtagaatcatatagnatttttcntttggaactgggcttatttcacttaacataanggtcttaanggtcatctatgntggggcatatnggangaattccttcctttttaaa

SEQ ID NO: 7231 - DNA, 573 bp, Homo sapiens
  misc_feature (452)..(452): "n" may be a, t, c, g, other or unknown
  misc_feature (483)..(483): "n" may be a, t, c, g, other or unknown
  misc_feature (506)..(506): "n" may be a, t, c, g, other or unknown
  misc_feature (508)..(508): "n" may be a, t, c, g, other or unknown
  misc_feature (514)..(514): "n" may be a, t, c, g, other or unknown
  misc_feature (547)..(547): "n" may be a, t, c, g, other or unknown
  misc_feature (562)..(562): "n" may be a, t, c, g, other or unknown
atcaatacaaagtcatttttatttttaaattagcaataaaataatcaagtttacatcaatttatcaagttaattgtcacaatcccaggtgtggtgcagtgggctggggtaaaacattttgctgtatctttcatgatgttcctgatttctctcttttttttttttctttttgagacagggtctcactctgttgcccaggctggagtgcagtggtacgatctcagctcgctgcaacccctgcctcccgggctcaagcgattctcccacctcagcctcctgagtagctgggattacaggcatgtgccaccacgcctggctaatttttgtatttttagtagagatgggggtttcaccatgttggctaggctggtctcgaactcctgacctcaggtcatccacccgcctcagcctccctaagtgctgtgattacaagcgtgttcctggtctctttgnatctgcgatataactgggaactctgccttantcctgagcaaggctttctatcangnccccangccacttaattaccgggttggagaatttacctncaaaatatgcccaanggaacactttc

SEQ ID NO: 7232 - DNA, 575 bp, Homo sapiens
  misc_feature (127)..(127): "n" may be a, t, c, g, other or unknown
  misc_feature (200)..(200): "n" may be a, t, c, g, other or unknown
  misc_feature (210)..(210): "n" may be a, t, c, g, other or unknown
  misc_feature (212)..(212): "n" may be a, t, c, g, other or unknown
  misc_feature (232)..(232): "n" may be a, t, c, g, other or unknown
  misc_feature (254)..(254): "n" may be a, t, c, g, other or unknown
  misc_feature (310)..(310): "n" may be a, t, c, g, other or unknown
  misc_feature (322)..(322): "n" may be a, t, c, g, other or unknown
  misc_feature (334)..(334): "n" may be a, t, c, g, other or unknown
  misc_feature (351)..(351): "n" may be a, t, c, g, other or unknown
  misc_feature (358)..(358): "n" may be a, t, c, g, other or unknown
  misc_feature (374)..(374): "n" may be a, t, c, g, other or unknown
  misc_feature (377)..(377): "n" may be a, t, c, g, other or unknown
  misc_feature (414)..(414): "n" may be a, t, c, g, other or unknown
  misc_feature (478)..(478): "n" may be a, t, c, g, other or unknown
  misc_feature (533)..(533): "n" may be a, t, c, g, other or unknown
  misc_feature (555)..(555): "n" may be a, t, c, g, other or unknown
  misc_feature (559)..(559): "n" may be a, t, c, g, other or unknown
  misc_feature (571)..(571): "n" may be a, t, c, g, other or unknown
ctttttttttttttttctgagacacgttctcactctgtcacccaggctggagtgcagcgccatgacctcagctcacagtagcctcaacctccttggctcaagcaatctcacccatttcagcctccanagtagctgggaccacaggcatgggccaacacacctggctatttttttttttttttttttttttttttgtaaanatggggtctntntgttacccaggctcctaacnccattttaaaaagataacaatntttgacaatatatcattaactgccacatgaaaggccttgataaatgctatggtcanaaggaaaagacncattttagctanaatgatcagaaaatcanagccaanatgggcatggggatanagngggaatgttagctatgccagtaataagaaagaatatntgcataaactggaaataggaaagggaggagaaaggggcaggataaaaggctggcaagcaaaggnaaattccaaggatagggattaggctaatctcagaaaaacctttgaagaaaattgnaaccctttttttccacaaaacntttnaaaaccttccgnaaag

SEQ ID NO: 7233 - DNA, 566 bp, Homo sapiens
  misc_feature (516)..(516): "n" may be a, t, c, g, other or unknown
  misc_feature (545)..(545): "n" may be a, t, c, g, other or unknown
  misc_feature (550)..(550): "n" may be a, t, c, g, other or unknown
cttttgagatggagtttcgctatttcactcaggctggagtggagtgaagtggcgtgatctctgctcactgcaacctgtacttcccgcattcaagcaattctcctgcctcagcctcccaagtagctgggattacaggtgcccaccaccacgctaggcaaattttgtatttttagtagagatggggtttcaccatgttggccaggctggtctcaaactcctgacctcaggtgatcctcttggacacctcagcctcccagagtgctaggattacaggcgtaagccactgtgcctcgcaacatttttcttcttaatgttcgtaggaggctaaaaagacagggaaatctttcctttaacacgttcttttaagcttttatttgtgcatgctgagcaatgtagcctgtaactattctgtggctacactgcaaaagctttcttctgacattaactctcagttccgtaactgcatgttaagcatacccctacctgggaaatatctcttctgggggaaaatccatngtgacagcattagaaccccgaccggatanaaggnctgtggaattcgaatt

SEQ ID NO: 7234 - DNA, 560 bp, Homo sapiens
  misc_feature (187)..(187): "n" may be a, t, c, g, other or unknown
  misc_feature (392)..(392): "n" may be a, t, c, g, other or unknown
  misc_feature (448)..(448): "n" may be a, t, c, g, other or unknown
  misc_feature (450)..(450): "n" may be a, t, c, g, other or unknown
  misc_feature (466)..(466): "n" may be a, t, c, g, other or unknown
  misc_feature (483)..(483): "n" may be a, t, c, g, other or unknown
  misc_feature (506)..(506): "n" may be a, t, c, g, other or unknown
  misc_feature (524)..(524): "n" may be a, t, c, g, other or unknown
  misc_feature (535)..(535): "n" may be a, t, c, g, other or unknown
gagattgagtctcactctgtcacccaggctggagtgcagtggcgcgatctcagctcactgtaagctctgcctcctgggtgcacgccattctcctgcctcagcctcccaagtagctgggactacaggcacccgccaccacacctggctaattttttttgcacttttagtagagacggggtttcactgngttagccaggatggtctcgatctcctgaccttgtgatccacctgccttggcctcccaaagtgctggggattagaggcgtgagccaccgcgcccggcgacagtgatttctttgaggctagccattggctctttcacttctgcatttccagcagttagtttgggttgacagcatccagcacaggataggtgctaaagggaaatttgncatggataggaagggatgctccaatttggcttctgagaaccaggaatcagaaacangngctcttcggtggctgngctaacataaattcaangaatggcagggattcacaagccnaattggttgggacatccngccatatggcntggaattggtttttaaaaaatatca

SEQ ID NO: 7235 - DNA, 568 bp, Homo sapiens; identical to SEQ ID NO: 5581
  misc_feature (1)..(568): "n" may be a, t, c, g, other or unknown

SEQ ID NO: 7236 - DNA, 564 bp, Homo sapiens
  misc_feature (467)..(467): "n" may be a, t, c, g, other or unknown
  misc_feature (483)..(483): "n" may be a, t, c, g, other or unknown
  misc_feature (533)..(533): "n" may be a, t, c, g, other or unknown
  misc_feature (546)..(546): "n" may be a, t, c, g, other or unknown
  misc_feature (563)..(563): "n" may be a, t, c, g, other or unknown
aacaattgagaaactacttaaagtgaacctaaaatggtgtgagcctgaagtgcttgctgggcagcagacaagctttgccagccttgtgttctcagtggaaatgcagcatccgagccatcctctcttccccccgcttgtggtcagctctaaatagcacactcacagcgcggggggaaaatatttttccctgtttcaagtgggcagtggaagtagtgaaagcctaagtaaactctgaccattagataatgggccattataactctggatgacttcctgaaggaccctgaaaaatgacttctcatttcctgcctgcagaaaagagaaatattaggatagtgttgtgtgcaaaaaaatgcaagcttgcaatgagagatgcagagtgtgagggagagaggcacgaagggggtggagaaaaaagacagagaatttgaggttgactcacggctttgaagggaaaacaggaagangaagaaagtctgtctnccatgggtcggcaacccacactttacacattttttccatggggcttgccncttgccgcccatnacaacttgggcttgccnc

SEQ ID NO: 7237 - DNA, 551 bp, Homo sapiens
  misc_feature (186)..(186): "n" may be a, t, c, g, other or unknown
  misc_feature (341)..(341): "n" may be a, t, c, g, other or unknown
  misc_feature (352)..(352): "n" may be a, t, c, g, other or unknown
  misc_feature (354)..(354): "n" may be a, t, c, g, other or unknown
  misc_feature (444)..(444): "n" may be a, t, c, g, other or unknown
  misc_feature (453)..(453): "n" may be a, t, c, g, other or unknown
  misc_feature (481)..(481): "n" may be a, t, c, g, other or unknown
  misc_feature (488)..(488): "n" may be a, t, c, g, other or unknown
  misc_feature (515)..(515): "n" may be a, t, c, g, other or unknown
  misc_feature (529)..(529): "n" may be a, t, c, g, other or unknown
  misc_feature (539)..(539): "n" may be a, t, c, g, other or unknown
  misc_feature (551)..(551): "n" may be a, t, c, g, other or unknown
caggggggacacgggtcttattctgtcacccaggctggagttcagtggtatgatcactgcacctcccaggctcaggtgatcctcccacctcagcctcccgggtagctgggactacaggtgtgtgctgccatcctcggctaatcttttgttttctgtttcctttttttttttttttttttttttganatggagttttgctcttgttgcccaggctggagtgcagtggcgtggtctcggctcactgcaatctccacctcctgggttcaagcgattctcctgccccagcctcccaagtagctgggattacaggtgcctgccaccacgcccagctaattttttgnatttttagtananatgggtttcaccatcttggccaggctggctcgactcctgacctcatgatccgcccgcttggcctccaaagcgctggggattacaggtgtnaaccactgngcccaaccattttggaatttttttgganacagctnttggtccgttgcccaacttgaatccanggggcaaatttaanttactggaancttgcctctggn

SEQ ID NO: 7238 - DNA, 551 bp, Homo sapiens
  misc_feature (174)..(174): "n" may be a, t, c, g, other or unknown
  misc_feature (188)..(188): "n" may be a, t, c, g, other or unknown
  misc_feature (234)..(234): "n" may be a, t, c, g, other or unknown
  misc_feature (253)..(253): "n" may be a, t, c, g, other or unknown
  misc_feature (258)..(258): "n" may be a, t, c, g, other or unknown
  misc_feature (260)..(260): "n" may be a, t, c, g, other or unknown
  misc_feature (282)..(282): "n" may be a, t, c, g, other or unknown
  misc_feature (339)..(339): "n" may be a, t, c, g, other or unknown
  misc_feature (472)..(472): "n" may be a, t, c, g, other or unknown
  misc_feature (497)..(497): "n" may be a, t, c, g, other or unknown
  misc_feature (516)..(516): "n" may be a, t, c, g, other or unknown
  misc_feature (524)..(524): "n" may be a, t, c, g, other or unknown
  misc_feature (545)..(545): "n" may be a, t, c, g, other or unknown
  misc_feature (551)..(551): "n" may be a, t, c, g, other or unknown
gagacggagtctcgctctgtcacccaggctggagtacaatggcgcgatctccgcccactacaagctccgtctcctgggttcacgccattctcctgcctcagcctctcaagtagctgggactacaggcacccgccactacgcccagctaattttttttttttttttttttttganatggagtcttgctntgtcgcccaggctggagcaacaaaaataaacttaattcctcttggncaaccagttaccaatctgnacctntntcaccctcagttctcaattctnttccaaagatttgcatataagttgatatctggttatgctctgatctaccagtcttgnaatactagtgtgtgagaaagaaacctgcctgccacaatttgcttaccaactatttgaacataacaccctctatattagccctaagaaattctcaactaagtcatgtgacaagaattcctctatttgaacaatnattccaaaccaggatttcactgggntcaattttcaggggtttanccctttgnttaagcccccaggaagttttnaaaaan

SEQ ID NO: 7239 - DNA, 543 bp, Homo sapiens
  misc_feature (452)..(452): "n" may be a, t, c, g, other or unknown
  misc_feature (488)..(488): "n" may be a, t, c, g, other or unknown
aatcataaaagagttagattttgtcaaatacttttcttatatcagctgaaataatcatgtggttttctttctcttcattctgttaatgcggtgtattacactgattttcttatgttgaactacccttgcattcctgtaataaatcttgctttgtcatactgtataatacttttaatattctgttacattgagtttgccattattttattgagaattttttacatttacagtcatatggaaatattgctttttttttttcttgtggtgtctttaggtagctttggtatacatgtaataattgctccatagaatgagttaaaaagtgttcctttttagggaagaaaacttttttaaaaaggaggtttgggtgtcattattcttttcattttttttaaacagagtttgctcttggtgcccacctggaatgcaatggcccaatctcagctcactgnacctcggcttccggatcaagcaatctccggcttaanctccaggacctggatacaagcatgcgccaccatgccggctaattttttggattta

SEQ ID NO: 7240 - DNA, 581 bp, Homo sapiens
  misc_feature (389)..(389): "n" may be a, t, c, g, other or unknown
  misc_feature (410)..(410): "n" may be a, t, c, g, other or unknown
  misc_feature (417)..(417): "n" may be a, t, c, g, other or unknown
  misc_feature (421)..(421): "n" may be a, t, c, g, other or unknown
  misc_feature (466)..(466): "n" may be a, t, c, g, other or unknown
  misc_feature (480)..(480): "n" may be a, t, c, g, other or unknown
  misc_feature (497)..(497): "n" may be a, t, c, g, other or unknown
  misc_feature (533)..(533): "n" may be a, t, c, g, other or unknown
  misc_feature (550)..(550): "n" may be a, t, c, g, other or unknown
  misc_feature (562)..(562): "n" may be a, t, c, g, other or unknown
  misc_feature (568)..(568): "n" may be a, t, c, g, other or unknown
ccaagacagagtctcactctgtcgcccaggctggagtgcagtggtgagctcagctcactgcaacctctgcctcccgggtttaagcaactctcctgcctcagcctcccaagtggctgggattacaggcatgtgctaccacacctggctaatttttgtattgttagtagagatggggtttcaccatgttgtccaggctggtctcgaactcctggcctcaggtgacccgcccaccttagcctcccaaagtgctgggattacaggcatgagccaccacgcctggcctttgtttcgttttttgtttgtttgtttgtttttgagacacagtttcactctgtcacccaggctggagtgtagtgttgcaatctcaagcttaatgcaaactccacctnctgggttcaagtgattcttgngcctcancctnttcgaagtagctgagattacaggaagtggtaccaccatgcccggnttaattttttggantattaagtaagaagacngggctttcacccatggtttggccggggttgggcttnaaacttcctggagcttnaagtggatccancccatnttggggctttcca

SEQ ID NO: 7241 - DNA, 570 bp, Homo sapiens
  misc_feature (445)..(445): "n" may be a, t, c, g, other or unknown
  misc_feature (474)..(474): "n" may be a, t, c, g, other or unknown
  misc_feature (551)..(551): "n" may be a, t, c, g, other or unknown
  misc_feature (561)..(561): "n" may be a, t, c, g, other or unknown
gagacgaagtttcattcttgttgcccaggctgcagtacaatggtggaatctcggctcaacacaacctcttacctcccgggttcaagtgattttcttgcctcagcctcctgagtagctgggattataagcatgcaccaccacaccggctaatattttgtattttcagtagagacagggtttctccatgttggtcaggctggtctcgaactcctgacctcaggtgatccgccccgcctcagcctcccgaagtgctcggattacaggcgtgagccaccacgcccggccaaggtttccattttctgtgctactccaaaatcctctcccttgcatgtcatggaatgcagccagcctaacttcctaaactcaaaaacatcccattgaaattcctggtactcaaggctcctgctcccacggtaggacaagcttcaggctcccccaagtgcantgtgggccaggagctcgaactattcctgngttggcctgggtcaagctggtgaagtctgattctttctcgctagaagcaggaaaaaggggggcaagtttgaaatggnactatgggtnctggaagcc

SEQ ID NO: 7242 - DNA, 433 bp, Homo sapiens
  misc_feature (306)..(306): "n" may be a, t, c, g, other or unknown
  misc_feature (319)..(319): "n" may be a, t, c, g, other or unknown
  misc_feature (350)..(350): "n" may be a, t, c, g, other or unknown
  misc_feature (392)..(392): "n" may be a, t, c, g, other or unknown
  misc_feature (414)..(414): "n" may be a, t, c, g, other or unknown
  misc_feature (418)..(418): "n" may be a, t, c, g, other or unknown
  misc_feature (425)..(425): "n" may be a, t, c, g, other or unknown
  misc_feature (429)..(429): "n" may be a, t, c, g, other or unknown
  misc_feature (432)..(432): "n" may be a, t, c, g, other or unknown
gggacagagtctcactttgtagtacaggctggaatgcaatggtgcgatctcggctaactgcaacctccacctcccaggttcaagcgattctcgtgcctcagcctccctagaagctgtgatcacaggcgcccgccaccacacctggcttttttttttttttgagacagagtctcattctgtcgcccaggctggggtgcagtggcgcgatctcggctcactgccagctctgcctcccgggttcaggccattctcctgcctcagcctcctgagtagccgcccggctgatttgtttttttttttttttgnagttttagtaganatggggcctcaccatgttagcctagttttgnatttttttttagtaaaaaatggagtttcaccatgttggccanactggcttgaactcctgacctnaagngatctgnccgnctna

SEQ ID NO: 7243 - DNA, 557 bp, Homo sapiens
  misc_feature (457)..(457): "n" may be a, t, c, g, other or unknown
  misc_feature (488)..(488): "n" may be a, t, c, g, other or unknown
  misc_feature (544)..(544): "n" may be a, t, c, g, other or unknown
cttagcaaatattttattaatacacactgtcatagtcctaggatagaagagtcctcagaacactgctccacattgaagatgctgaaatgggtggtcaggtccttagtcttccttctagtctgttaaccccacactcctttaacagaaccatgcttgctgcccttaccctgtccacatccctgaaaggaaacgggtctctctcagccagatgcagatagttgacactcactgcctttgctatggcagggggctccttatgattaacccagaacaggaaaaacttagtgtcagctgaccgaaaggaactcagccttaatttttcaaaaagtcactctcattccagctatctccaggaaggcgctggagtatcttcagcatgagcacagagattcccactgccgaaatattcggaatactttccttgatttctcagagagactcatggagtccgtttcanctggctggctagactggttgtgccccaagangatggtcaacactggttttcaacctggctctgctggggccctggcatctgggtcanttccccattctcc

SEQ ID NO: 7244 - DNA, 555 bp, Homo sapiens
  misc_feature (381)..(381): "n" may be a, t, c, g, other or unknown
  misc_feature (464)..(464): "n" may be a, t, c, g, other or unknown
  misc_feature (505)..(505): "n" may be a, t, c, g, other or unknown
  misc_feature (509)..(509): "n" may be a, t, c, g, other or unknown
ggagatggagtttcgctcttgttggcaggctggagtgctatggtgagatcctggctcactgcaacctccgtctcctaggttcaagcgattctcctgcctgaggcttcccgagtagctgggattacaggcatgcgccgccacgcctggctaattttgtatttttagtagagacagggtttctccatgttggtcaggctggtctcgaactcccgacctcaggtatctgccagcctcggcctcccaaagtgctgggattacaggtgtgagctaccatgcctggcccaaagacctcttctttagtttcattcttatttaaaataatatgacgacgagcaagaatcctgtttccagcttaacaggcattaggagagaaaaaagatnaactaaacaggactggaggctgactaactggggggtaggcaggaaggagaatttcaactgtcagaataagaagggaaaagctngaaggcagacaaccggaccacctggaaatgacccaatgctnttanccagggacttaacttccatcatggatttaaaagcccccagaaatac

SEQ ID NO: 7245 - DNA, 501 bp, Homo sapiens
  misc_feature (352)..(352): "n" may be a, t, c, g, other or unknown
  misc_feature (354)..(354): "n" may be a, t, c, g, other or unknown
  misc_feature (437)..(437): "n" may be a, t, c, g, other or unknown
  misc_feature (449)..(449): "n" may be a, t, c, g, other or unknown
  misc_feature (476)..(476): "n" may be a, t, c, g, other or unknown
  misc_feature (478)..(479): "n" may be a, t, c, g, other or unknown
  misc_feature (493)..(493): "n" may be a, t, c, g, other or unknown
  misc_feature (499)..(499): "n" may be a, t, c, g, other or unknown
aaaaaacaaaaatggattgccaacctcccctaccatagagtgtctaactcagaagcatgaactggcgtggcatatgcctgttgcctatgtatagtttctcagtataaagcttttctgaattgtcagattctgtggacatttggaggctaggaggtaagattccaaaaccagcatgtcaaccaaagccaataataaggcctctcaaatacctaccacatatctgaagagaaacttttaacagttttcactatatatttaaaacaaaaagtcagaagagtaaaaaagtcccattttaaactgtatatataccatcttaattcttgtgttggactatagtaaataacaaaatcangncaggtgcagtggctcacgcctgtaatcccagcactttgggaggccgaggcggcagatcacgaggtcaggagatcaagaccatnctggcgaacacnggggaaaccccgtccctactaaaaatncnnaagattggcccggnggtggngg

SEQ ID NO: 7246 - DNA, 563 bp, Homo sapiens
  misc_feature (500)..(500): "n" may be a, t, c, g, other or unknown
  misc_feature (506)..(506): "n" may be a, t, c, g, other or unknown
  misc_feature (526)..(527): "n" may be a, t, c, g, other or unknown
  misc_feature (563)..(563): "n" may be a, t, c, g, other or unknown
atgaagaaaagaggtttaattaactcacagttctgcaggctgtacaggaagcatggctgcgaggcctcaagaaacttacagtcatggcagaagggcgaagggaaagcaagcaccttcttcacatggcagagggagagagcaagcaaagggggaagtgctacacacttaaccagatctcatgagaactcactgtcatgagaacagcaagggggaaatctgcccccatgatccaatcacctcccaccaggctctacctccaagactcaggatcacaattcaacatgagatttgggtggggggacacagccaaaccatatcattccaccctggcccctcccaaatctcatgtcctcacatttcaaaacacaatcatgccttcccaatagccccctaaagtcttaactcattccagcattaactcaaatgtccaagtcaagtctcatctgagaccagccaagtcccttccttctgtgagcctgtaaaatcaaaaaccagtcagntatttncaagatccaatgggggatcnngcattgggtaaatgctcccattccaaataggagaan

SEQ ID NO: 7247 - DNA, 566 bp, Homo sapiens
  misc_feature (508)..(508): "n" may be a, t, c, g, other or unknown
  misc_feature (518)..(518): "n" may be a, t, c, g, other or unknown
  misc_feature (524)..(524): "n" may be a, t, c, g, other or unknown
  misc_feature (530)..(530): "n" may be a, t, c, g, other or unknown
gacagagtttcgctctttgttgcccaggctggcgtgcagtggcacaatctcagctcactgcaacttccgcctcctgggttcaagcaattctcctgtctcagcatcccgagtagctgggattacaaacacccaccatcacgcctggctaatttttgtatttttagtagagacggggtttcaccatgttggtcaggctggtctcgaactcctgacctcgtgatccgcctgccccggcctcccaaagtgctgggattacaagcgtgagccaccacacccagcaataataggtaacttctaagacccatagccagtaagacgcccagctaggatgtgaactccagtcctgtctgagaacacctctcccactcccctggattgccttgatgccttgagtcaggacctcaggagtgcacgcctctggaaagtccttagcacaggcaagctgtgccccgaagtggatgcagtcattctgggaataccgggaaaagtgggaatgcaagggaacatncacatttaangggtangtgganaaacgggaaggaacccgaaccagcccggaaggtagg

SEQ ID NO: 7248 - DNA, 545 bp, Homo sapiens
  misc_feature (3)..(3): "n" may be a, t, c, g, other or unknown
  misc_feature (5)..(5): "n" may be a, t, c, g, other or unknown
  misc_feature (22)..(22): "n" may be a, t, c, g, other or unknown
  misc_feature (41)..(41): "n" may be a, t, c, g, other or unknown
  misc_feature (87)..(87): "n" may be a, t, c, g, other or unknown
  misc_feature (148)..(148): "n" may be a, t, c, g, other or unknown
  misc_feature (168)..(168): "n" may be a, t, c, g, other or unknown
  misc_feature (170)..(170): "n" may be a, t, c, g, other or unknown
  misc_feature (221)..(221): "n" may be a, t, c, g, other or unknown
  misc_feature (275)..(275): "n" may be a, t, c, g, other or unknown
  misc_feature (316)..(316): "n" may be a, t, c, g, other or unknown
  misc_feature (468)..(468): "n" may be a, t, c, g, other or unknown
  misc_feature (473)..(473): "n" may be a, t, c, g, other or unknown
  misc_feature (492)..(493): "n" may be a, t, c, g, other or unknown
  misc_feature (519)..(519): "n" may be a, t, c, g, other or unknown
  misc_feature (535)..(535): "n" may be a, t, c, g, other or unknown
  misc_feature (544)..(544): "n" may be a, t, c, g, other or unknown
gananagggtctcactccctgngcccaggctggagtgcagnggcatgatcttggctcactgcagcctcaacctccccaagctcaggngattctcctacctcagcctcctgagtagctgggaatacaggcgtgtgccgtcatcctgggngatttttgtattttttgtananacggggtttcaccatgttgcccaggctggtctggaactcctgggctcaagngattcacccgcctcagccttctgaagtgctggcattacaggcatgagccatggngccagccccaaattttctcttcttattaggacactattcanattgtattagggctcatgccaatggcttcatttactctaaattacctctttaaagcccttatctcctaatatatccacattctgcagtactggagggtagggcttcaacatacacatttttggagaacacaatttaccccataacaaccagncaatncccagtaaccaaaaaaaanncctggaatttgagggaaactcaaagnggttgggaagaaactnttgggggcnc

SEQ ID NO: 7249 - DNA, 561 bp, Homo sapiens
  misc_feature (451)..(451): "n" may be a, t, c, g, other or unknown
  misc_feature (482)..(482): "n" may be a, t, c, g, other or unknown
  misc_feature (489)..(489): "n" may be a, t, c, g, other or unknown
  misc_feature (492)..(492): "n" may be a, t, c, g, other or unknown
  misc_feature (513)..(513): "n" may be a, t, c, g, other or unknown
  misc_feature (529)..(529): "n" may be a, t, c, g, other or unknown
  misc_feature (556)..(556): "n" may be a, t, c, g, other or unknown
gagacggagtctcgctctgtcacccaggctggagtgcagtggcgcgatctcggctcactgcaggctctgcccccccgggttcacgccattctcctgcctcagtctcccgagtaggtgggactacaggcgcccaccaccatgcctggctaattttttgtatttttagcagtgacggggcttccccgtgttagccaggatggtctcgatctcctgacctcgtgatctgcccgcctcggcctcccaaagtgctgggattacaggcataagccactgcgcccggcctagtttttaatttttaaagctataattcacataaccataatattcactctttaaaagtacacaatccagtgttttttgctatattcacaaaattgtacaatcatcaccattatctaagttctggaatattttcatcactccaaaaagaaatcccatacccattagctgncacttcctattatctttcccttaaaattctnggaaccnctnatctatattggggttaaaganctggcttaactggaantttacatgaatgggataatccagaagnggttt

SEQ ID NO: 7250 - DNA, 560 bp, Homo sapiens
  misc_feature (423)..(425): "n" may be a, t, c, g, other or unknown
  misc_feature (430)..(431): "n" may be a, t, c, g, other or unknown
  misc_feature (474)..(474): "n" may be a, t, c, g, other or unknown
  misc_feature (479)..(479): "n" may be a, t, c, g, other or unknown
  misc_feature (534)..(534): "n" may be a, t, c, g, other or unknown
  misc_feature (557)..(557): "n" may be a, t, c, g, other or unknown
ctagcagatttctagcagtatcttctgtcactggagattgcgctgcatttttaagagcctttctctggaggctctcaaggacttctgatgccctctcagcactcatagcattccttaacacatcactcaagagtctacatgatttggccccaagatacttttcaaagttcatttctcagttcataatagcccccatcaaattactcatgttattgtactctgtttccaccccttccattttttttcttatgtttatgcctttctttttggttcctgctcctgccttgatctacacccatctgattttctaaactgtatgaagtgtctagtagagtgcctgggacatagcaattgctctatacgtggcagatgttattatctgaggttcctaagtggatcaacccaaggtatgttctttatttnnntattnntttattttttgggatggaatctcattccattgcccagctggantgcantgtgcaatggtgaaatcttagttactggaacctcggctcctggggtcaagggatnctgggactacagggccccccacntgc

SEQ ID NO: 7251 - DNA, 487 bp, Homo sapiens
  misc_feature (394)..(394): "n" may be a, t, c, g, other or unknown
  misc_feature (405)..(405): "n" may be a, t, c, g, other or unknown
  misc_feature (438)..(438): "n" may be a, t, c, g, other or unknown
  misc_feature (442)..(442): "n" may be a, t, c, g, other or unknown
  misc_feature (451)..(451): "n" may be a, t, c, g, other or unknown
  misc_feature (474)..(474): "n" may be a, t, c, g, other or unknown
  misc_feature (476)..(476): "n" may be a, t, c, g, other or unknown
gagacagggtctcgctctgttacccaggctggggtgaagtggcatgatcatggctcactgcaaccttgacctctcaggctcaagtgatcctcccacctcagcctcccaagtagctgggactacaggcacacaccaacacacctggctaatttttaaatttttttgtagagacagggtctcactatattgcctaaactgatcttgatctcctggactcaagcgatcctcccaccttggcctcccaaagtgctgggattacaggtgtaaaccgccgtgcccagcaatttttaattttttgtagagatgggatctccctttgtttgttgcccaagctggtctcaaactcctgggctcaagcgatcctcctgcgtcagccttccaaagtgagattacnggtagaaaccncttaaaaacaattttttatcttcagcttttaangggnacatatgcnggatgtgcaaggttggtacatangnaaaaggtgtgg

SEQ ID NO: 7252 - DNA, 556 bp, Homo sapiens
  misc_feature (537)..(537): "n" may be a, t, c, g, other or unknown
  misc_feature (539)..(539): "n" may be a, t, c, g, other or unknown
  misc_feature (545)..(545): "n" may be a, t, c, g, other or unknown
gagacagggtctctctctgttgcccagactgaagtacaccggcatgatcatagctcactgcagcctcaaattcccggcttcaagtgatcctctcaactcggcatcccaaagtgctggaattacaggtgtgagtcattgtacctggccagtcaaccattgcttaaagcgaaatatttctctacattgctcatatatagttcacaaatttaaagcaatactttcaaatgtaaactaatgcaaaatatgaaaaaaatgttttcattagtgagatgcataagaagataccactttatacccattaggatgactattattaaaaaagacagtgttggcaaggacatgaagaaaatggaacccttacacattgatggtggaaacaaaaatagtatagctactgttgaagacagtcaggcggtcctcaaaatattaaacacagaattattttatgacccagcaattcccttctaagatcccccaaagaactggaagcggaaatgcaacatatctggcattagggtcatagcagtatcccatagncncaaggngtaactcaaac

SEQ ID NO: 7253 - DNA, 495 bp, Homo sapiens
  misc_feature (17)..(17): "n" may be a, t, c, g, other or unknown
  misc_feature (67)..(67): "n" may be a, t, c, g, other or unknown
  misc_feature (85)..(85): "n" may be a, t, c, g, other or unknown
  misc_feature (114)..(114): "n" may be a, t, c, g, other or unknown
  misc_feature (167)..(167): "n" may be a, t, c, g, other or unknown
  misc_feature (250)..(250): "n" may be a, t, c, g, other or unknown
  misc_feature (359)..(359): "n" may be a, t, c, g, other or unknown
  misc_feature (389)..(389): "n" may be a, t, c, g, other or unknown
  misc_feature (391)..(391): "n" may be a, t, c, g, other or unknown
  misc_feature (416)..(416): "n" may be a, t, c, g, other or unknown
  misc_feature (425)..(425): "n" may be a, t, c, g, other or unknown
  misc_feature (451)..(452): "n" may be a, t, c, g, other or unknown
  misc_feature (482)..(482): "n" may be a, t, c, g, other or unknown
  misc_feature (489)..(489): "n" may be a, t, c, g, other or unknown
  misc_feature (495)..(495): "n" may be a, t, c, g, other or unknown
gagacagagtctcactntgtcacccaggctggagtacaggggcatgatctcggctcattgcaacctntgcctcccgggttcaagngattctcctgcctcagcctcccgagtagnggggattacaggcgcccaccaccacgtccggctgatgtttgtatttttagtanagacggagtttcgccatgtcggcggggctgatcttgaactcctgacctcaggtcaggatccacccgcctcggcttcccaaagngctgggattacaagcgtgagccactgcgcctggcccaaacatcttttattttgaaaaggtaaaattggaaaaaagttgcttggtgggaccgcccgcggagcgaagggcnaacccgcgctggcccctgcgtctggggccncnatgctgacccccggggttcaacctnaaccaggancccggatttctgacattggcatccgnnggcctatgccccggcttcgagttcaacggntaacttnaggggn

SEQ ID NO: 7254 - DNA, 564 bp, Homo sapiens
  misc_feature (336)..(336): "n" may be a, t, c, g, other or unknown
  misc_feature (493)..(493): "n" may be a, t, c, g, other or unknown
  misc_feature (517)..(517): "n" may be a, t, c, g, other or unknown
  misc_feature (526)..(526): "n" may be a, t, c, g, other or unknown
  misc_feature (541)..(541): "n" may be a, t, c, g, other or unknown
  misc_feature (549)..(549): "n" may be a, t, c, g, other or unknown
  misc_feature (554)..(554): "n" may be a, t, c, g, other or unknown
agacggagtcttgctctgttgccaggctggagtgcaagtggcgtgatctcagctcactgcaacctctgtctcccaggttcaagtgattcccctgcctcagcctcccgagtagctgggactacaggcacgtgccagcacgcccagctaattttttgtattttagtagagacggggtttcaccatgttggccaggatggtctagatctcctgacctcctgatccacccacctcggcctcccaaagtgctaggattacaggtgtgagccactgtgctgggccgcaaatttctcttttgtgggagaagccactttagaagtatatatctacataccttgnctaagtcaatgtgttgctataaaggaatacctgaggctgggtaatctatacagaaaagaagggttatttggctctcgggtctgcaacctgcacgggaccatggcactgacatttgcttggggtttggaaaaggcctcatgaagctttcacttctggnggaagggaaaaaggttaaaggganccggcgttncaaaaatcccttggnaaaagccnaaccngaaaaaacct

SEQ ID NO: 7255 - DNA, 562 bp, Homo sapiens
  misc_feature (428)..(428): "n" may be a, t, c, g, other or unknown
  misc_feature (456)..(456): "n" may be a, t, c, g, other or unknown
  misc_feature (473)..(473): "n" may be a, t, c, g, other or unknown
  misc_feature (492)..(492): "n" may be a, t, c, g, other or unknown
  misc_feature (518)..(518): "n" may be a, t, c, g, other or unknown
  misc_feature (551)..(551): "n" may be a, t, c, g, other or unknown
  misc_feature (553)..(553): "n" may be a, t, c, g, other or unknown
  misc_feature (556)..(556): "n" may be a, t, c, g, other or unknown
  misc_feature (562)..(562): "n" may be a, t, c, g, other or unknown
gacacatgtttagtcattaaagcttggagaggtcaaactaacagtcacactggatctgaataatgtccaaagcagcacagtaagtagccggtgttaatctgttgctaatttttttgatggaggtgtaaaagaaaggcaagaaaatctaattggctgtatttgggataaaattatagtgttatattttctggacaagaagatggaacagtggcaaagagatgctttaagaatccacagtactggcccatctagccgtatggatgccaacagcacattcttcactgggcctgctatttaatttgcatgcttcttgtgacacttgttccatgatatttcagagtagcttctcttaaagaagcatatattgtaaaccacagcacatccagaaaagtcgctctaccaaatcctctttcaacctcaactcttgnggccataatatggtcagtgtaacctcangccctgggctccctaangggcctaggtggaactcancggaggccttttaccactatgcaacntaaggacagatcacattccctgagcctcagttncntgnaaaaan

SEQ ID NO: 7256 - DNA, 520 bp, Homo sapiens
  misc_feature (450)..(450): "n" may be a, t, c, g, other or unknown
  misc_feature (459)..(459): "n" may be a, t, c, g, other or unknown
  misc_feature (468)..(468): "n" may be a, t, c, g, other or unknown
  misc_feature (477)..(477): "n" may be a, t, c, g, other or unknown
  misc_feature (479)..(479): "n" may be a, t, c, g, other or unknown
  misc_feature (489)..(489): "n" may be a, t, c, g, other or unknown
  misc_feature (514)..(514): "n" may be a, t, c, g, other or unknown
gcaggttaatctgtttattttttcaaaacaaaactaaaaatcgccactcaatgtatctgagcagactgcctgatcacagttaaaagctttctgtaatgcgcagcaggaacgtcatagcctggtggtcagaaatgagtgcttctggcgctgctggactgtggcccgcagcctgagcaccccttcttctcctccctctgctcatattgtctttgtgctgccatccagtcagcagcggacagccagcccaatgctgctcaggtctgtggcatccagagataaaaggcgtctccgctccccgcaggtttctgctttgccacctggtggggtacgcgcctggcacgccacccccactggaggtcctgaatggtccacagagaaggcgtggggcaaggcctcaagtgctgatgctctgagaataaaaattaaaaggcagctcttgcctgaagcgtnaccccacanggctcaatncttggctgngncctctggggnccaaggtgggcacatggttcggggnaataat

SEQ ID NO: 7257 - DNA, 573 bp, Homo sapiens
  misc_feature (498)..(498): "n" may be a, t, c, g, other or unknown
  misc_feature (506)..(506): "n" may be a, t, c, g, other or unknown
  misc_feature (515)..(515): "n" may be a, t, c, g, other or unknown
  misc_feature (522)..(522): "n" may be a, t, c, g, other or unknown
  misc_feature (532)..(532): "n" may be a, t, c, g, other or unknown
  misc_feature (558)..(558): "n" may be a, t, c, g, other or unknown
  misc_feature (573)..(573): "n" may be a, t, c, g, other or unknown
aacgataccacttcccagatttcaacaagtgtgacaaggcatttaaatcaaatcttttgtggggcagggattaaggaccacagctgcaccacagtcctgggctgactcatggccagtcaccacgtctctgcagccttttcacagaagtacaaaagtgttttctttgtggagacaggacttaatttgatgcatttcaaccctgtctaaattcccctctttatgggccagacagatatactgtcaaacaaattccaagtaagccaaacagaggctgagagaatttgtcagtggagaaaggcaagtttcacttattcttgatagactgagttccagatgggcagcagtgcctcagtaggtagagtgcccagcaaaggggcagaccctgcaccccactaagcactttctggggacctggcagcttgttcttaacctggaaaataagtccatgaagtcggcattattatcctcactttaccaaggaggaaagccagggttcanaggagatntccacttgncaatggncacttagccnggaatggacccaactgcttcatactnttccatgattttacn

SEQ ID NO: 7258 - DNA, 557 bp, Homo sapiens
  misc_feature (437)..(437): "n" may be a, t, c, g, other or unknown
  misc_feature (479)..(479): "n" may be a, t, c, g, other or unknown
  misc_feature (483)..(483): "n" may be a, t, c, g, other or unknown
  misc_feature (503)..(503): "n" may be a, t, c, g, other or unknown
  misc_feature (508)..(508): "n" may be a, t, c, g, other or unknown
  misc_feature (538)..(538): "n" may be a, t, c, g, other or unknown
  misc_feature (540)..(540): "n" may be a, t, c, g, other or unknown
  misc_feature (542)..(542): "n" may be a, t, c, g, other or unknown
gttgttgttgttttttttgagacagagtcttgctctgtcgtctaggctagagtgcagtggcgccacctcggctcactgcaacctccacctcctgggttcaagtgattttcctgcctcagcctcccgagtagctgggtttacaggtgctcgccaccacgcccggctaatttttgtttctttagtagggtttcaccgtgttggccaggctggtctcgaactgctgacctcgtgatctgcccaccttggcctcccaaagtggtgagattacaggcgtgagccactgcacctggctttttatttttttaactttgtatacggtattttctttttctgtatagaagtcaaactattttccttcatggattctggtttttgtctcttcattccaagaccatttaaaaaaatgtgttcacattttcctctgatacttttaaggnggctttctgaagataaaacctgatgtgtctgcaatgctagantgangcttgagtatggcaagcttnctgangtgcacctgtgaactgaggacaacatggcntntnaaggaaggacaatcc

SEQ ID NO: 7259 - DNA, 493 bp, Homo sapiens
  misc_feature (348)..(348): "n" may be a, t, c, g, other or unknown
  misc_feature (474)..(474): "n" may be a, t, c, g, other or unknown
  misc_feature (478)..(479): "n" may be a, t, c, g, other or unknown
  misc_feature (481)..(481): "n" may be a, t, c, g, other or unknown
  misc_feature (485)..(485): "n" may be a, t, c, g, other or unknown
  misc_feature (491)..(492): "n" may be a, t, c, g, other or unknown
gagatggcgtttcgccatgttgcccaggctggtcttgaactctgggactcaaacgatctgctcgccttggtctcccaaagtcccagctaatttttttttttttttttttttttttttgagacggagtctcgctctattgccaggctggagtgtagtggcgccatctcggctcactgcaacctctgccttgtggattcaagcaattctcctccctcagcctcccgagtagctgggactacaggtgtgcgccaccacgcccagctaatttttgtacttttagtagagacggggtttcagcatgttggccaggatggtctagatctcttgaccttgtgatccacccgcctnggcctcccaaagtgctgggattacaggtgtgagccaccacgcccggcccagctaatttttttaaaaaaagcttttagagatgggatcttgctatgttgcccaggccagtcttgaactcctggcctnaagnnancctnccgctnna

SEQ ID NO: 7260 - DNA, 567 bp, Homo sapiens
  misc_feature (383)..(383): "n" may be a, t, c, g, other or unknown
  misc_feature (532)..(532): "n" may be a, t, c, g, other or unknown
  misc_feature (548)..(548): "n" may be a, t, c, g, other or unknown
  misc_feature (554)..(554): "n" may be a, t, c, g, other or unknown
gagacagagcctcactctgttgctcaggctggagtgcagtggcacaaactcagctcatgacaacgtatgcctcccgggttcaagcgattctcacgcttcagccaactaagtagctgggatttcaggcatgcgccactcctggctgactttttctatttttagtagagacagagttttgccatgttggccaagctagtctcgaactcttggcctcaagcgatccgcccacctcagcctcccaaagtgctgggattacagacaggcgggagccacagtgcctggccttgcattaatttttaaaatgagaaataatacagtcttgctttcatttaaaactttttccaagaaaccatgagcaaacctgtgtttaccatatatactgnactgaatatttggacatcaccatttcaatgtaaagtcagatgctaataattaacacagactgaccaacactctgaaatgacttggtattttctaaaataccattaggtacagacctgaggaatgcttgggtcactttcattaacactgncaggagaattcaggcntgagtngatccttctaaaa

SEQ ID NO: 7261 - DNA, 570 bp, Homo sapiens
  misc_feature (513)..(513): "n" may be a, t, c, g, other or unknown
  misc_feature (519)..(519): "n" may be a, t, c, g, other or unknown
  misc_feature (532)..(532): "n" may be a, t, c, g, other or unknown
  misc_feature (552)..(552): "n" may be a, t, c, g, other or unknown
  misc_feature (554)..(554): "n" may be a, t, c, g, other or unknown
agggcttttttttttaatgtttcctcactgttttgacaatatcatgaaaaaaatcagtttagaatctggaattggcctggacgggattcgagggcagctggcgggggctgcatagcccctgaggttcctcccccaccatgggacctaagctattggaaacaggagcaccaacagggcaccgaacctggaactaagttagtgtctagagtcaggcaagagaggagagtcaggcaagagaggaggggccgggccacagtcgccatggggacgcccctggctgtggttggttctgtgtctccccctcccctcactggctacatggagacagggaggtgggtcaggctgttcccaggtcagaaaaataaccggcagtcaacctcagggctcatacccgagcttctgctcaatcccctcggggacagttacaggactcagagagaaacgtgaatttcagaaaaacaaatcatttttcacataagtgttccaaatattgcgtggggcatattaatgctngaaaantatctttggttanctgaaatttgcgtttaactnancacttttggtttgggt

SEQ ID NO: 7262 - DNA, 563 bp, Homo sapiens
  misc_feature (435)..(435): "n" may be a, t, c, g, other or unknown
  misc_feature (457)..(457): "n" may be a, t, c, g, other or unknown
  misc_feature (525)..(525): "n" may be a, t, c, g, other or unknown
ctgtatttttagtagagacggggtttcgccatgttggtcaggctggtctcgaactcccaacctcgtgatccgcctgcctaggactcccaaagtgctgggattacaggcgtgagccactgtgcccggccattatttcatttctttactggatatctttgcttgctaaagtctctgaatctgaggtctgctctttctgacaaacaagggtgagaggtgttaaaaataggctattatcaaagactttctcttgacttaccagaggcattgaaatggtatgaagaagggacattactttcactacatgactcaatgctacttaatctaccactcatggtaggaaaatgcttattgggataactctggcttaaataatgttcaaggttgggcttgcttcctcattaaaactgcataattggagaccatggtttgagtcantgctctctaacctttcccgtanagacatgctttcggttcctggggtttctcaatttactctaagaaccatgttaccatcattactccttnaaaaatattattggccatcgctatttgccaggcttggg

SEQ ID NO: 7263 - DNA, 554 bp, Homo sapiens
  misc_feature (336)..(336): "n" may be a, t, c, g, other or unknown
  misc_feature (528)..(528): "n" may be a, t, c, g, other or unknown
  misc_feature (538)..(538): "n" may be a, t, c, g, other or unknown
  misc_feature (546)..(546): "n" may be a, t, c, g, other or unknown
cctgagacagggtctcactctgtggcccaggctagagagcagtggcatgatcacagctcactgcagcctcgacctccctgactcaagtgatcctcttacctcagcctcccaagtagttgggactacaaatgtgcaccaccatacctggctaatttcttgtagagaacaggaggctgacttcaaactcatgggcttaagtgatcctcttgccttggcctcccaaagtgctgggattacaagcatgagccactgtgcctggactattatgaaattcttgaagtaaattcttcaattccagaagttcagttgatttcttctttaaaatagctattttgncttttagctcttgggctgttttacggaattccttgaataccttggattgggtttcaactttttcctggatcttgatgagctttgttgctacccagattctgaattctctgctgtccagtagtcattacaatctggttaaaaactactgctgatgggtaaaggggttggttcggcataaaaagacctttggcntttggaatgncacggttnttggcctg

SEQ ID NO: 7264 - DNA, 560 bp, Homo sapiens
  misc_feature (467)..(467): "n" may be a, t, c, g, other or unknown
  misc_feature (513)..(513): "n" may be a, t, c, g, other or unknown
  misc_feature (529)..(529): "n" may be a, t, c, g, other or unknown
  misc_feature (532)..(533): "n" may be a, t, c, g, other or unknown
  misc_feature (549)..(549): "n" may be a, t, c, g, other or unknown
  misc_feature (556)..(556): "n" may be a, t, c, g, other or unknown
gtgtgatagatttttttccctatccctttactttgaacctatgagtcctgttacatgtgagagaggtctcttgaagacagcagaaggctgggtcttgtttttaatccaatttgccactccaagtcttttaggtggggtgtttaggttgtttacattcaaggttaatattgagacatgaggctttattcctaacatggtgtcattagctggttgctctgtagtttggattgtgtagttgctttacagggtctgtgggctatgtgcttatgtgtatttttgtggtagcaggtgtcaccattctttcatttccatgtttagaactctcaagactctcttgtagggccagtctggtgataacaaattcttttagcagttgcttgtctgggaaagattttatttcttctttgctcatgtagcttagtttggcaggatatggaattcttggttaggatttttcttttttattnttttcttaaagagactgggtctcactatgggtttttgggttttggntttttggtttgagacnaanncttgctgtggtgccanctggaangcaa

SEQ ID NO: 7265 - DNA, 564 bp, Homo sapiens
  misc_feature (475)..(475): "n" may be a, t, c, g, other or unknown
  misc_feature (477)..(477): "n" may be a, t, c, g, other or unknown
  misc_feature (534)..(534): "n" may be a, t, c, g, other or unknown
  misc_feature (536)..(536): "n" may be a, t, c, g, other or unknown
  misc_feature (549)..(549): "n" may be a, t, c, g, other or unknown
  misc_feature (562)..(562): "n" may be a, t, c, g, other or unknown
agagggagtttcgctcttgtcacccaggctggagtgcaacggcgcaatcttggctcactgcaacctctgcctcccgggcccaagcgattctcctgcgttagtctctctagtagctgggattacaggcacacaccgccacgcctagccaatttttgtatttttagtagagatgaggtttcaccatgttggtcaagctggtctcaaactcctgacctcaggtgagtcatctgccttggcctcccacagtgctgcgattacaggcgtgagccactgcggcccgcctattttctttttctatatgagaaagggtgaaggtcaggtacgtggccaaggtcacatataaagcaaaaggcagggctgggttcctacgctactggttcaagttggcttcttccatctcttcacaaaactgagatgatggtaaccttggattaactggagctgaaatatgtgctagaatttccctttagacctncnaagcccagtgaaaattttatagggctctagaaaaaggggctttcttctaatatttangnatgacccaaaatnaatcatggtatcntt

SEQ ID NO: 7266 - DNA, 545 bp, Homo sapiens
  misc_feature (252)..(252): "n" may be a, t, c, g, other or unknown
  misc_feature (267)..(267): "n" may be a, t, c, g, other or unknown
  misc_feature (348)..(348): "n" may be a, t, c, g, other or unknown
  misc_feature (426)..(426): "n" may be a, t, c, g, other or unknown
  misc_feature (435)..(435): "n" may be a, t, c, g, other or unknown
  misc_feature (469)..(469): "n" may be a, t, c, g, other or unknown
  misc_feature (473)..(473): "n" may be a, t, c, g, other or unknown
  misc_feature (509)..(509): "n" may be a, t, c, g, other or unknown
  misc_feature (523)..(523): "n" may be a, t, c, g, other or unknown
  misc_feature (531)..(531): "n" may be a, t, c, g, other or unknown
  misc_feature (535)..(535): "n" may be a, t, c, g, other or unknown
  misc_feature (537)..(537): "n" may be a, t, c, g, other or unknown
gagacagagtctcaccatattgcccaggcttgagtgtagtggtgccatctcggctcactgcatcctccacctctgggttcaagtgattctgattctcctgcctcagcctccggagtagctgggattacaggcatgtaacaccatgcccagctaatttttgtatttttagtagagacagggtttcaccatgttggccaggctgctctcaaactcctgagctcaagtaatctgcccgcctcggcctcccaaagngctgagattacaggngtgaaccaccacacccggcccaagagtttttatagagcttaatccccatcccctattccctgccgccctgacccccacctngccaaaggtctgtggactgagctgaatggtctaaccctctacttacttgatttttcttggagacaggcccaaccttangctatctangggcacatgctgcacctcattagcttaaactcanggtntgatcaaaaaggggcttattttgactaacaaaaagngcttcggcacttcnggaaaatntaangntttttggg

SEQ ID NO: 7267 - DNA, 564 bp, Homo sapiens
  misc_feature (507)..(507): "n" may be a, t, c, g, other or unknown
  misc_feature (513)..(513): "n" may be a, t, c, g, other or unknown
  misc_feature (538)..(538): "n" may be a, t, c, g, other or unknown
  misc_feature (543)..(543): "n" may be a, t, c, g, other or unknown
  misc_feature (545)..(545): "n" may be a, t, c, g, other or unknown
  misc_feature (548)..(548): "n" may be a, t, c, g, other or unknown
  misc_feature (557)..(557): "n" may be a, t, c, g, other or unknown
gaggcagagtcttgctctgtagctcaggctggagtacagtggcatgctcgcagcttaccgcaacctttgcctcccgggttcaagtgattcttgtctcagcctcctgagtagctacatgtgcctgtcaccacacctggttaatttttgtatttttagtagagatagggttttgccatgttggccaggctggtctcaaactcctgacctcaaatgattgcccaccttggcctcctaaagtgctgggattataggcgtgagccactgggcccagccagaaattcatccttttgtcacctgctctgagtaaaccacactatggaaagctttctcttcactggctaaatcagtaaactgtgtccacttctaaaagccatccagagagaaagatgctgattgctttggaagcattaaaggtcaagtttcagcaacttaacacttaacaggagccaagagaaataaggaaaaacatcacttccaaaacaagttggcacacaccaagcataaccngaactntttaaattaagataatcccaatggnaagantnccnaaactggcntttggaa

SEQ ID NO: 7268 - DNA, 565 bp, Homo sapiens
  misc_feature (321)..(321): "n" may be a, t, c, g, other or unknown
  misc_feature (437)..(437): "n" may be a, t, c, g, other or unknown
  misc_feature (482)..(482): "n" may be a, t, c, g, other or unknown
  misc_feature (498)..(498): "n" may be a, t, c, g, other or unknown
  misc_feature (511)..(511): "n" may be a, t, c, g, other or unknown
  misc_feature (517)..(517): "n" may be a, t, c, g, other or unknown
gtagagatgggggtctcactatgttgcccaggctggtctcaaacttctgagctcaagtgatcctccttcctcggtctcccaaagtgctaggattacaggcgcgagccaccgtgctcagccttttttgggtccaatcattcacccttccctgtatctaagcctttatcatgtaactttttcattccttcccaaagaggcaagtacagttgctcactccccaactgatctctggcttagctacataacttgctttagcaaatgagttgttaacagataaaacacaagcagggccttgaaatgtacttgcagacttgactttgntccttgtacctctgctatcaccactataggaaattctcctgggtaactgctgccccttcgacccaggtcccagaataaatacacgtggagcaaacaagctcttacctggagtgaangagccaagctagctagacttgcagactgaagcacaactgcactgntgagcccaattgaaangctggttcctaanccatgnacaagcactttaacaacctatggttccggtgggtattaattggaattt

SEQ ID NO: 7269 - DNA, 568 bp, Homo sapiens
  misc_feature (111)..(111): "n" may be a, t, c, g, other or unknown
  misc_feature (208)..(208): "n" may be a, t, c, g, other or unknown
  misc_feature (383)..(383): "n" may be a, t, c, g, other or unknown
  misc_feature (402)..(402): "n" may be a, t, c, g, other or unknown
  misc_feature (526)..(526): "n" may be a, t, c, g, other or unknown
  misc_feature (545)..(545): "n" may be a, t, c, g, other or unknown
  misc_feature (555)..(555): "n" may be a, t, c, g, other or unknown
aaccaataccccatctcttaaaaaaaaaaaaaaaagagatggggtattgctatgttgcctaggctcgactcaaattcctgggcctaagcagtcttctgcctcactctccanagtaggtggaactacaggcatgagacacagcatctacaggcatgagacacagcatcttcctgtctttttggctcctttagtcccatctttgtccctntgccccacccctacaggtttttttgttgttgttgtttttgggatggagtctcacactggcgcccaggctggagtgcagtggtgtgatctcggcttactgcaacctcctcccgggttcaagggagtctcctgcctcagcctcccaagtagctgggattacaggcacctgccaccgnacccagctaatttttttgnatttttagcagaaacgcggtttcactatgttggccaggctggctcaaactcctgacctcatgatctgcccgccttgggcttccaaagtgctggggatacaggcgtgagccaccgggcttgggcnggttggttggttttttganacagggcttnttgggcacccagc

SEQ ID NO: 7270 - DNA, 272 bp, Homo sapiens
  misc_feature (177)..(177): "n" may be a, t, c, g, other or unknown
  misc_feature (179)..(179): "n" may be a, t, c, g, other or unknown
  misc_feature (213)..(213): "n" may be a, t, c, g, other or unknown
  misc_feature (230)..(230): "n" may be a, t, c, g, other or unknown
  misc_feature (257)..(257): "n" may be a, t, c, g, other or unknown
  misc_feature (263)..(263): "n" may be a, t, c, g, other or unknown
  misc_feature (271)..(271): "n" may be a, t, c, g, other or unknown
gagacagggtttcactgtgtcacccaggctggagtgcaggggtacaaacaggctcactgcaacctctgcatcttgggttcaagcaattcttgtgcctcctgggtagctgtgattacaggtacatgccaccatgccctgcttttttttttttttttttttttttggtatttttagtananatggggtttcaccatgttggccaggctgatctcnaactcctggcctcaagngatccacccgcctcggcctcccaaagngctganattacagng

SEQ ID NO: 7271 - DNA, 544 bp, Homo sapiens
  misc_feature (16)..(16): "n" may be a, t, c, g, other or unknown
  misc_feature (44)..(44): "n" may be a, t, c, g, other or unknown
  misc_feature (83)..(83): "n" may be a, t, c, g, other or unknown
  misc_feature (110)..(110): "n" may be a, t, c, g, other or unknown
  misc_feature (131)..(131): "n" may be a, t, c, g, other or unknown
  misc_feature (156)..(156): "n" may be a, t, c, g, other or unknown
  misc_feature (187)..(187): "n" may be a, t, c, g, other or unknown
  misc_feature (280)..(280): "n" may be a, t, c, g, other or unknown
  misc_feature (376)..(376): "n" may be a, t, c, g, other or unknown
  misc_feature (453)..(453): "n" may be a, t, c, g, other or unknown
  misc_feature (463)..(463): "n" may be a, t, c, g, other or unknown
  misc_feature (517)..(517): "n" may be a, t, c, g, other or unknown
  misc_feature (519)..(519): "n" may be a, t, c, g, other or unknown
  misc_feature (524)..(524): "n" may be a, t, c, g, other or unknown
  misc_feature (540)..(540): "n" may be a, t, c, g, other or unknown
gcacaacacaaagagngaactttaatataaactatgaacactgnagctaataatgaatacaagttcatcagttgtaacaaagngccatgctaatgcaacatgctaattanagggggaaatatgcaaagaanaggagggatatgggaatccctttgngcctaatttttctgtaaacataaaactgctnttacaaataaagcctattaattaaaacaacaaaatacaaaacaacaactaaaaccaaaaacagccaacacccaatgggttgagctggagtaanaacaggctgcccagcacacttcctgggccactgagccctgggcgtgaaaagcaaacgggccagtgaggtttggctgggactcagctccccagcctntggctcaagcccgattacgaacacaaaggtcatctgattggatttcctgcccctcagctcacttaaggaggcttttntgccacaagntttggtgcaaaaagcaattggctaaagggatttgggacatccggctggggaatntnggganggttacctttaaagangccc

SEQ ID NO: 7272 - DNA, 547 bp, Homo sapiens
  misc_feature (465)..(465): "n" may be a, t, c, g, other or unknown
  misc_feature (477)..(477): "n" may be a, t, c, g, other or unknown
  misc_feature (492)..(492): "n" may be a, t, c, g, other or unknown
  misc_feature (495)..(495): "n" may be a, t, c, g, other or unknown
  misc_feature (511)..(511): "n" may be a, t, c, g, other or unknown
  misc_feature (516)..(516): "n" may be a, t, c, g, other or unknown
  misc_feature (537)..(537): "n" may be a, t, c, g, other or unknown
gagacagtctcactctgtcgcccaggctggagtacggtggcacgacctcggctcactgcaacctctgcctcctgggttcaagtgattctcctgcctcagcctcccaggtagctgggattataggcgtgcgtcaccacacccaactaattttttttctatttttagtagagacagggtttcaccatgttggccaggctggtctcgaactcctgacctcaggtgatccgcccgcctcggcctcccgaagtgctaggattacaggcgtgagccaccatacttggcccataattagctcctaataaccaaggcctggctcacgtctgccttgctcatgctctccccttcagcgagtgcggcttactaatgagtgaatctgattcctgccccacaacccaccaggagcagacacagacgcaggtgcacgccggcaggatgtgggtcgccgatgtggatctagcagcccgncaaacccgtcangcttccaattgcctncanggatcttaaggccggngcttnaccacctgggaggcctcctgnccttttctta

SEQ ID NO: 7273 - DNA, 569 bp, Homo sapiens
  misc_feature (498)..(498): "n" may be a, t, c, g, other or unknown
  misc_feature (511)..(511): "n" may be a, t, c, g, other or unknown
  misc_feature (532)..(532): "n" may be a, t, c, g, other or unknown
  misc_feature (547)..(547): "n" may be a, t, c, g, other or unknown
gagacggagtctcactttgttgcccaggctggagtgcagtggttcaatctgggctcactgcaacctctgcctcccacgttcaagtgattctcctgcctcagtctcctaagtagctgggattacaggcgcgtaccaccacacccagctaatttttctatttttagtagagacaggtttcatcatgttggtcaggctggtctcaaactcctgaccatgtgatctgcctgcctcggcctcccaaagagctgggattacaggcgtgagccaccactctcagcaggaggtttctattaaaaacaaatgagatggtatttgcaaactgtcagacattgcccaattgcattagtccattttcacactgctataaagaactacctgagactgagcaatttatgaagaaaaaaggtttaattgactcacagttctgcatggctggggaagccttaggaaacttactattatcattattttttgagaaaagcttactctggtacacangcttgaagtgcantggccaatcttggctcactgnaacctccattggcangttcaatcgatcttctgcctaa

SEQ ID NO: 7274 - DNA, 522 bp, Homo sapiens
  misc_feature (4)..(4): "n" may be a, t, c, g, other or unknown
  misc_feature (9)..(9): "n" may be a, t, c, g, other or unknown
  misc_feature (78)..(78): "n" may be a, t, c, g, other or unknown
  misc_feature (96)..(96): "n" may be a, t, c, g, other or unknown
  misc_feature (111)..(111): "n" may be a, t, c, g, other or unknown
  misc_feature (126)..(126): "n" may be a, t, c, g, other or unknown
  misc_feature (129)..(129): "n" may be a, t, c, g, other or unknown
  misc_feature (241)..(241): "n" may be a, t, c, g, other or unknown
  misc_feature (283)..(283): "n" may be a, t, c, g, other or unknown
  misc_feature (304)..(304): "n" may be a, t, c, g, other or unknown
  misc_feature (342)..(342): "n" may be a, t, c, g, other or unknown
  misc_feature (357)..(357): "n" may be a, t, c, g, other or unknown
  misc_feature (415)..(415): "n" may be a, t, c, g, other or unknown
  misc_feature (434)..(434): "n" may be a, t, c, g, other or unknown
  misc_feature (447)..(447): "n" may be a, t, c, g, other or unknown
  misc_feature (451)..(451): "n" may be a, t, c, g, other or unknown
  misc_feature (491)..(491): "n" may be a, t, c, g, other or unknown
  misc_feature (504)..(504): "n" may be a, t, c, g, other or unknown
  misc_feature (516)..(516): "n" may be a, t, c, g, other or unknown
  misc_feature (520)..(520): "n" may be a, t, c, g, other or unknown
ctgngtacncctggagcccacctgacatggagctttggactgctccacaagtctccagcatgcctttggaagcccttntttattgggaaataaatncagagttaaacaggngggccggccaacatntgnggctttggaggccaaaaggaaggagtctgacttgctcaaaactcaaatctccatgagctggtcattccccacgatcacctcattcactcgtttagctttggcttcaatcctntggccacttccaatcaagcagtccttgatgtctgcacccttntcgatcacagcattgttgcanatgacactgccttggatattgcttccttcctccacagngactgagttcatganaaggcaattggtaatagtcactctatcttttatgaaacaggatgagccaatgactgancgcttaatggatgactttntcaatctgggctntggnccaatgaggctgcaactccaaccaggggttgctgacaatntgggcttacaaanggctggggggtntttngg

SEQ ID NO: 7275 - DNA, 580 bp, Homo sapiens
  misc_feature (497)..(497): "n" may be a, t, c, g, other or unknown
  misc_feature (508)..(508): "n" may be a, t, c, g, other or unknown
  misc_feature (527)..(527): "n" may be a, t, c, g, other or unknown
  misc_feature (569)..(569): "n" may be a, t, c, g, other or unknown
cctgtgaggaacgtcactgtttcagaaatctgctcctaaatttccctgcagggagcatcagccacagagaagactttgctccagggactccccttaccctaggacacctgacctctgacttatagcaacctgtatcaattagatcactccatggcttccatagtgtcaacaggggagctgttagcacttggtctctgaggagcacgggttcaaggcaatgggaggctggcagcccagaagcttcagagctgccatttaggtgggagataaattaaggggcctggttggaagtgtgcactcaactaggggtcaggggtccactgtttctggttgggtggaaacatcttttgtgagtctggatagtgtcttaatttgaggaccttaatgttcagttgtgaatggcccttccttgcctcccagcgaggctggggagagaaagcactcccagatgatagataccttaagctgctttgaacctgagaagaagaaggtgcatnccaagtcacangatggtcattaatggtggnctgcattcttttcacatgtaaattaaacccctggcatacctngggtggggggg

SEQ ID NO: 7276 - DNA, 555 bp, Homo sapiens
  misc_feature (464)..(464): "n" may be a, t, c, g, other or unknown
  misc_feature (486)..(486): "n" may be a, t, c, g, other or unknown
  misc_feature (523)..(523): "n" may be a, t, c, g, other or unknown
  misc_feature (525)..(525): "n" may be a, t, c, g, other or unknown
  misc_feature (540)..(540): "n" may be a, t, c, g, other or unknown
  misc_feature (546)..(546): "n" may be a, t, c, g, other or unknown
  misc_feature (550)..(550): "n" may be a, t, c, g, other or unknown
gagacagagtcttgctctgtcgtccaggctggagtgcagtggcagaatcttggctcactgcaaccttcacctcctaggttcaagcgattctcctgcctcagcctcctgagcagctgggattgcaggtgcccgccaccacgtgcagctaatttttatatttttagtagagacaggatttcaccatgttggccaggctggtcttgaactcctgaactcaagcaatccacctgcctcagcctcccaaaatgctgggattacaggcgtgagccactgtgcccggccttcatctttattgctcaaaagcaaagatgccctttatacccgagtgactgtgcagaaaccaaaatgcatctgaaaatcaaagagcaaagctgttggctgggcagggaggacggcaggccaaagccccagccccaggtctgggcttcagccgtcggtccaggaggcccagcccaactgtccanaatgtgacaggacacccatgtncaggactttcagtcaggacacaaatccacaatggcangnccttgacaaggcttnggaaanccancttga

SEQ ID NO: 7277 - DNA, 582 bp, Homo sapiens
  misc_feature (526)..(526): "n" may be a, t, c, g, other or unknown
gagagatagtctcactctgtcgctcaggctggagtgcagtggcatgactcagctgcaacctctgcctcttgggttcaggcaagtctcctggcccagcctctcgagtaggtggtatcacgggcacatgccaccacgcttggctaatttttgtatttttagtagagatagggttttaccatgttggccaggctggtcttgaactcccaaccttaggtgagatataagattcttgaacttaagtaaaaatcttgtggttctagccaggcatggtggctcaaacctgtaacccttgcactttgggaggctgaggctgaggcgggcagatcacttgagcacaggagtttgagaccagcctgggcaacgtggtgaaaccatgtctctaccaaaacaaacaaacaaacaaaaaaattagccaggcatgatggcacatgcccgtagtcccagctactcgggaggctgagatgggagaattgcttgagcccagtaggcggaggttacagtgagcccagatcatgccattccactncagtctgggcaacagaccaagactttgtcccaaaaccaaccaaaccaaaaaaccct

SEQ ID NO: 7278 - DNA, 587 bp, Homo sapiens
  misc_feature (517)..(517): "n" may be a, t, c, g, other or unknown
  misc_feature (525)..(525): "n" may be a, t, c, g, other or unknown
  misc_feature (550)..(550): "n" may be a, t, c, g, other or unknown
  misc_feature (558)..(558): "n" may be a, t, c, g, other or unknown
  misc_feature (568)..(568): "n" may be a, t, c, g, other or unknown
  misc_feature (584)..(584): "n" may be a, t, c, g, other or unknown
caggctgggaatgtcactttatttggatttggttcgtggggtgggggtctcagaacaaactagaaggccttacataggcagctgggcccagccagctgggctcctgacccaggacttcattctggcctgtccccccaaagcatagcctccaccttctcacccttctccagaggagtctcctccacccccacaggagctgtggacaggccctgcagccctagggaaggaggaagggtcctgcaagtagacactaaggcacagcgcggcccaggggtcataagggctcttctggcggtggcatctgctggggcttccagctgggcgggggctccacgcaaccgctgaccatccagaagtagtttgggtgcacctggccctgcacggcctcgctaaccatcaattccccatccactgcaaacacacctttcccatccttgggctccaacggaaggcgaccacgggcacatataccaagtaggggcattcatactccatatgcctggcctttttccatggncaggaaanaggcgcaacaacatggcaccgaaanacttccgnccggacgtanaacaagatgcatgacncct

SEQ ID NO: 7279 - DNA, 583 bp, Homo sapiens
  misc_feature (498)..(498): "n" may be a, t, c, g, other or unknown
  misc_feature (552)..(552): "n" may be a, t, c, g, other or unknown
  misc_feature (556)..(556): "n" may be a, t, c, g, other or unknown
  misc_feature (573)..(573): "n" may be a, t, c, g, other or unknown
  misc_feature (582)..(582): "n" may be a, t, c, g, other or unknown
agcgcgtccttctgcctttaactgacattaccaattccactcacattcctagcagttcactttgtaataactggagatgtgtataaataatttgtacattttctatatagttcaataaaaaattgctttaactcccacctttacaatttattagttgtatgactttgggcaagttagaaattctctgagttataatttactcatctgtaaaatggggatcaagtttattatgaggatcaactctaattaagtactaatcccagtgtttactaccactgaatgttaaataaatattggttttcctcttccatccttccccatgcacaatccctgttccccaaaatggccaagatgatacaaattgttgaaaggcagacaaaccattgcatgggtccatacccagaaaagcctgttgggattctgtctttgaaatggcaataggtgttaagtgatgatgttattcattcagatcacaaaggaaaaattaaaataaaaacnaaaaccaacacaaggtatgagaagagaattgcttcaatctaagagaacctccanggcngagaatccagaactctntaaccatcng

SEQ ID NO: 7280 - DNA, 462 bp, Homo sapiens
  misc_feature (168)..(168): "n" may be a, t, c, g, other or unknown
  misc_feature (351)..(351): "n" may be a, t, c, g, other or unknown
  misc_feature (385)..(385): "n" may be a, t, c, g, other or unknown
  misc_feature (393)..(393): "n" may be a, t, c, g, other or unknown
  misc_feature (436)..(436): "n" may be a, t, c, g, other or unknown
  misc_feature (441)..(441): "n" may be a, t, c, g, other or unknown
  misc_feature (450)..(451): "n" may be a, t, c, g, other or unknown
  misc_feature (454)..(454): "n" may be a, t, c, g, other or unknown
gagacggaatttcacacctgttttccaggctggagtgcaatggcgcgtcttcagctcactgcaacctctgcctcccgggttcaagagattctcctgtctcagcctcccaagcagctgagaccacaggcattcgccaccatgcccagccaatttttgtactctcagcanaaatggggtttcaccatgttggccaggctggtctcaaacctctgacctcaggcaatccgcccgtgttggcctcccaaagtgctgggattacaggcatgagccactgcacccggccaacaaacttatttttgattattcaaataactaagctctaaaatggtttttctacactatatttgaggnataaaattggtattatcaataattttttggccangccacggnggctcacacctataatcccccagcactttgggaaggcaaaggnggcanatcacccgnnggncaggagtt

SEQ ID NO: 7281 - DNA, 338 bp, Homo sapiens
  misc_feature (277)..(277): "n" may be a, t, c, g, other or unknown
  misc_feature (286)..(286): "n" may be a, t, c, g, other or unknown
  misc_feature (295)..(295): "n" may be a, t, c, g, other or unknown
  misc_feature (311)..(311): "n" may be a, t, c, g, other or unknown
  misc_feature (318)..(318): "n" may be a, t, c, g, other or unknown
  misc_feature (320)..(320): "n" may be a, t, c, g, other or unknown
  misc_feature (325)..(325): "n" may be a, t, c, g, other or unknown
ccagttctctgggcagttcctgctggtcactgctttaatcagttgatgtggtaaggaaaggagtggtgctggtgccaccatgtggctggacactcagggcctcagccacactccacctcggggtcttccacatcggtttccgcggcacagaggtcatccagggctgcctcttcacagtccgtcacatcaggaagccctcggatgagcatgctgacccccggcatcacctggtcaaactgatgcaggacctccacgcagtgcatcatgaagagcttgnccttctgcnataggccgngcagcagcagcaccgngtcccgnanacagngcactgtccgcct

SEQ ID NO: 7282 - DNA, 575 bp, Homo sapiens
  misc_feature (530)..(530): "n" may be a, t, c, g, other or unknown
  misc_feature (552)..(552): "n" may be a, t, c, g, other or unknown
  misc_feature (557)..(557): "n" may be a, t, c, g, other or unknown
  misc_feature (560)..(560): "n" may be a, t, c, g, other or unknown
  misc_feature (575)..(575): "n" may be a, t, c, g, other or unknown
ctgagacatagtctcactctgtcacccaggctggagtgcagtggcacaatctcgactcactgcaacctctgcctcccaggttcaagctacctgaggcaggatgttcctgcctcagccttccaagtagctgggattacaggcacacaccactgcgcccaggtaatttttgtatttttagtagagacagggattcaccatgttggcaaggctggtcctgaactcgacctcaagtgatccgcccgccttggcctcccaaagtgttgggactagaggcgtgagccattgtgcctgaccaactatttccttcttagtaactgtacagcatgctataaaatgggataaaccaagctttccccccatatggttcactgagaacatattcctaaaaaaaaaaaaccaaatatgcctcaaagtctttattactttgccatttcttcattcagatctctgctcaaatgtcacttaaagggagatacctttcttgacctctggatcatcttagctccatcattttctgcaggtaactttgngataaaaagtggatctatttgntaganctnccttaaaatcttggn

SEQ ID NO: 7283 - DNA, 576 bp, Homo sapiens
  misc_feature (528)..(528): "n" may be a, t, c, g, other or unknown
  misc_feature (536)..(536): "n" may be a, t, c, g, other or unknown
  misc_feature (569)..(569): "n" may be a, t, c, g, other or unknown
gagatggagtctcactttgtcgcccaagctggagcgcaatggtgcaatctctgctcactgcaacctccccctcccgggttcaagccattctcctcctcagtctcccgagtagctaggactacaggagtgtgccacctcgcccggctaatttctgtatttttagtggagatgtggtttcaccatgttggccaggatggtctcaaactgctgaccttgtgatctgcctgcctcggcctctcaaagtgctgggattacaggcatgagtcaccgcgtccggccaggaacctcttaacttcttttgtgattttgtggggaacaatctgggcaacagtattgaactaagaaaggttttcaaccctgggcaggtcaccacacttcttggtactcagcccccacccagtgatgctgtttgaggctgtgcacctgctggggaccgtgtgtggtgggaggggctccagagagtgctagagttaatgcttttctggttagaagactatatgcttctcatggcctcttggagttcaacanggccttanaaagcatttccaaccacagagacccctgctggntttctga

SEQ ID NO: 7284 - DNA, 563 bp, Homo sapiens
  misc_feature (3)..(3): "n" may be a, t, c, g, other or unknown
  misc_feature (41)..(41): "n" may be a, t, c, g, other or unknown
  misc_feature (68)..(68): "n" may be a, t, c, g, other or unknown
  misc_feature (167)..(167): "n" may be a, t, c, g, other or unknown
  misc_feature (220)..(220): "n" may be a, t, c, g, other or unknown
  misc_feature (262)..(262): "n" may be a, t, c, g, other or unknown
  misc_feature (373)..(373): "n" may be a, t, c, g, other or unknown
  misc_feature (403)..(403): "n" may be a, t, c, g, other or unknown
  misc_feature (413)..(413): "n" may be a, t, c, g, other or unknown
  misc_feature (472)..(472): "n" may be a, t, c, g, other or unknown
  misc_feature (482)..(482): "n" may be a, t, c, g, other or unknown
  misc_feature (491)..(491): "n" may be a, t, c, g, other or unknown
  misc_feature (497)..(497): "n" may be a, t, c, g, other or unknown
  misc_feature (500)..(500): "n" may be a, t, c, g, other or unknown
  misc_feature (534)..(534): "n" may be a, t, c, g, other or unknown
ganacggagtttcgttctcgttgcccaggctggagtgcagnggcaggatctcggctcactgcaacctntgcctgccgggttcaagcgattctcctgcctcagcctcccaagtagctgggattacaggcacccaccaccacgcccggctaattttgtatttttagtanagacaaggtttctccatgttggtcaggctcatctcgaactcccgacctcaggngatccgtccgcctcagccacccaaagagctgggattacaggngtgagccacagcgcctggcggtttggccatatttttgtgagcagttagccacttggtatctgactaaaagaaggtagcaacatgttcccaatatgacaattttttttaatngctttaaaattcttcaaactttgcctctgntaaattatgnatttatatgcctttatcatccaaattttttttaaaagccctccctttaaaagccatcantttaatgggntgaaagttntaatcnggncctaaaatttcccctgaaccacagcatgttaatncctgaataaaataagatccctacctaaaa

SEQ ID NO: 7285 - DNA, 568 bp, Homo sapiens
  misc_feature (495)..(495): "n" may be a, t, c, g, other or unknown
gtatttttggtagagatggggtttcaccgtgttagccaggatggtctcaatctcctgaccttgtgatccacccgcctcggcctcccaaagtgctgggattacaggtgtgagccactgtgcctggccggccagctctttatttggtagcggtccagagtggccaagccacctgtccagagacacacagccaatctgtggcagggtcagcagcgagctcaggtcagggctggctggctggctctgcctgggacatccacctcacagaggcaccacagttccaagcgacgcctgaagaatcctgtcccttgcagtgtcccaagagcatcttcctgagcatctaatctgatccctgtaacaatcctgggtgctaggcagtggctttatcttccactgagagataaggaaatgagactcagggtagtgaaatcagaccctggacagcaacagtggcaatgaggactatggaaagggaagcttgtgaacccaacttcatgntgttccaaatctggggcaattttctgaactctaatgccatttaactgggaccaaggtttgaggaaaaaaaaaa

SEQ ID NO: 7286 - DNA, 575 bp, Homo sapiens
  misc_feature (513)..(513): "n" may be a, t, c, g, other or unknown
  misc_feature (546)..(546): "n" may be a, t, c, g, other or unknown
  misc_feature (572)..(572): "n" may be a, t, c, g, other or unknown
aattatacttcaaattctgggacatgtgcagagtgtgcaggtttgttacataggtatacacgtgccacggtggtttgctgtacccatcaacccgtcatctacattaggtatttctcctaatgctatccctcccctaccccccatcccctaacaggccccggtgtgtgatgttcccctccctgtgtccatgtgttctcattgttcaactcccacttatgagtgagaacatgccatgtctggttttctgttcctgtgtcagtttgctgagaatgatggtttccagcttcatccatgtcctgcaaaggacatgaactcatccttttttatgactgcatagtattccagcttcatggaggttttcttggttgttacctggggttccagttttgcacgctgcagaggacctgcaacttacagatttatcacttaattcattctttgcattctcctacttttcctcactccaaccatttctgggcattccaaagcccctaaagccagaattcattttgncatggtcttaacagaagtaagaacttcttttgnttcctaaagaatatgaaagcctaccngtt

SEQ ID NO: 7287 - DNA, 548 bp, Homo sapiens
  misc_feature (471)..(471): "n" may be a, t, c, g, other or unknown
  misc_feature (516)..(516): "n" may be a, t, c, g, other or unknown
aacataaacattaccacttctgagacttctggaaagaaaaaaaggtgagaaggaaataattctctaaattgcctggtttattcatatgcctatcatacttttgttagttcatcccttaagttataccccatctctcactaaataccaacaattcctattagctttttaaataagtggttggtaaatgctgctgagaaatgaagcaacttttcaggctctagaggacgccagagcaaagcctaagacatctcaatacttgcacaacacacaaaaccctcaacagcattcatttattcctaaacgtttactgagtgccagacacaatatctggcacagaagatacagtgacaagcgcctgcaagagccttataagtaaacacaagtagttctctgacattcaaaacgggaaacatttgcagattacgtaggacaccctccatctcaagatgctgctgctttaaggttgggganggggctcttgaaatctgcagcttaactaggggcccagctacttantacagggctggaagctctaccgaaaaggttct

SEQ ID NO: 7288 - DNA, 558 bp, Homo sapiens
  misc_feature (516)..(516): "n" may be a, t, c, g, other or unknown
  misc_feature (533)..(533): "n" may be a, t, c, g, other or unknown
  misc_feature (554)..(554): "n" may be a, t, c, g, other or unknown
  misc_feature (558)..(558): "n" may be a, t, c, g, other or unknown
gagatggagtcttgctctgttgcccgggctggagtccagtggcatgatctcggctcactgtcacctccgcctcccaggttcaagcaattctcctgcctcagcctcccgagtagctgggattacaggcatgcgccaccacgcccagctaattttgtatttttagtagagaaggggtttctccatgttggtcaggctggtctcaaactctcgacctcaggtgatctgcctgcctcggcctcccaaagtgctgggatgacaggcgtgaaccgctgcacccgggccaaagggtcacagaagaccttctctgggtgcaggggactggaggtcatttttcagatgagaaaaatggccagagaggtaaatgggcttatagaagatccctcaggacctcaggactgagaaaccatgtggatggggaaactgaggtctgaggccacattcgcttaccaatcttggccacttgatgatcggggggcctgatgacccagacgccccaaacttgtccaacacgtggtnggaaaaaaggccccaanggggttcggggcttggccagncccn

SEQ ID NO: 7289 - DNA, 503 bp, Homo sapiens
  misc_feature (414)..(414): "n" may be a, t, c, g, other or unknown
  misc_feature (430)..(430): "n" may be a, t, c, g, other or unknown
  misc_feature (443)..(443): "n" may be a, t, c, g, other or unknown
  misc_feature (482)..(483): "n" may be a, t, c, g, other or unknown
  misc_feature (490)..(490): "n" may be a, t, c, g, other or unknown
  misc_feature (502)..(502): "n" may be a, t, c, g, other or unknown
ctaaacttcttttctcgcttcatttcattcatttgatcttcaatcacttgataccctttcttccacttgatcgagtcggctactgaagcttgtgcattcgtcacgtagttcttgtgccatggttttcagctccatcaggtcatttaaggacttctctacactggttattctagttagccattcgtctaatcttttttcaaggtttttagcttctttgtgatgcgttcaagcttcctcctttagctcggagaagtctgatcatctgaagccttcttctctcaactcgtcaaagtcattctccatccagcgttgttccattgctgacgaggagatgcattcctttggagggggagaggcgctctgatttttagaattttcagcttttctgctctggtttttccccatctttggggntttatctacatttggnctttgatgatggngatgtacaggtgggggtttgggggggaggcccttctggnnggtaagntttcctttaacng

SEQ ID NO: 7290 - DNA, 553 bp, Homo sapiens
  misc_feature (482)..(482): "n" may be a, t, c, g, other or unknown
  misc_feature (515)..(515): "n" may be a, t, c, g, other or unknown
  misc_feature (545)..(545): "n" may be a, t, c, g, other or unknown
  misc_feature (553)..(553): "n" may be a, t, c, g, other or unknown
gtaaataactttttaatgatcagaaaataacattcaaaataaaataatgtaagttcctaatcacagtccacaatcaaacatatttttcaaatggtatcgtctaccatttcttgggtagggcatatagtaataggggcaagtgagtacttctaaacacaatatacatatagaataattaccacatataagcattagaatacttttttttttttttttgagacacctaggctgtcacctaggctgtcacctaggctggaatgcagtggcatgatcccagctccctgcaacctccacctcccagcttcaagtgattcttgtgcctcagccacccaaatagctggaactacagcatgcaccaccacaccaggctaattttgtatttaactcctgacctcaagcaatctgcctctctcagcctcccaaagtgttgggattacaggcgtgagccatcatacccagcctactttttaaaagataaaggncctatagctttacatcaaagctgaatgaccatncaattggatccatcttttaaaagccttaanttatagcn

SEQ ID NO: 7291 - DNA, 553 bp, Homo sapiens
  misc_feature (503)..(503): "n" may be a, t, c, g, other or unknown
  misc_feature (510)..(510): "n" may be a, t, c, g, other or unknown
  misc_feature (517)..(517): "n" may be a, t, c, g, other or unknown
  misc_feature (524)..(524): "n" may be a, t, c, g, other or unknown
gagatggagtcttgctcttttgcccaggcaggagtgcagtggtgctatcttggatcactgcaagctctgcctcccaggttcacgccattctcctgcctcagcctcccgagtagctgggactacaggtgcccgccaccacgcctggctaattttctgtatttttagtagagacggtgtttcattgtgttagccaggatggtctcgatctcctgatctcgtgatccgcccgcctcggcctcccaaagtgctgggattacaggcgtgagccatggcgcctggctgcccatttttaaaatttttattattatttttctttcatgtcagacaggtaatgtgccaatgtcataaaaggtttgggggcgacatacctcacacatgtgtatgaacactcaatcatcatgcttatgaactacaaaaggatcataggcaagagttcaaaggatggaaaggaagtgaaggagggtgcaattgtggtgaatgtggaagtgaaaggcgttcaggcngaaggcncaacttntacagangcattaagccttagacatatggctggaag

SEQ ID NO: 7292 - DNA, 547 bp, Homo sapiens
  misc_feature (426)..(426): "n" may be a, t, c, g, other or unknown
  misc_feature (490)..(490): "n" may be a, t, c, g, other or unknown
  misc_feature (501)..(501): "n" may be a, t, c, g, other or unknown
  misc_feature (508)..(508): "n" may be a, t, c, g, other or unknown
  misc_feature (519)..(519): "n" may be a, t, c, g, other or unknown
  misc_feature (524)..(524): "n" may be a, t, c, g, other or unknown
  misc_feature (527)..(527): "n" may be a, t, c, g, other or unknown
  misc_feature (535)..(535): "n" may be a, t, c, g, other or unknown
aagagttaacgatctgttgcccaggccggactacagtggcacctccttatctcggtgaagccttgaattcctgggctcaagcgatcctcccatctcagcctccagagtagctggggctgcagacatgaaccagcatgcacggctaacttaaaattcttttcttctagagatggggtctcactatattgcccaggctggtcttgaactcctggtctcaagcaatccccccacctcggactcccaggttgctgagattacaggtgtgagccactgtgctggctgaattccagaactgtttcatcgccttaaatggaaaccccgtccgcattagcagtcacccccgtctcctccaaccacacatccatgcatattctctgtggatctgcctgttctggaaatttctcctttttttttttttttttttgntttgagacagagtcttgccctgtcgcctaggctggagtgcagtggtgcgatcatggctcactgnaaccttccgtntccaagntcaagcgattntccgnggncatatgcnaacggggggaat

SEQ ID NO: 7293 - DNA, 542 bp, Homo sapiens
  misc_feature (455)..(455): "n" may be a, t, c, g, other or unknown
  misc_feature (511)..(511): "n" may be a, t, c, g, other or unknown
  misc_feature (527)..(527): "n" may be a, t, c, g, other or unknown
gagatggagtttcgcacttgttgcctaggctggagtgcaatggcacgatctcggctcactgcaacctccacctcccgggttcaagtgattctcctgcctcagcctgccaagtagcggggattacaggcttgtgccaccacacccggctaattttgtatttttcgtggagagaaggtttctccatgttagtcaggctggtctcgaactcccgacctcaggtgattggcccgcctcagcctcccaaagtgctgggattacaggcgtgagccaatgcacccagccttacgtctggttttcattgagccctagggtttggctcaaacagtgctcccagtagtctgaggtgcaaggcctgggaaaccaatggaaggagtggggaccggtgggaagggatgaagggcctgagactggggtgaagccaaagcaaactgtgcaggacaaatggaatggtggangccaagatgcattttgcaaaaactggtttgcacaacttggagtcaagcccttgcangcagaaaacacccctntggtggttccttggg

SEQ ID NO: 7294 - DNA, 557 bp, Homo sapiens
  misc_feature (437)..(437): "n" may be a, t, c, g, other or unknown
  misc_feature (467)..(467): "n" may be a, t, c, g, other or unknown
  misc_feature (480)..(480): "n" may be a, t, c, g, other or unknown
  misc_feature (489)..(489): "n" may be a, t, c, g, other or unknown
  misc_feature (501)..(501): "n" may be a, t, c, g, other or unknown
  misc_feature (520)..(520): "n" may be a, t, c, g, other or unknown
  misc_feature (540)..(540): "n" may be a, t, c, g, other or unknown
  misc_feature (551)..(551): "n" may be a, t, c, g, other or unknown
gagacgatctcgctgtgttgcccaggctagactcaaacccctaaactcaagcatccttcaacttcagcttccaaataactgggaccatatgcacgcatcaccacacccagtttcccctgccttttggaaaactctgtaatattccatatttcacagcgtgactggagaaagtagatgttgggatgaagtgggaaacctgatactcacccaccaagacagccgtatgcttgtgagcggggtcaaaggggctttggccttttccctccatgaccttgtcctccgagatgggcaacaggtaggaatcttgaagttcctaaatggggagagaggctggggggccagaacgccaaggtctcacatctgggaaatgaggggcttgaggaaggaagggaaagggacatagagggaaattggtctggggccaggaagttcatganggtcctgcatctggaaaggccagagttttncagagcttcagangaaaagtcntgggtagatgtnaaaagggatgcttgggggncttaacccttgggcaccaanaacttaccatngaaggg

SEQ ID NO: 7295 - DNA, 553 bp, Homo sapiens
gagacggagtctggctctgtcgcccaggctggagtgcagtggcgcaatctcggcccactgtaagctccgcctcccaggttcacgccattctcctgcctcagcctcccgagtagctgggacttctttttaaaatttgtttttttcttttttgtttcttttttttaatctattttagttttctgagaaatctccatactgctttccataatagttacaccaatttacattcccaccaacagtgtatgagagttccctcttctccacatccttgccaacatctgctattctttgtctttctaaccgccattctagctaaggtaagatgatatctcattgtagttttgatttgcttttcccttacacttagcaatgctgggcactgttcacatacctgtttgtcatttgtatgtctttttttgagaaatgtctttttatgtcacttgcacactttttaagtgggattattggttatttttactggtcaagtggtttggattcctcaaatattctggggatcagccctttcttggatgaatagttaccaacattttct

SEQ ID NO: 7296 - DNA, 550 bp, Homo sapiens
  misc_feature (214)..(214): "n" may be a, t, c, g, other or unknown
  misc_feature (485)..(485): "n" may be a, t, c, g, other or unknown
  misc_feature (534)..(534): "n" may be a, t, c, g, other or unknown
  misc_feature (547)..(547): "n" may be a, t, c, g, other or unknown
  misc_feature (550)..(550): "n" may be a, t, c, g, other or unknown
gacatcatctcactttaatgacttcctaaaagccttatctccaaatacagtcacatgggggttaggccttcaacacaggaatttggggcagggacacagttcagtccataacacctccgcagacaaatctgatctctgcctcctccacagcgccaccttgttcagggcaggacttctcttcatcacagcacatccacccttgattcccatttgngcctcgtgtgcatttgatgaacgaatgaagtcccatcccctactccttctgtctcctccttcctcccagcagcctctgtgtgacaacttatccgtctctcccactgtcccagttcccagaggcaggagccaccctctcatgcatccctgggctctcggcaccctgcacagggcaggcccgggtgggtgaattctggttcaattgtaggaggacctgtggcccctggggttggcgaaccccgggccgggagtcccactccttggcattgcgncccacacattcatcagcccctattggacaaaggcttattccattactgngggttctttcagnccn

SEQ ID NO: 7297 - DNA, 451 bp, Homo sapiens
  misc_feature (166)..(166): "n" may be a, t, c, g, other or unknown
  misc_feature (331)..(331): "n" may be a, t, c, g, other or unknown
  misc_feature (396)..(396): "n" may be a, t, c, g, other or unknown
  misc_feature (398)..(398): "n" may be a, t, c, g, other or unknown
  misc_feature (425)..(425): "n" may be a, t, c, g, other or unknown
  misc_feature (435)..(436): "n" may be a, t, c, g, other or unknown
  misc_feature (445)..(445): "n" may be a, t, c, g, other or unknown
  misc_feature (449)..(449): "n" may be a, t, c, g, other or unknown
ataaagaaaagaggtttaattggctcatggttctaaaggctgtacaggaagcatgatgctggtatctattcggcttctggagaggccttaggaaactttcaatgatggtggaaggtgaaagcgtagcaggcacgtctttgcttttttttttttttttttttttganatggagtctcgctccttcgcccaggcggaagtgcagtggcgcgatcccggcccaccgcaagctccgccttccaggcccacgccattctcctgcctcagcctcccgagtagccgggaccacaggcgcccgccaccgtgcccggccaattccctgtattcctagtanagacggggtttcaccgtgctagccacgatggcctcgatctcctgacctcgtgatccgcccacctnanccccccaaagtgctgggaccacaggcntgagcccccnncccggcccnggcntg

SEQ ID NO: 7298 - DNA, 548 bp, Homo sapiens
  misc_feature (469)..(469): "n" may be a, t, c, g, other or unknown
  misc_feature (520)..(520): "n" may be a, t, c, g, other or unknown
  misc_feature (528)..(528): "n" may be a, t, c, g, other or unknown
agatggggtctccatctgttgcccaggctggagtgcagtggtgcgatctcggctcactgcaacctccgccacccgggttcaagtgattttcctgcctcagcctccggagcagctgggattacaggcacgcgtcaccacgcctggctaatttttgtatttttcgtagagacggagtttcaccatgttggccaggctggtctccaaatcctgacctcagatgatccacccacctgggcctcccaaagtgctgggatgacagacaggcgtgagccactgcacccggccaataatggttacttctagctagatactactgtcatgtttcaagatggctcacttaaacctgtacttctggcaggaaagagacccaaacccatgaagaatgagatacatgtacagttttgattataaaaccaaagaataatggcttcacaagatgacggctgggctcctgggctgccttcagtgnctttaaacaggtaatacagatcttgctttcttctctctctttttgagaaancttgctgngacagacacccccccagggg

SEQ ID NO: 7299 - DNA, 545 bp, Homo sapiens
  misc_feature (335)..(335): "n" may be a, t, c, g, other or unknown
  misc_feature (508)..(508): "n" may be a, t, c, g, other or unknown
ccatctccaaatggttttttattgaacacccactttggctaggcaatatcctccccctgccctctaatccaggctcaggtacccccagtggagtatcctcagaaggcaactcccaagaccaggagtaatgagagattgggcagagggtaagggacagcagggaggcggaggaaaatgaagacaccagggaaagaggagaggcctgaactggacagctgatgctttgtcctgcccagcacccattcgtcccttcttcaggtaatatcatctgccaccacaaccaccagcaccaactctcagtctctgtgggtacatgccaggcctgtccatttggngtattccatcttcctggccacaatgatgacttgaggctggataccttcctcgtctggaccaatgagaaccaaatccagcagttctgtcagcaaaggggagctctttttatcaataactggtgctgtggggccacactgtgaagcccaagaataaagccactcaaatgaaaccnactgagagccaagagacagatcctggttggaggcctg

SEQ ID NO: 7300 - DNA, 555 bp, Homo sapiens
  misc_feature (520)..(520): "n" may be a, t, c, g, other or unknown
  misc_feature (541)..(541): "n" may be a, t, c, g, other or unknown
gatagtattcaacgagaaataacactttaaataaaactttttccatgaggaaggtacagtaattatccacctcctggatactctcctgtagtcctctgagtaagctccaaactcaatccatactccaagtaacagacttaagatgttcaatattggaactctttggcatcaactaaaaaagaaaccttggtaaaagcagaatttacaaacattttgttccttgcagtacacctttcaaaagacatcttcatcaaataggtaagaaaggtaagaattgctgaggtaagtagaggtctcttttattatggtcttcattctatcattattaaaccctaatctcatgtcctgttccaaagcattatgtgagtattcaatcaaagaagtgaggctgttctccagaattggttctctgctacaggtcaaaaccgactgcgccagccttggcgaagctccgcctactgccctttgctccaagtaatttttggcgatttttaaagtaatttttccggcggagtcatantggcgctatactcttggatanggtatcctggctct

SEQ ID NO: 7301 - DNA, 538 bp, Homo sapiens
  misc_feature (509)..(510): "n" may be a, t, c, g, other or unknown
  misc_feature (523)..(523): "n" may be a, t, c, g, other or unknown
gagacagggtctcactcactgcccagggtggagtgcagtggtgtgatcttggctcactgcaacctctctttccaaggctcaagtgatcctcccacctcagccttctgagtagctgggactacaggtgcataccaccatacctggttaatttttgtatttttagtaaagatgaggtttccttaggttggccaggctggtattgaactcctgacctcaactgatccgcccgccttggcctcctaaagtgctgggattacaggtgtgagacaccgcacctggccttctagcagtacttttaaaagggaaaaaaatggagaaaaaaatacttaacctattatagaagaaccaggcaaactgtgccctcagctgatgacctccagacggccgtcaactgtgcctgaagtggacggtgtcatgcggtatgaacagataagtgagaaaagaacccatgtagctctaaacccacacacactatgaaaaaacgacgcatgaaccacaagaagctgcannctctggagttaanggagcacgccacagg

SEQ ID NO: 7302 - DNA, 540 bp, Homo sapiens
  misc_feature (528)..(528): "n" may be a, t, c, g, other or unknown
  misc_feature (531)..(531): "n" may be a, t, c, g, other or unknown
gttgcatttttagtagagacagggttccaccatgccggccaggctggtctcgaattcctgacctcaggtgatccgcccaccttggcctcccaaagtgctaggactacagtcatgagccaccgtgcctggcctccttatgagaatctaatgcctgatgatctgtcactgtctcccatcacctccagatgggaccacctagttgcaggaaaacaagctcagggctcccactgattctacatgatggtgagttatagaattgtttcattatccattacaatgcgataataaagtacacaataagtggaatgtgcttggattatccccaaaccattccccccacccccgcacccctctatccgtagaaaaattgccttccacaaaaccagtccgtggtgtccaaaagggaaccactgccttggcaccaagtctaaaacaacactcttggcatgttttcttatcctgctttttcttcctggaacttggcttaccttacattgggttaattggctgttccctaactagaatctnaancctttgggg

SEQ ID NO: 7303 - DNA, 543 bp, Homo sapiens
  misc_feature (476)..(476): "n" may be a, t, c, g, other or unknown
  misc_feature (508)..(508): "n" may be a, t, c, g, other or unknown
  misc_feature (518)..(518): "n" may be a, t, c, g, other or unknown
  misc_feature (525)..(525): "n" may be a, t, c, g, other or unknown
  misc_feature (537)..(537): "n" may be a, t, c, g, other or unknown
  misc_feature (540)..(540): "n" may be a, t, c, g, other or unknown
gagacggagtctcactctgtcgcccaggctggagtgcagtggcacgatctcggctcactgcaacctctgcctcctgggctcaagcaattctcctgactcagccttctgagtagctgggactacaggtgcccaccaccacgcccagctaatttttgtattttagtagagacggggtttcaccagtgttcctcgatttctaaatcagccctagtaacttcataatgttaagtaataaaagtcatcttctatagcccagtcacctgatactatgatctgatcattgatactctcaggggtaaggcaattctagtactgtaacttcttgctggcattaaatttaaaaatgtaaaatatacttaggagcagaatctgacttttgtggatttatattataaattaatccaccaaagacaagacttttgcacatatttcagtaaataaacacactgattcatatacatgcagccaagcaaatncaaagatcctggagtaaataccaacaacgtgncacaaaagtnaaatttncaaaatcttggnctntgg

SEQ ID NO: 7304 - DNA, 480 bp, Homo sapiens
  misc_feature (408)..(408): "n" may be a, t, c, g, other or unknown
  misc_feature (455)..(455): "n" may be a, t, c, g, other or unknown
  misc_feature (457)..(457): "n" may be a, t, c, g, other or unknown
  misc_feature (465)..(465): "n" may be a, t, c, g, other or unknown
  misc_feature (474)..(474): "n" may be a, t, c, g, other or unknown
  misc_feature (476)..(476): "n" may be a, t, c, g, other or unknown
  misc_feature (478)..(478): "n" may be a, t, c, g, other or unknown
gagatggagtcaggctctgttgcccaggctggagtgcagtggcgcagtctcagctcactgcaacctccaccttccaggttcaagcgattctcctgcctcagcctcccgagcatctgggattacaggcatgcaccgccatgcctggctaattttttgtatttctagtagagatggggtttcaccatgttggccaggctggtctcgagctcctgacctcaagtgatccacctgccttggcctcccaaagtgctgggattacaggcatgagccaccatgcccagcctggcatctctttttctttttttttgagacggagtctcgctctgtcgccaggctggagtgcagtgacatgatctcggctcactgcaacaacatccacctccacagttcaagtgactctcctgcctnagcctcccaagtagctgggactacaggcgcatgccaccatgtccggntnatttttgnatttttagnananac

SEQ ID NO: 7305 - DNA, 548 bp, Homo sapiens
  misc_feature (442)..(442): "n" may be a, t, c, g, other or unknown
  misc_feature (529)..(529): "n" may be a, t, c, g, other or unknown
  misc_feature (544)..(544): "n" may be a, t, c, g, other or unknown
agtagagacggggtttcaccgtgttagctaggatggtctggatctcccgacctcgtgatccacccgcctcagtctcccaaagtgttgggattacaggtgtgagccaccacacccagccagaataatctcttaattaaaaggctgggtctggcacagatcaactgaatattgcttaccacttcctggaatataggttaaatcaggttaaaattaacactaaaggcagacttgaaattgtataaaagtaactgaagggcactaagtagctgtagaaagatttgagtggaggggatttatggactgctgctttaatatattcaggccaaattcttttttccctgctcctgcatcccttaatcactgtccaagcccaacgaaacaaagttttagcctcctgggaaactaataactgctatactccagggaaggttttgtccattgnactacagtttctacatctgcttctccagatccattcttcaccctcactttttcctgaattctgggaagctgactttatagacctggnttctaggtaagtcangaat

SEQ ID NO: 7306 - DNA, 550 bp, Homo sapiens
  misc_feature (474)..(474): "n" may be a, t, c, g, other or unknown
  misc_feature (528)..(528): "n" may be a, t, c, g, other or unknown
  misc_feature (539)..(539): "n" may be a, t, c, g, other or unknown
cccaagacagagtcttactctgctgagtgcagtggtgggatctcagctcactgcaacctccacctcctgggctcaagcaattcttatgcctcagcctccctgagtagctgggactacaggcatgtgccaacatgcccagctaattttttgtattttagtagagacgaggtttcgccatgttgcacaggctggtctcgaactcctgagctcaggcaatccacccaccttggcctcccaaagtgctgggattacgggcatgagccatcacacccagcttatccttctatctttaccagcttagattgggttttaagtttcctgcacccagaagggtcctaaccactacacaatctaatggttactgtcacccacaaatgacagtgggttgggtacattgatgacttattacatttattatctcatgccgattgtcataaaaccaaattattcccacctccatttttttctctcctnccgaccatcatgggcccccaaacttttgctggcctgtacaaagcactgggcttncaagtaagganaaccggggttt

SEQ ID NO: 7307 - DNA, 554 bp, Homo sapiens
  misc_feature (528)..(528): "n" may be a, t, c, g, other or unknown
ggagacagagtgccactctggcacccatgctggagtgcagtggcacgatcttggctcactgcaacctccaccttgcaggttcaagcgattctcgtgcctcagcctcccgagtagctgggattacaggcacatgccaccacacccagctaatttttatatttttagtggagatggggtttcaccatgttggccaggctggtctcgaactcctgacctcaggtgattcaccaccacccccccaccccccagcctcccaaagtggtggaattacaggcatgagccaccgcccaggccgaaattatcacttctaacacattcctgggtgttgctgatgctgccagtctggagaccacactttgagaaccactgggttaatttagcatctcatggggagacagctgtgctatagtgaaatgagtagacccttgagatctacttggacacaaacttctggggcagtagttctcaattgggctacttcacttttggagtcacctggggagcttttaaaattcttgacccttgggnttcaacccagaccaatttaaagggga

SEQ ID NO: 7308 - DNA, 540 bp, Homo sapiens
  misc_feature (431)..(431): "n" may be a, t, c, g, other or unknown
  misc_feature (443)..(443): "n" may be a, t, c, g, other or unknown
  misc_feature (495)..(495): "n" may be a, t, c, g, other or unknown
  misc_feature (515)..(515): "n" may be a, t, c, g, other or unknown
  misc_feature (529)..(529): "n" may be a, t, c, g, other or unknown
  misc_feature (536)..(536): "n" may be a, t, c, g, other or unknown
  misc_feature (538)..(538): "n" may be a, t, c, g, other or unknown
  misc_feature (540)..(540): "n" may be a, t, c, g, other or unknown
gagaaggaccttctctcttgttgcccaggctggagtgcaatggcatcatcttggctccgcctctcatattcaagcgattctcctgcctcagcatcccaagtatctggagttacaggcatgcaccaccatgcctggctaattttgtatttttttatacgtagagaaggggtttcaccatgttggtcaggctggtctagaactcctgacctcaggtgatccacccaccctggtgtcccaaagtgctgggattacaggtgtgagccactgcgcctggccaactccactgttaaggcagcaggtgcaggcaagttacggctattcacactcctgcagataaacacagaagtcaccataccacaactattctcctaacgctgccttcgtcctgagcttcctgtgctagtggcaagtcagatgcaaggaaaatccanagtaaaaataanaaacaataacaggcacagtcttatcaagactgtgaaaccctgtgaaccctgngaaatgaaaatgacagaagnatggtataaagccngaatttnangn

SEQ ID NO: 7309 - DNA, 560 bp, Homo sapiens
  misc_feature (494)..(494): "n" may be a, t, c, g, other or unknown
  misc_feature (497)..(497): "n" may be a, t, c, g, other or unknown
  misc_feature (505)..(505): "n" may be a, t, c, g, other or unknown
gagacagagtttcgctctttcgcccaggctggagtgaaatggcgtaatctcggctcactgcaacctccgccccaccggattcaggtgattctcctgcctcagcctcccgagtggctggagttacaggcgcccaccaccatgcccagctaattgtggtatttttagtagagatggggttttgccacattggccaggctggtcttgaactcctgacctcaggtgatccaccagtctcagccttccaaagtgctaggattacaggcctgagccagtacgcccagcctcaaggttaggttttaaatgatatttttcctgcactgtctcgagttatctctttttaccttcacccacatagaaaaagcaaaagttcagcaagacacttagtaacttggggggcattatttgattctccttccctttctttatccacattcttcggccttcactccatgatcgtcagactcagaaatacctgggctagatgcccaacccangangaagccanttgcgctgcaaggtgaaacacttctggggaaggaaaagtggccttcaatgccttt

SEQ ID NO: 7310 - DNA, 564 bp, Homo sapiens
  misc_feature (471)..(471): "n" may be a, t, c, g, other or unknown
aaaaattgacccgttttaattatttaaaaacaaaaaacacatcaaatttcctttaccatctacaattcagttatatccaaacactctaagaccaaacagaagcagggatgacaatgagacactgaagacacacgaaggtgaatgctgaagaccatcagagtcccagcaggaggtcacgtctttcattcagacgctccaatgcttttcatttcagtttgttaaagaacgtgttttacaggaagttctttacagtaatttcatgccagacaccaggtttcttcgatggtacacagctccatgaaatttgtgtttccatccagttgacaggaataaaaaggaatttttatttttgtctttttttgggccgtagagacgtaaaatggtcagattcctttaggaataaatgaggaaaaggagaggaaagagaagatctgggctgtgctggtgctggtttctactcatctttcgganggtgtgacttcaagagttaaatcacacttaggccctacaatggattagtctaggtatcttttttttaagaagattaaaagggaaggtttccat

SEQ ID NO: 7311 - DNA, 557 bp, Homo sapiens
  misc_feature (520)..(520): "n" may be a, t, c, g, other or unknown
gagatggagtcttgctctgtcacccaggctggagtgcagtggcgtgactcagctcactgcaacctccacctcctgggtttaagcgattctactgcttcagactcccaagtagcttgggttacaggtgaccgccaccatactcagctaacttttttgtatttttagtagacagcgggtttcaccatgttggccaggctggcgttgaactcctgacctaaagtgatctgcctgacttggtcccccaaagtgctaggattacaggcatgagccaccacaccccaccaggcataactcttaatattggctgaatactcaaggtaggatttttactacttattaatattttttgaagaaaactaattagcatgatcttttggttgggctaagagcatgttataaattaatattttattaattacattgaacagtagtgtgtacaataaatatcttggatatttacgaagctttaatgactgattccaaaatgatgatttcagagtaagcatgggaatctcatcangccttcatctggagctctttttccaaagtaaatagtt

SEQ ID NO: 7312 - DNA, 555 bp, Homo sapiens
  misc_feature (463)..(463): "n" may be a, t, c, g, other or unknown
  misc_feature (548)..(548): "n" may be a, t, c, g, other or unknown
  misc_feature (554)..(554): "n" may be a, t, c, g, other or unknown
aatttttagtacagacagggtttcaccacgttggcaggctggtcttgaactcctgacctcaagtgatccgcctgccttggcctcccaaagtgctgtgattacaggcgtgagacaccgcacctgggctcaaactaagaaatattaaaattttcttccttttaagatttagagtaaaggccaaataagcacactgatgtcttcccctcttctataagtttaaaatgaaacctgaaagcagggtcgatgattaaaagctgatgttcctaactagtcttttatggactgccagccatggtatgctctcaaattcttctgatgttcctttactcctaattgaattgtgaatgttttattatcaaaattcacaaaattttgatagaatgtgccaaatatttcctgagttacaatttctcatttagaaacatttgctttaaattctcatacatatccaaaactgttctgncattttcctgttgactactttttctaccttgacttgagatctccagaagagatatccttggtggtaacaagaaaataagctaatnttaaang

SEQ ID NO: 7313 - DNA, 303 bp, Homo sapiens
  misc_feature (42)..(42): "n" may be a, t, c, g, other or unknown
  misc_feature (121)..(121): "n" may be a, t, c, g, other or unknown
  misc_feature (134)..(134): "n" may be a, t, c, g, other or unknown
  misc_feature (152)..(152): "n" may be a, t, c, g, other or unknown
  misc_feature (220)..(220): "n" may be a, t, c, g, other or unknown
  misc_feature (231)..(231): "n" may be a, t, c, g, other or unknown
  misc_feature (238)..(238): "n" may be a, t, c, g, other or unknown
  misc_feature (260)..(260): "n" may be a, t, c, g, other or unknown
  misc_feature (272)..(272): "n" may be a, t, c, g, other or unknown
  misc_feature (290)..(290): "n" may be a, t, c, g, other or unknown
  misc_feature (302)..(302): "n" may be a, t, c, g, other or unknown
gcactttttgtagagacagggtttcactatgttgcccacggngctcgcgaagtatatatactcaagccatccacctgcttcggcctcctaaaatgctgggattacaggcataagccaccgngcctgcctccagngagacatttttaaggggnggctccatgcatttgaagcttccaaacacccaacagaatctcaccagtcaccaataaccaagatcctntctgatcctgngctaganaaatccttaaaggaactagaanaatttcctttgncttttttttttttttganacggagtctcgnt

SEQ ID NO: 7314 - DNA, 554 bp, Homo sapiens
  misc_feature (554)..(554): "n" may be a, t, c, g, other or unknown
agtggagatggggtttcaccgtgttagccaggatggtctcaatctcctgacctcgtgatccgcccacctcggccttccaaagggctgggattacaggcatgagccaccgcacctggccactttcagtaatattttctaatcttgttttctaacaagtaccatgcatctcagccaaactgtgctactgacctccaacacaccctgtggttttgaaactcagagcctttgcttcccaggttttacttcatctggagtatcactacctaatcacttccctctccccttgttgaaaacctgcccgtatttcaagactctctttttctatagtcatgcattttgtttcagatttatgtattagctaccttatctgggttctcatgacctgttcttacctgtcttacaacacttgatcacatacattctattttccccttaaactataaactgaaatgcaaagacatgtttttgttggggactcatgtgacagtatgccaataagatttgaaaccatttaaaaatggttggtggtttggtgattgaaaaccatataaatn

SEQ ID NO: 7315 - DNA, 550 bp, Homo sapiens
  misc_feature (465)..(465): "n" may be a, t, c, g, other or unknown
  misc_feature (550)..(550): "n" may be a, t, c, g, other or unknown
gttgcttcaagacagtctgtcacccaggctggagtgcaagtggcgcaatctcagctcacagctcactgcaacctccgcctcctgggttcaagtgattcttgtgcctcagcctcccgagtagctgggaccacaggcacgggccaccatgcccggctaatgtttgtatttttagtagagatggggtttcaccatgttggccaggatggtctccaagtcctgacctcaaatgatccgcctgccttggcctcccaaagtggtcggattacaggtgggagccaccgtgcctggccctgactctacaggaaaaatgcatttggtaacatgtttttgtagtgtgcccctcaacactacaaggtgttccttgtagtgaccccagcgttcctgaggctcacgtcccatctcacctgacttctcagcaagtaaccactccggggccctttccagctccagtgaatccgacccctnctgacatcctcttagagttttccccaacaattttttttacaatttattatttactcattaattttagacagggttttgctctgtn

SEQ ID NO: 7316 - DNA, 556 bp, Homo sapiens
  misc_feature (543)..(543): "n" may be a, t, c, g, other or unknown
aaaagatggagtctcgctatgttgcccaggctagaatcaaactgggctcaaacgacccttccaccatagcctcctgagtagctgggtctacaggcacacgccaccatgccaggcctgaaaggagattttaaaatgagatagataagggagcaaaagtgagcacattactattcaggagaaagggactacacagagagctctccagggaaattttaaagaggaattacagcccaagagggaatcacagggcaaatatgagaagaccctgagttccgccagggatctgctcagagggaggagtcgcatcaaaatcacgttccctctctgagccctagtttccccaattataaaaacaggccgctgaatgtctactatctagtaagttcattgtgaataactctgcaacatgtggctgttaaaactactcttcaagatgaagaaaatagttttgtcagttgtgccactgataattctgcctcattcatggaaagggacagagtactctgacattaagaaacccttgggaccattggggcagggttnaaactactctgct

SEQ ID NO: 7317 - DNA, 557 bp, Homo sapiens
  misc_feature (525)..(525): "n" may be a, t, c, g, other or unknown
  misc_feature (557)..(557): "n" may be a, t, c, g, other or unknown
aatagagacagggtcttgctgttgcccaggctggtctccaactgctgggctcaagcgatcctcttgcctaggcctcccaaagtgctgggattacaggcgtcagccactgcacccagcctagtacctcttttcttgatccaagttctactgtaaaacatttttggcttgaaagaataattctcaagttttctatgctaaaaatgactgacaattttttcacatgaccacagaacaaaccttgggcatctgtataccacttagtttactaaagttacaacatggtgttgtaactgaaataaatgatttaataacttattcaaaactctttgggaagagttcctccaggattcctacatgagtttgaggcgcttgtccaaggatggggagaaaaatgttgtctgttgaaactaggagtcccaacaggagctggcccttgcaggaaaacccttgttcctggtatgccggaaaaacttgccagaggagcagaagaggaagatgggggagctgctgatggtcaatggatgnaaccctgaaataaaacaggtccaagacatccn

SEQ ID NO: 7318 - DNA, 556 bp, Homo sapiens
  misc_feature (513)..(513): "n" may be a, t, c, g, other or unknown
  misc_feature (534)..(534): "n" may be a, t, c, g, other or unknown
  misc_feature (536)..(536): "n" may be a, t, c, g, other or unknown
  misc_feature (555)..(555): "n" may be a, t, c, g, other or unknown
gagatagagtttcactcttgtggcccaggctggagtacaatggcatgatcttggctcactgcaacctctgcctcctgggttcaagcgattctgggattacaggcacccacaactacgcccagctaatttttgtatttttagtagagacggggtttcaccgtgttggccaggctggtctcaaactcatgatctcaagtgatccacctgcctcagcctcccaaagtgccgggactacaggcacaagcccctgcaccccgccaaaagtaggtatcattatcctcattttacagatgaggccaagggtactcagagaggttaagtaacttgcccaaggtcacacagaattcagaatttacatccagggctgagtcgatagctagaactttcaaccactccattcttgggggcatctcactgttgccaggacattaccaacagaaacatttggcagatagggaattaggttttcttcccccaccccgatcctatactgggagaaaataagaacccttnccccgaacattggttatcagncngattcaacccggctggcgnc

SEQ ID NO: 7319 - DNA, 559 bp, Homo sapiens
  misc_feature (517)..(517): "n" may be a, t, c, g, other or unknown
  misc_feature (522)..(522): "n" may be a, t, c, g, other or unknown
  misc_feature (537)..(537): "n" may be a, t, c, g, other or unknown
  misc_feature (542)..(542): "n" may be a, t, c, g, other or unknown
  misc_feature (550)..(550): "n" may be a, t, c, g, other or unknown
ggtggtggggggagcgcggtagagacgaaatctcactgtgttgcccaagctggtctcaaactgctgggctcaagtgatcgtcttgcctcagcttcccaaggtgttgggattacaggcatgagccaccatgcctggcccctaaattcttttttgttgttttgtttttgagacagtctcgctctgtcacccaggctggagtacagtggcacaatctcagctcactgcaacttccgcctccctggttcaagcaattcttctgcttcagcctcctgagtagctgggactacaggcatgcaccaccacgcctggctaattttattttttttgtatttttagtagagacagggtttcaccatgttggccaggcttgtcttcaactcctgacctcatgatccgactgcctcagcctcccaaagtgctgggattacaggtgtgagccactgtgcccgggcttttttttttttttttttttgagatggagtttcactctttcccccaggctggagttccagtagtncagtntgggaactcaagttnactgnaaccttgnttttcaatt

SEQ ID NO: 7320 - DNA, 582 bp, Homo sapiens
  misc_feature (520)..(520): "n" may be a, t, c, g, other or unknown
  misc_feature (543)..(543): "n" may be a, t, c, g, other or unknown
  misc_feature (582)..(582): "n" may be a, t, c, g, other or unknown
cttttttttttttcggagagacaaaacaagaactagagttttaatgataataaaagcaataataataaaagcaataacaataaaaacaagatcagactctcactggggtaggcaagggactgaggaggtgaaaccaacccgtatggtgtcccagcacggcacctgctaaggagggagggtgggaaagcccaggccttcgttgcgggtacaggaggatgcaggagagggctgaggtgggggaggaacaactggtgtactgggagagagatttgggacgagggggaaccatcagcaaaaaatggagccaggaatcacagtaagggcgcaagggctgaggccagttgtttccataaagaagactcaatcattacaaaaataatttttagtagttaaaaaacacacatagggccaggcatggtggctcacacctttaatcccagcactttgggaggcctgggtgggcagatcaccaggtcaggagttcgagaccacctggtcaacatggtgaaacccccgtctntactaaaaattccaaaaaattancttgggtgtggtggtgaaccacctgtaatcccacttctn

SEQ ID NO: 7321 - DNA, 543 bp, Homo sapiens
  misc_feature (30)..(30): "n" may be a, t, c, g, other or unknown
  misc_feature (65)..(65): "n" may be a, t, c, g, other or unknown
  misc_feature (100)..(100): "n" may be a, t, c, g, other or unknown
  misc_feature (143)..(143): "n" may be a, t, c, g, other or unknown
  misc_feature (212)..(212): "n" may be a, t, c, g, other or unknown
  misc_feature (217)..(217): "n" may be a, t, c, g, other or unknown
  misc_feature (224)..(224): "n" may be a, t, c, g, other or unknown
  misc_feature (286)..(286): "n" may be a, t, c, g, other or unknown
  misc_feature (342)..(342): "n" may be a, t, c, g, other or unknown
  misc_feature (493)..(493): "n" may be a, t, c, g, other or unknown
  misc_feature (498)..(498): "n" may be a, t, c, g, other or unknown
  misc_feature (511)..(511): "n" may be a, t, c, g, other or unknown
  misc_feature (517)..(517): "n" may be a, t, c, g, other or unknown
ctttttaagcccaggctttattccagcctntttttgaggaatttgactgaaaagttccctccctntcggctgatgcgccgtcccatcctgggctcctagngtagggctcctacccttggctccagcaatgctgatgatgaggngctggggtccccgaggacaggaggcctccaggaaggaaccggcctcagtccacgccgtccagggactgnggctntgccctntcgagctgtagcacctgattttctatgcaccgaaactgccaaggccagcttgtgttgtacanaaatggtcgcagatcaaacctgttgtcctcagggctgtagttctcggcgtggtacncgggtgtgagcgtggtcatcttgtgtctgttcatggagtacttggagaaaaaccgcttcactttgtcagcgacctgtctcggggtgcaaatgtgtctccacatgccgaggagtttgcaaaacatgcctgaagggcccaattttgggccccnttctnaggtttcccatanaccganagctcccaaatgggaatcccaatttt

SEQ ID NO: 7322 - DNA, 561 bp, Homo sapiens
  misc_feature (518)..(518): "n" may be a, t, c, g, other or unknown
cagacagggtctcactctgtcacccaggctagagtcccgtggtgtaatcataattcactgtggcctcaacctcctaggcccaagccatcctcccacctcagcctcctgagtagctggggctacaggcatgggccaccatgcccggaaaatttatttattttttatttttagtagaaacaaggtctggctatgatgcccaggctgtcttgaactcccggcctcaaacgatcctgtcacctcggcctcccaaagtgctggagtaccgctaatttaaaaggcagtcattgaaacatatttcttgttctcttttgcatcatggagttatgactttaaatcataagtacagtatccttagaaactgcccagttttatcagaaataagttctgaatgtattgtcaattgtgaaaagacaaaagatcacagttcctaatattcagttctaatggcatggttccccaaaatgtaaaagctgtgactgagacaattatttcaagagagcttcagctgtaaataaacncaaactggaattccttggcctggcaaacaagagggccactttt

SEQ ID NO: 7323 - DNA, 534 bp, Homo sapiens
  misc_feature (138)..(138): "n" may be a, t, c, g, other or unknown
  misc_feature (319)..(319): "n" may be a, t, c, g, other or unknown
  misc_feature (369)..(369): "n" may be a, t, c, g, other or unknown
  misc_feature (484)..(485): "n" may be a, t, c, g, other or unknown
  misc_feature (503)..(503): "n" may be a, t, c, g, other or unknown
  misc_feature (510)..(510): "n" may be a, t, c, g, other or unknown
  misc_feature (517)..(518): "n" may be a, t, c, g, other or unknown
  misc_feature (534)..(534): "n" may be a, t, c, g, other or unknown
ggcacagggtcttgctctattaacccaggctagagtgcagtggcatgatcacagctcactgtagccatgactgcccaggctcaagtgatcctccccacttcagcttcccaagtagctgggactacaggtgtgcaccanaatccctggctaaattttttgttgttgttttttgtagagacaggatctcgctatattgcccaggctgatctcgagctcctggccttaagcaatcctcccaccttggccacccaaagtactgggattacaggcaggagccaatgcactcagctcagtttttttttttttttggggggggggntccagcggtatattttatttctttagaacatcggttgcaaagctgtttanatctttcaaaaacatcaactcttctttttgacgacaaaatggtgaataaattaaattcagaactacagtttgtgaagacacatgacatttatgattcatgaaatagaaatcatgnnctgctaaaataaagtttnaactggnaaaagcnnatttaattaaaactgn

SEQ ID NO: 7324 - DNA, 560 bp, Homo sapiens
  misc_feature (482)..(482): "n" may be a, t, c, g, other or unknown
  misc_feature (486)..(486): "n" may be a, t, c, g, other or unknown
gtttgaaagccatttatttagatgacagatatgtagatataactggataaataaaaaaagtgaaatcgagatttgaagcagtggttaaaatataaactcataggggccactcccttggacagtgtcccccccagcccagacagtacaatggctcagaaattacacatagaaatgacactcctccctccaccctcgccaagagctctgaaccgcaaggccccacacaagaaactgaatttcagtttggcaccaagcaccccctcggcccctgcctcctctccacccttctcctgcattctaagcgatatttatttttacattcactcctgtcctggaatccagccgccctgacttccgcggagacagcaccagaggctgctgcaccagaagcttcggggcgaggcccagcacccactgtgtggcccagctctgggggccctgccttgccctgcccctcctggttcaccttccccacaacagancggncgacacccactgacttccccagattggaaagaagaccaaaggtccaaggataacgccggcgccttccttgggta

SEQ ID NO: 7325 - DNA, 557 bp, Homo sapiens
  misc_feature (518)..(518): "n" may be a, t, c, g, other or unknown
  misc_feature (544)..(544): "n" may be a, t, c, g, other or unknown
gacagagttttgctctttctgcccaggctagagtgcaatggcacaatctcagttcactgcaacctccatctcccaggttcaagcgattctcctgcctcagcctcccgagtagctgggattacaggcgcccgcaaccacgtctggctaattttgtatttttagtagacacggggtttcaccatgttggccaggcttgtctcaaactcctgacctcaggtgatccgcctgcctcagcctcccaaagtgctgggattacaggcatcagccactgtgcccggcctatcttagaagtcttaatgactggctaccactgtcagaataaaagcaaaaacaagcagcttgcaaaaggcaactcctctcccagcacaatagcatttttgttcaatgctacttgtaaaatatcttttacttcactccaaatcaatgcagttttaaataactggatttgaacatttgtggaaagaacaagggatgctgaacagggatagggaaggattttacattggcaaaagcatganggcctgcctgtttcagggcatggctntgaaaagcttcca

SEQ ID NO: 7326 - DNA, 519 bp, Homo sapiens
  misc_feature (149)..(149): "n" may be a, t, c, g, other or unknown
  misc_feature (357)..(357): "n" may be a, t, c, g, other or unknown
  misc_feature (433)..(433): "n" may be a, t, c, g, other or unknown
  misc_feature (443)..(443): "n" may be a, t, c, g, other or unknown
  misc_feature (460)..(460): "n" may be a, t, c, g, other or unknown
  misc_feature (463)..(463): "n" may be a, t, c, g, other or unknown
  misc_feature (479)..(479): "n" may be a, t, c, g, other or unknown
  misc_feature (487)..(487): "n" may be a, t, c, g, other or unknown
  misc_feature (517)..(517): "n" may be a, t, c, g, other or unknown
ggtgtaaagaaaaaacacagctttattggctctcaggagacaaaacaaacagaacaagatattcatattaatgcaaacaatgcaacaaatgaggggaagaatcgcccggctgaagcgaggcccggcgcggccgcggccggggggctganaagggcctgggtgcctgtcgcccgggagccgaggtttcccggcctcccctgaccccgggcgccaagagcagtcggtccccccggcctcccgccggcaaaggggccctggggcccaggcgtgcggcccctgtgtggcggcaggcggcccaggccagcgccggcgcctagagaaggcctccagtccaggcctcatggaagggcctgcctngcgcggcccctcaacaccccacagtgtggcactggaagggacctaaaaacccacctggctttctccttttcccttncccacgcttnccaaggcccaatgccgnatnttaatttcgcttttcnggaaggtnaagggttaaaaggggaggaatttttaaggngg

SEQ ID NO: 7327 - DNA, 552 bp, Homo sapiens
  misc_feature (515)..(515): "n" may be a, t, c, g, other or unknown
  misc_feature (525)..(525): "n" may be a, t, c, g, other or unknown
agaaagccaagttagttgtaatgatggaaaaaaagatctacatattgatgcttaaccaaaaatctgaaaatgtgactaaattaagaatggaatgttaactagggtagagaggtctaaaatatacttttaaaagtgatcagagaggcactgtttcatcaataccctgtaatgatttgcgtttgaatctaggatactcacagatcatggaccatatacacctatttacaaacattaaaggcagtctaagtttagactgatatacataaagtgaataattacttttgaaatgatactattgaagtagacattgatatacttattagacctttgcctaagagaaaaaaaaaaacctcatttaatgaaacaagtcaactgccaaatctgtatgaaaatttatattgcattatggaaccaaatataatgttacatgtaaaacacaattaaaatcattatcacagataataaaacttaccccaacagaaacttaatgataattaccaaaggggcaactttgnatgggttggnttttttattccacagggagcctatttt

SEQ ID NO: 7328 - DNA, 531 bp, Homo sapiens
  misc_feature (122)..(122): "n" may be a, t, c, g, other or unknown
  misc_feature (139)..(139): "n" may be a, t, c, g, other or unknown
  misc_feature (456)..(456): "n" may be a, t, c, g, other or unknown
  misc_feature (502)..(502): "n" may be a, t, c, g, other or unknown
  misc_feature (505)..(505): "n" may be a, t, c, g, other or unknown
  misc_feature (510)..(510): "n" may be a, t, c, g, other or unknown
  misc_feature (530)..(530): "n" may be a, t, c, g, other or unknown
aatccatcagtcaatcagcaagcatttattgagcacttgttgtattctcagagctccacttggctgtggagagatagcccatgatttaagcccaagttcttacttctacagagctaacttgngcagagctactggctanaagtgcagtcataaaggagcagtggaaggcattggtctgaactatcacattcattctggccatctggacattggacatgatgcttctgattgtcagacactcatgctccagctccaggatctcccgagggacctgcaggacaaatttcaccgccttcagctccttggacgccttcttctgaatgacgctatcaaaatcacagtctagctggtcactggtgattggccctgttaggacagccaaggtgaactcaaggccatgaacgtgtggctgaagggagtgaagaacaggaaggccagtggactttaagggcctantagaccaaaaagggccccagggccctggaaacttagggctcatttnttnccaancaggaaactttggggccctnt

SEQ ID NO: 7329 - DNA, 543 bp, Homo sapiens
  misc_feature (455)..(455): "n" may be a, t, c, g, other or unknown
  misc_feature (529)..(529): "n" may be a, t, c, g, other or unknown
  misc_feature (540)..(540): "n" may be a, t, c, g, other or unknown
gagacgcagtctcgctctgtagcccaggctagagtgcagtggtgcgatctcagcccaccgcaagctccgcctcctgggttcacaccattctcctgcctcagcctccagagtagctgggactacaggcgcccaccaccacgcccggccaattttttgtatttttagtagagatggggttccaccgtgttagccaggatggtctcgatctcctgaccttgtgatccgcccgcctcggcctcccaaagtgctgagattacaggcgtgagccaggtgcctggccccagagtgacaattaatgttggcatgtgaggtggtcaggtaagcctaccaaaaacgaccactatttaaggagtgaagttaataaataataacaaacactgtaaagcaaaagaggcttattatttagagagatataccaaaaggaactggaaaagttgaaaatgactgcttctaangggcttgggaagggaatgggggaaggactgctggttttcataaaaagcctaaggacttgatgggctgggatgcnactataggggnttt

SEQ ID NO: 7330 - DNA, 532 bp, Homo sapiens
  misc_feature (129)..(129): "n" may be a, t, c, g, other or unknown
  misc_feature (169)..(169): "n" may be a, t, c, g, other or unknown
  misc_feature (174)..(174): "n" may be a, t, c, g, other or unknown
  misc_feature (220)..(220): "n" may be a, t, c, g, other or unknown
  misc_feature (247)..(247): "n" may be a, t, c, g, other or unknown
  misc_feature (310)..(310): "n" may be a, t, c, g, other or unknown
  misc_feature (436)..(436): "n" may be a, t, c, g, other or unknown
  misc_feature (440)..(440): "n" may be a, t, c, g, other or unknown
  misc_feature (455)..(455): "n" may be a, t, c, g, other or unknown
  misc_feature (478)..(478): "n" may be a, t, c, g, other or unknown
  misc_feature (501)..(501): "n" may be a, t, c, g, other or unknown
  misc_feature (519)..(519): "n" may be a, t, c, g, other or unknown
gaggcaagagtcttgctcttatcacccaggctggagtgcaatggcacaatcttggctcactgcaacttctgcctcccacgttcaagcgattctcctgcctcagcctcccgagtagctgggattacaggngcccaccaccacgcccggctgatttttgcatttttagtanagaanaggtttcgccatgttggccaggctggtcttgaactcctgacctcgngatctgcccacctcagcctcacaaagngctgggattacagacatgaaccactgcgcctggcccgtctctcatcttaatgcctttaagctntttacaatcgtttgagggaaaaagttatcttcacacttcctccagtaataaagggaaagctgcataggatggtggtggtgactggccaacttcaggtcccagaaaatctggaaaggctggagattncagngagtgggaactcganaagggtagaatttggagtggctntaaggggaggccttttcccaaangggaaggcccctgggtanggccaattgggat

SEQ ID NO: 7331 - DNA, 551 bp, Homo sapiens
  misc_feature (526)..(526): "n" may be a, t, c, g, other or unknown
  misc_feature (551)..(551): "n" may be a, t, c, g, other or unknown
gaggcaggctcgctatgttgcccagactggccttgaactcttgggctcaagcaatcctcccgtctcagcctccctagtaactagggctacaggtgtgcacccctacacctggcttgaatttttaataacattgaggtttctttttgtctcttatgcctgtgtctgtcttcttcattctctccctcacccttaaatccctcctgtttctggacagcttcatacgtagtaggtgatgaaggcatgacaataaagacgtggcagaattattcagtattgatcacaaactctgtgtccctgggaaggcagctgtggaacagtgggtggtaggggggatgtgggctcagggaccagagacaccaggtggggatcagggaagttcagattgcgtgaccttggacaacttatttccatgggcacttcaactgccggctatgtaaaatttcccaaacatgccaagagataagaatcccacatgaccttggtaaaaaaagcagactcctagatcaccccagaccaactgaaatcngaataacttgaaaaaggggcctaan

SEQ ID NO: 7332 - DNA, 538 bp, Homo sapiens
  misc_feature (218)..(218): "n" may be a, t, c, g, other or unknown
  misc_feature (480)..(480): "n" may be a, t, c, g, other or unknown
  misc_feature (488)..(488): "n" may be a, t, c, g, other or unknown
  misc_feature (504)..(504): "n" may be a, t, c, g, other or unknown
  misc_feature (511)..(511): "n" may be a, t, c, g, other or unknown
  misc_feature (524)..(524): "n" may be a, t, c, g, other or unknown
  misc_feature (538)..(538): "n" may be a, t, c, g, other or unknown
gcacaaagttaatgaaataattattttttggtcataccttgcacggaaaatctgccaatagcatttgacatttagacccactaggcatcttaagtagcctgctactcacaagacctaccttttcccactgccctattttacaaacactcttagctctgtctcctgctctcctctcctccaggaagctggagaacaatccacgaacagtagtgactaanatggcccctaatgaccatatgcttgtattatggccttcccttgagtatgggcaggatccatgaatgggatggaatacattcctttgattaagttatgctgtgtggcaaaagagattttgcaggtataaagtccctaatcagttgactctgagttaatcaaaagagagcttttcctctgtgggcctggcctaattaggtgagccccttcaaagagggtcggaggctgtcctgaagacagagattctttgggtgggttttgaanaaaccaanggctgtgtgtggaaanggccccnccttggaaacagnggggggctcatgan

SEQ ID NO: 7333 - DNA, 552 bp, Homo sapiens
  misc_feature (482)..(482): "n" may be a, t, c, g, other or unknown
  misc_feature (535)..(535): "n" may be a, t, c, g, other or unknown
  misc_feature (542)..(542): "n" may be a, t, c, g, other or unknown
actatggccattatatgtaataggaaaaaaaaaatcctggatacatgctggcaaggttgggataggatacctgggatatgcacaggtgtgggtgtcagtagaggtggccccgggaagagtcagcacagctcccaggagcacagccagaccccaaccaggtgtgggatgaggggtggatacagatgcctgccaggaacagtcacagaagcacacaggagcctccagggcatctgcaggcctctcaggtgaggaccatggtcctcacggtgacttctgatgaaacttgacccaggaacccagctggtgggagacagggcctgctgctgagcccctctgaccagagtggctctcctgggttctgtgccagggacagaaagggggtgtggatgcggaggctgggcaacacttggggctttgacgcatagtgcagacgacacacagcgcctatgtaagggcctgctggaggaacgggaacccgtatnccattaggactgtgggcttgggctcacttattgcatcagcttgactttatctntggctgnattttaaaag

SEQ ID NO: 7334 - DNA, 556 bp, Homo sapiens
  misc_feature (461)..(461): "n" may be a, t, c, g, other or unknown
  misc_feature (506)..(506): "n" may be a, t, c, g, other or unknown
  misc_feature (529)..(529): "n" may be a, t, c, g, other or unknown
  misc_feature (550)..(550): "n" may be a, t, c, g, other or unknown
  misc_feature (553)..(554): "n" may be a, t, c, g, other or unknown
gagacagagtctcgctgtgtcacccaggctggagtactgtggcacaatctcggctcactgcaacctccacctcccgggttcaagtgattctcctgcctcagcctcccgagtagcagggattacaggcccacgccagcatgcctggctaatttttatatttttagtggagacggggtttcaccactttggtcagactggtctcaaactcctgacctcaagtgatcctcccacctcggcctcccaaagagtaactggattcgtaacaaaaatagactggggatcctggtgaatagttgcatttggtaccatggagtaaaaagaacctctgggctgcattcgatgagaaactcgaggtgctggtacagctaactgaggtaaattactggtgtcctgattatcagcagcaaccattctgggtgatgtcaaagtcaatggagcaggttctgagttagatgccaaangcatttgacataggacttaaatcagacaccctggattggctgggncttctcttgggggtactgggaanttggaatgggactactggatnggnnaa

SEQ ID NO: 7335 - DNA, 542 bp, Homo sapiens
  misc_feature (470)..(470): "n" may be a, t, c, g, other or unknown
  misc_feature (481)..(481): "n" may be a, t, c, g, other or unknown
  misc_feature (518)..(518): "n" may be a, t, c, g, other or unknown
  misc_feature (523)..(523): "n" may be a, t, c, g, other or unknown
  misc_feature (540)..(540): "n" may be a, t, c, g, other or unknown
agacgtcaaccatcgctttattaaggctgcgagtcggggggctgagtcatgcactccacagacacccccactgctcccaaggtccacttttggatgaccctgaaggcagagactcctgagatctgggccacaatctagggtgagccacccacagtgccctgctggacaggggggtatgcggactgcacgggggggccctcagcaggggtcttcctgcctagggtggggctggctccagtgggtcctgggctcaggcagggggggtggcagggaggcagggacatccccccgccctctggcctatggctttgttgccctattgccaccagcgcagaagcaatgtgctataccgtgaggtgatgaagaagagccccgggagggagcaggcagctctgtgcctggggcctggccagacctcaagggtgctgtggcctgctcctgttcccctcacttctccagcaatgggtctncttcaatggangtaatcacttaaaaatggacccgaacacgttttggtnacaancggcgtggcaagctttnct

SEQ ID NO: 7336 - DNA, 546 bp, Homo sapiens
  misc_feature (478)..(478): "n" may be a, t, c, g, other or unknown
  misc_feature (504)..(504): "n" may be a, t, c, g, other or unknown
  misc_feature (519)..(519): "n" may be a, t, c, g, other or unknown
  misc_feature (535)..(535): "n" may be a, t, c, g, other or unknown
actttaggaaatgcccctttttcacattttatcggcaggtgtttcatacaaagaatacaagtaactgatgaatgaagggggcatcttgtgtccccacaatcctgctgtgcgcacaccacaggtgagccgttctgcctaagggaacagccccggcccctccctccggctcctccccagcaccgtctcctccacccagtggcctggccgtggatgctgcctgtggcccagctttgagacaccgccctgacacgtgtccagccttacgtggaaggatttgtctgttttgtggcatcctagtagatgccacgttagtagatgccatgttagtagaatggatgtgggcatttctttgtaagttcccaaaagcctatgagggttttttccacgattccgttcccagtttggcttttgttgttgttgtggctgttcttggcccccctgggccctgcagtggaatggggggctgacctgggacctngaactgaggccagcccctctgcctgnattttctggcaacanaactgagaatttgaanccatgcctatt

SEQ ID NO: 7337 - DNA, 459 bp, Homo sapiens
  misc_feature (409)..(409): "n" may be a, t, c, g, other or unknown
  misc_feature (411)..(411): "n" may be a, t, c, g, other or unknown
  misc_feature (432)..(432): "n" may be a, t, c, g, other or unknown
  misc_feature (442)..(442): "n" may be a, t, c, g, other or unknown
  misc_feature (444)..(444): "n" may be a, t, c, g, other or unknown
  misc_feature (449)..(450): "n" may be a, t, c, g, other or unknown
gagacagagtctcactttgttgcccgagctggatacagtggtgcgatcaggtgcgtgccaccatgctcagctaattttttttaacttttaagttttttggagagataggggctccctgtgttgaccaagctggtctcgagctcctgggctcaagcgatcctcccatcttggcctcccaaagtgctaggattacagacttcagccatcgtgcccaaccatgtctataaattctttaagactcctcccactgagtaacagagtctgtttcttccccttgaatctgagccaaacttagtgactcagactacagtagaaatgattctatggtgacttgtgaggctgggtcataaaggcaatgtggcctgactcatgggagtcctgagctacagtgtaagaggtgtcaacactntnagctgccatgctgtgaggaancccaactggntnatgcnnagagacaac

SEQ ID NO: 7338 - DNA, 544 bp, Homo sapiens
  misc_feature (480)..(480): "n" may be a, t, c, g, other or unknown
  misc_feature (531)..(531): "n" may be a, t, c, g, other or unknown
  misc_feature (540)..(540): "n" may be a, t, c, g, other or unknown
cagggtcctgtcttttttattatccagacacacgtatcagagcctgctaacatccagttgtgggaagagcagcaagcagtacaccaggagccacaggaagagaataaaatacatcatatccggctgctggacaagctgtgtcagggagtcactctgcgggctgtggctccccagtgacatggcttctcctgagctgttggccttcctggttaatattcggtttcttctgtcatccagatctgctgcgttcctcaactgaacatagctaaaatgatccgattccgaagacctatgagtatgtcgtcgaaggtaaatgctggagtcactgtgactagtcctggaaggaatgctgtagtcgctactgtcttcttctaggtcatctgaggattgaacacttcctggtgctacaaatagtgaactttctacgtggtccacatgtttccttttttccttttttttactactgattgattctttcgntacattttcttttaagggggttgctatggtttccaaggttgggggaattcngggaccganggct

SEQ ID NO: 7339 - DNA, 507 bp, Homo sapiens
  misc_feature (10)..(10): "n" may be a, t, c, g, other or unknown
  misc_feature (170)..(170): "n" may be a, t, c, g, other or unknown
  misc_feature (363)..(363): "n" may be a, t, c, g, other or unknown
  misc_feature (371)..(371): "n" may be a, t, c, g, other or unknown
  misc_feature (411)..(412): "n" may be a, t, c, g, other or unknown
  misc_feature (429)..(429): "n" may be a, t, c, g, other or unknown
  misc_feature (431)..(431): "n" may be a, t, c, g, other or unknown
  misc_feature (438)..(438): "n" may be a, t, c, g, other or unknown
  misc_feature (471)..(471): "n" may be a, t, c, g, other or unknown
  misc_feature (497)..(497): "n" may be a, t, c, g, other or unknown
gagacaaggncttgctctgttgcccaggctggcctcaagcaatcctcctgccccagcctcacaagtagctgggaccacaggggtgtgtgccaccacgcccagctaattttttgggtcagccaggcacagtagctcacgcctataatcctagcactttgggaggccaaggnggatgggtcacccgtgatcaggagttcgagaccagcctggccaacatgacaaaaccccatctctactaaaagcacaaaaattagctgggcacaatggcacacgcctgtaatcccagctactcgggaggctgaggcaggagaatcacttgaacccgggggtgaaggttgcagtgagctgagattgcgccactgnactccagnctgggcaacagagcgagactccatctcaaaaaaaaaaaannaaagagagagacagggntnaccatgntgccccagctgaactcaaaactccgggccaaanaagggtccggccccgcttcaagggcnggaatacagg

SEQ ID NO: 7340 - DNA, 540 bp, Homo sapiens
  misc_feature (471)..(471): "n" may be a, t, c, g, other or unknown
  misc_feature (481)..(481): "n" may be a, t, c, g, other or unknown
  misc_feature (526)..(526): "n" may be a, t, c, g, other or unknown
  misc_feature (531)..(531): "n" may be a, t, c, g, other or unknown
  misc_feature (533)..(533): "n" may be a, t, c, g, other or unknown
  misc_feature (537)..(537): "n" may be a, t, c, g, other or unknown
gagatggagtctcactctgtcgccaggctggagtgcagtggcacaaccttggctcactgcaacctctgcctcccgggttcaagggattctcctgcctcggcctcctgagtagctgggattacaggcacaccccaccacccccagctaatttttgtatttttagtacagacggggtttcaccatgttggccgggatggtctcgatctcttgacctcgtgatccacccgcctcggcctcccaaagtgctgggattacaggggtaagccattacgcccggccagttttgtttcttttctcaaatattttccatccgtggttgattgaatccacaaagacagagactgcgagctgactgtactgcaaagtgtctggatcttaaggacacagggcctctaggccagccttcaacccacctggttttcagatctgtgtcaccatgaggggagcagatggtctgaggatgggccccanccttcacagnagccaagcttggcttttttctaaggtttaaaataaaacctttttntttgnanttcngga

SEQ ID NO: 7341 - DNA, 551 bp, Homo sapiens
  misc_feature (407)..(407): "n" may be a, t, c, g, other or unknown
  misc_feature (416)..(416): "n" may be a, t, c, g, other or unknown
  misc_feature (441)..(441): "n" may be a, t, c, g, other or unknown
  misc_feature (515)..(515): "n" may be a, t, c, g, other or unknown
  misc_feature (532)..(532): "n" may be a, t, c, g, other or unknown
  misc_feature (538)..(538): "n" may be a, t, c, g, other or unknown
  misc_feature (540)..(540): "n" may be a, t, c, g, other or unknown
  misc_feature (542)..(542): "n" may be a, t, c, g, other or unknown
atctagaaaataacattttaaaaaatgaaaatattttacaggaaataacatttgtacatactcataacagtctcaaagagaaaacgattcctctacccacagaacgcttctgaaatcacatgtgtgtaagcctttccctccacaccaaccagctctccaactccctctcagacaccaacgcgatgtcctacaatttaactcgattctgtcaccaattgcccggagctagtgcagaacccacagggtaaggggtcagtcccacaagaccaccccgacttcagatgccaagtgcagacggtgggccccggggaccccacgacccccttctcaggttccaatttttttttttgagatgggtctctctgtcgcccaggctaaagtacagtgcccagatctccgctcactgnaacctccgnctccaggttcaagtgattctcctgncccaggcttccaagtagctgagattacaggcgcacgccaacaagcccaaataaatttttggatttttaggccanaaagggggtttggcctngttggncnanaaagggttt

SEQ ID NO: 7342 - DNA, 547 bp, Homo sapiens
  misc_feature (514)..(514): "n" may be a, t, c, g, other or unknown
  misc_feature (538)..(538): "n" may be a, t, c, g, other or unknown
gctttctttctcctttggggggaaaaaagagtaggtgagagtatatataaaacacgattctcttggcaattggtgcctggttttccactttttttttttttttaattttttatggttttggagtcagggtcttgccctgttgccgaggcttcagtgcagtggagcagtcatggctcactgcagcctcgacctcttgggctcaagttgtctttcctctgtggtcccctgagtagctaggaccacaggtgctagtactcctggctaatgttaaaattgagggtcttgctgtgttgtccaggctggtctcaaactcctgggatcaagcaagcctcctgcctcagtttcccagtgttgggattacaggtgtgagccaccatgcctggcgtaagatatatttaagtcagcagaaaacccaagtgacattttaatataattcagataatcctgagtcaagctttgtaggctgaagtaaatgaagggccttccttgaggccctttggctctggggcattgnggggcaccaacccctgggggtggncctttgcaa

SEQ ID NO: 7343 - DNA, 550 bp, Homo sapiens
  misc_feature (522)..(522): "n" may be a, t, c, g, other or unknown
  misc_feature (541)..(541): "n" may be a, t, c, g, other or unknown
aaaactttattctttatttcatttacaagctaccaaatattatgtatcgtacacagtgctgaacacttaaatggctgtagtcatggaaggatccagactgaatggaaagctgttgagaaagaaaagataaaagcaaagtaatactgcaacaggaaggtggcaaaagcatagttttgccataataaaatcaattagatttgtgattatacatcagttccggttaaaatgtctgagcgccatgcgattttcagctttattgtctgcagtctgactaaagtctgtatagtcattttgtcttttgcagttattaaaataaaaaaaagttaaaaactatagcagcaacaagcaaaccctgtgacaggaaggcaagggttaagaactaaaaagagtttatacagtgtgttcagggaaagtgtgcagtttatcttccatcagcaggagttcgactgagggacaacatgattcgggcaaatcgctcacagagttcatgcctggaatatgaaaggtacttcggggctcatnggaacttttaatcttcatngaccattca

SEQ ID NO: 7344 - DNA, 536 bp, Homo sapiens
  misc_feature (365)..(365): "n" may be a, t, c, g, other or unknown
  misc_feature (446)..(446): "n" may be a, t, c, g, other or unknown
  misc_feature (451)..(451): "n" may be a, t, c, g, other or unknown
  misc_feature (456)..(456): "n" may be a, t, c, g, other or unknown
  misc_feature (470)..(470): "n" may be a, t, c, g, other or unknown
  misc_feature (494)..(494): "n" may be a, t, c, g, other or unknown
gagacggagtctcaccctgtcgcccaggctggagtacagtggtacaatctcggctcactgcaacctccgccccctggttcaagagattcttctgcctcagcctcctgagtagctgggactatgggcgcgtgccaccatgcccagctaatttttgtattttcagtagagatggggtttcaccatgttggccaggctggtctcgaactcctgacctcgtgatttgcctgcctcagcctcccaaagtgctaggattacagggatgagccaccgtgcccagctttttttttttttttttttttttaatatcaaacgcttcatgaatttgcatgccatccttgcacagggaccatgctaatcttctctgnatcattccagttttagtatatgtgctgccaaagcaagcactccagcctactctaggcctttgaccttgctgacaggaagangggantgcangtctgggcttccangggctggtctgacccggggccaancattctaacttggcataccacaagtagggctttgctggattc

SEQ ID NO: 7345 - DNA, 547 bp, Homo sapiens
  misc_feature (469)..(469): "n" may be a, t, c, g, other or unknown
  misc_feature (504)..(504): "n" may be a, t, c, g, other or unknown
  misc_feature (540)..(540): "n" may be a, t, c, g, other or unknown
  misc_feature (544)..(544): "n" may be a, t, c, g, other or unknown
gaggcagagtcttgctctgtcccccaggctggagtgcagtggcacgatcttcgctcactgcaagctctgcctcccgggttcacgccattctcctgcctcagcctccagagtagctgggactacaggcgcccaccactatgcctggctaattttttttgtatttttaatagagacagggtttcaccgtgttagccaggatggtctcgatctcctgacctcatgatctgcccgtctcagcctgccaaagtgctgggattacaggcgtgagccaccgcgcctggcccagtgaactcatttttcacaaagtttccaagaacatacactggggaaagaacagtcttttcaataaatggtggtgggaaaactggatatccacatgcagacgaatgatacttgatccctatctctcactttacacaaaaatcaagtcaaaatggattaaaggcttaaatctaagacctcaaactgngaagtaccacaagaaaacattgggggaaacacttnaggacatctggctgggcaaaatggttttgagtaatncccncaa

SEQ ID NO: 7346 - DNA, 515 bp, Homo sapiens
  misc_feature (234)..(234): "n" may be a, t, c, g, other or unknown
  misc_feature (283)..(283): "n" may be a, t, c, g, other or unknown
  misc_feature (406)..(406): "n" may be a, t, c, g, other or unknown
  misc_feature (444)..(444): "n" may be a, t, c, g, other or unknown
  misc_feature (467)..(467): "n" may be a, t, c, g, other or unknown
  misc_feature (473)..(473): "n" may be a, t, c, g, other or unknown
  misc_feature (481)..(481): "n" may be a, t, c, g, other or unknown
  misc_feature (495)..(495): "n" may be a, t, c, g, other or unknown
  misc_feature (499)..(499): "n" may be a, t, c, g, other or unknown
  misc_feature (514)..(514): "n" may be a, t, c, g, other or unknown
gagaaagggtcttgctctgtcgtctgggctggagtgcagtggtgcgatcacagcacactgcagcctcaacctctaggctcaagagatcctcccacctcagcctcccaagcagctggtaccataggcgtatgccaccacacccagctaatatatatattccttgctgcaatgggtctaaccatgttgcccaggctggtctcgacctcttgggctcaagtgatcctcccaccttanactcccaaagtgctgggattataggcatgagccactgtgcctggcctanaactgcttttcttaagatagtaatgggggcaagggtatttataaataaatgcctcttcctacaggacaaaatcatatgataattttctattaagatattattcaagcctcagggtgaaaaaanccttgaagataccttttttaaaggcccctgcctaagtncagcttaagaaagctattaactnagtttncacacctntgctaaacccaggngatntaataccatggaccng

SEQ ID NO: 7347 - DNA, 576 bp, Homo sapiens
  misc_feature (436)..(436): "n" may be a, t, c, g, other or unknown
  misc_feature (451)..(451): "n" may be a, t, c, g, other or unknown
  misc_feature (457)..(457): "n" may be a, t, c, g, other or unknown
  misc_feature (464)..(464): "n" may be a, t, c, g, other or unknown
  misc_feature (472)..(472): "n" may be a, t, c, g, other or unknown
  misc_feature (535)..(535): "n" may be a, t, c, g, other or unknown
  misc_feature (555)..(555): "n" may be a, t, c, g, other or unknown
  misc_feature (576)..(576): "n" may be a, t, c, g, other or unknown
gagacggagtttcactcttgttgcccaggctgtagtgcaatggcgcgatctcagctcaccgcaacctctgcatcccgggttcaagcgattctcctgcctcagcctcccgagtagctgggattacaggcatgcaccaccacgtcccactaattttgtatttttagtagagacggggtctctccatgttggtcaggctggtctcaaactcccgacctcaggtgatccgcctgcctttgcctcccaaagtgctgggattacaggtgtgagccactgcacccggcctatgtgtgtctttacaggtgagtgtgtttcttgtaggcaacagattgttgggtcttaatttttttttttctttttttgagacaaggtcttgctctggtgcccaagctggagtgcaatggcatgatctcagctcactgcagcctcaatctcccangctcaagtgatcttnccaacntaacctntggagtancttggactttagcatgtaccactggggcaccaccattagaactgggctgggtaaaacctgaanccaatccagactgggcttancaaggctgttgaacccttacn

SEQ ID NO: 7348 - DNA, 561 bp, Homo sapiens
  misc_feature (458)..(458): "n" may be a, t, c, g, other or unknown
  misc_feature (472)..(472): "n" may be a, t, c, g, other or unknown
  misc_feature (532)..(532): "n" may be a, t, c, g, other or unknown
  misc_feature (545)..(545): "n" may be a, t, c, g, other or unknown
  misc_feature (549)..(549): "n" may be a, t, c, g, other or unknown
  misc_feature (559)..(559): "n" may be a, t, c, g, other or unknown
gagaccgagtctcgctctgtcgcccagcctggagtgcactggcgcgatctcggctcactgaaagctccgcctcccgggttcatgtcattctcctgcctcagccttccgagtagctgggactacaggtgcccgccaccactctcagctaattttttgtatttttagtagagacggggtttcactgtgttggccaggatggtctcgatcttctgacctcatgatctgcctgccttggcctcccaaagtgctgggattacaggcgtgagccaccgcgcccagccctggatatgcttgctttttgaaaatttaccaagctgtacatttatgatgaatgcacctttctgtatgttttattccaataaaaataaggagtaaacataatcctgattctaaaactgaacaaaaagaatgctgaaaattctttctgaattaattttaaacttttgatttttcaaaangcatgcttctactnctaactttccaagttctttgagaaaactttcctatgactagcagggctaatgacaccagnggggacagaaacntgcngggaaaaagnca

SEQ ID NO: 7349 - DNA, 484 bp, Homo sapiens
  misc_feature (3)..(3): "n" may be a, t, c, g, other or unknown
  misc_feature (15)..(15): "n" may be a, t, c, g, other or unknown
  misc_feature (23)..(23): "n" may be a, t, c, g, other or unknown
  misc_feature (35)..(35): "n" may be a, t, c, g, other or unknown
  misc_feature (115)..(115): "n" may be a, t, c, g, other or unknown
  misc_feature (217)..(217): "n" may be a, t, c, g, other or unknown
  misc_feature (300)..(300): "n" may be a, t, c, g, other or unknown
  misc_feature (311)..(311): "n" may be a, t, c, g, other or unknown
  misc_feature (321)..(321): "n" may be a, t, c, g, other or unknown
  misc_feature (371)..(371): "n" may be a, t, c, g, other or unknown
  misc_feature (378)..(378): "n" may be a, t, c, g, other or unknown
  misc_feature (425)..(425): "n" may be a, t, c, g, other or unknown
  misc_feature (443)..(443): "n" may be a, t, c, g, other or unknown
  misc_feature (449)..(449): "n" may be a, t, c, g, other or unknown
  misc_feature (456)..(456): "n" may be a, t, c, g, other or unknown
  misc_feature (463)..(463): "n" may be a, t, c, g, other or unknown
  misc_feature (471)..(471): "n" may be a, t, c, g, other or unknown
  misc_feature (478)..(478): "n" may be a, t, c, g, other or unknown
canatttaaaccgtntttatttntacagcaacatntgaaaatagagagcagccgcctcacccgcaacagggggagcccctcctgccaccaggggaccgtcgccgcccctcgcganaagctgcaggcgtggggggaggcgaggcaggatggctcggtgggcggtgcccggggcggggtcggccgtgcctgggcggggccgggtgggaggggcagtgcntaaggccgggatgcggggcagggcccggcggtgggaggacggactaaggggaggtccccgtcctgggccacggggcgatggcncgggtaggacncatccctcanaggccaggaggagcgcgagaaggtcccaggacccccttgggaggccccgntcccganaatgtagagcctgggagataccaccgcacggaatgggggtgattaangcctggccggtaccactngaaaanggaccangggaagncccggtantacccgnggactt

SEQ ID NO: 7350 - DNA, 490 bp, Homo sapiens
  misc_feature (402)..(402): "n" may be a, t, c, g, other or unknown
  misc_feature (405)..(405): "n" may be a, t, c, g, other or unknown
  misc_feature (410)..(410): "n" may be a, t, c, g, other or unknown
  misc_feature (440)..(440): "n" may be a, t, c, g, other or unknown
  misc_feature (450)..(450): "n" may be a, t, c, g, other or unknown
  misc_feature (470)..(470): "n" may be a, t, c, g, other or unknown
  misc_feature (489)..(489): "n" may be a, t, c, g, other or unknown
ctctgccccaggtgcctcaccttcccctcataggccttctgcacactttggggtacccctagcggcccgaggcgcaccctgggctcgaaccatggaggccaggttccatggggccaagcgcagtggctgatgggaaggcactttcgtccctgggagacccaggcaccaattctccgctgcgcgtttttttttttttgtttgtttgtttttttttctgccacaggtgcctcatctctcctgcctcaaacctcagctgaaacttttgggccttctttcctccttggggtactcgtagcagcctgaggcgcagcgtgggctcgaaccagggatgtcagcgtcctcgggacccagctcaagggctgacggaaagacactttcgtcagtgggggacccaggccccgnttntccgntgcgcggtttttcttctttctctgccgaanatgccttacnttcccttaagggctttctgnttttcctggggtaccctanc

SEQ ID NO: 7351 - DNA, 571 bp, Homo sapiens
  misc_feature (418)..(418): "n" may be a, t, c, g, other or unknown
  misc_feature (521)..(521): "n" may be a, t, c, g, other or unknown
  misc_feature (523)..(523): "n" may be a, t, c, g, other or unknown
  misc_feature (557)..(557): "n" may be a, t, c, g, other or unknown
  misc_feature (567)..(567): "n" may be a, t, c, g, other or unknown
cgtggtttaggccccatggcctacagtcctttattagagcgagagtcccgaggcccagcccccatatatgatgggtccacttgagtctccttaggcgccccatgagggagtaacagcttgggtagagagctagggaccttgcccagcctgaccctggggcaggcaagcggccccccagcccccaccaccaccccaggagagggcggggtgagaaccggagtcaaatcttgggccgggtccaagcgcctgagcgcccggtttacgcaggaaatagtccagttctcagaagtggtctaaccagccccagccccagcccggcaccacctggagggttcaagtacatggaggagaggagtaaggcggacttaggccctggtatggagaaagggtgaagggagagagaggaccttgcgctcangagggagcgtggtctatggcgggaaccacgggtcccgaacgggcgtggccgactgtgccggaaggccccggatccccgtggccaaggccaggcccaagggccntnagggccaaggtgccccccagtgggcttcaacaangccccgggcnaaaa

SEQ ID NO: 7352 - DNA, 567 bp, Homo sapiens
  misc_feature (494)..(494): "n" may be a, t, c, g, other or unknown
  misc_feature (550)..(550): "n" may be a, t, c, g, other or unknown
  misc_feature (557)..(557): "n" may be a, t, c, g, other or unknown
  misc_feature (563)..(563): "n" may be a, t, c, g, other or unknown
gattatctgtagacttcagtagcttctgttaacctgtctgtaactgccatttgcatctatggaaattgggtcctaagccaattaattgcttttgaattggcttgggttcctaccagggctggtgcagtccccctgcaggtgactcaggatctcccggtgtgtaaacaggcggaaggcaatctgctcacactcttgcttggtcccacattcaaacaaacacccaaacaagccctcctcctccagagcagccagatcagagtagccacagggcccacagtgcaagatccaggggcgggaccagcaggcagcctccaagggggtctggttgagatagatacctaggtcaaccctctgtttcctactggttgggtgtgagtacaagagccatgattctgacggtgttccagcttcctccttcagcctcagtgaactgcctggagagctctgctgaatggtgggtgcatctttgctgctagaagtcctggcacctatgnggatctcaaggggccggaacttacacactccttggcaaccatgtgggggcttacanaactgcnaattanggcc

SEQ ID NO: 7353 - DNA, 573 bp, Homo sapiens
  misc_feature (492)..(492): "n" may be a, t, c, g, other or unknown
  misc_feature (513)..(513): "n" may be a, t, c, g, other or unknown
  misc_feature (518)..(518): "n" may be a, t, c, g, other or unknown
  misc_feature (525)..(525): "n" may be a, t, c, g, other or unknown
  misc_feature (546)..(546): "n" may be a, t, c, g, other or unknown
  misc_feature (550)..(550): "n" may be a, t, c, g, other or unknown
ctttctttctttttcttttttttagatggagtcttgcactgccgcctgggctggagtgcagtggcacgatctcagctcattgcaacctctgcctcccaagttcaagcgattctcctgtctcagcctcccgagtagccggcattacaggcgcccaccaccatggccagccaatttcctgtattttcagtacagacagggtctcaccatgttggccaggctgatctcgaactcctgacctcgtgattcacccacgtcggcttcccaaagtgctgggattacaggcgtgagccactgtgctcagcgtgtttgtgaagtttcatgtcattacttatctataactcagacagtttactcatgaataatggcagtgcttgccccacagggaggtaatgaagaaaaatgggaaacatggggaatttcctacctattagacctgtagtggaggctcttctgggagtgaagcttgctggtcctgccacttttatctacttnaaagcctaatccttaataagnactgntattctnggacctatttaaggcaagggnggcnaatttaagtaccggaacttccaa

SEQ ID NO: 7354 - DNA, 417 bp, Homo sapiens
  misc_feature (326)..(326): "n" may be a, t, c, g, other or unknown
  misc_feature (352)..(352): "n" may be a, t, c, g, other or unknown
  misc_feature (385)..(385): "n" may be a, t, c, g, other or unknown
  misc_feature (399)..(401): "n" may be a, t, c, g, other or unknown
  misc_feature (403)..(403): "n" may be a, t, c, g, other or unknown
gagacggagtcttgccctgtcaccaggctgcagtgcagtggcatgatctcggctcagtgcaagctccgcctcctgggttcacgccattctcctgcctcagcctcccgagtagctgggactacaggcgcccgccaccgcgcccggctaattttttttttgtatttttagtagagatggggtttcaccgtgttagccaggatggtctcgatctcctgacctcgtgatccgcccgcctcggcctccaaaagtgctgggattacaggcgtgagccactgtgcccggccttcaattttatttaataattatgcatgtgtgggatgcaatgngatattttgatacgtgtatacaatgngaatgatcaaattagggtacttaacatacctgncacctaagaatggnnntnataatatttatttg

SEQ ID NO: 7355 - DNA, 564 bp, Homo sapiens
  misc_feature (475)..(475): "n" may be a, t, c, g, other or unknown
  misc_feature (484)..(484): "n" may be a, t, c, g, other or unknown
  misc_feature (523)..(523): "n" may be a, t, c, g, other or unknown
  misc_feature (526)..(526): "n" may be a, t, c, g, other or unknown
  misc_feature (532)..(532): "n" may be a, t, c, g, other or unknown
  misc_feature (535)..(535): "n" may be a, t, c, g, other or unknown
  misc_feature (552)..(552): "n" may be a, t, c, g, other or unknown
gcatgtgcacacatgtatacatttattgcataaaattcatcatagcactttcccccatatttttataatccaaaaggaaaatgattcaagaaaggatttcattgtgctcagtttcaaaaaatataaaaatggacatcagattagagatacaagttcatacgctgaactgaattgtacataccaactgcctggctatggaaacccgtgacttgacttaggggtgctgatgacatgatctcgacaagaaccccctagcaactctcaggtggaggcagcacagggatgcggttcctggtgaggagggtcctcactcggtgaccacactgcctgggctcacagctggagggctcacccatgagggacacgggtggacacccactgcttcacatgcctaattcacattagaaacatgtaaagccattcagtctgtgcaataaagagatcctgtatgaaatccactcattccttggaaggnaactggccngaggcacgctctggttgacggtgacgcacaagtcttcanggnctggantgnatcatgacacagacccncgtgaacaccca

SEQ ID NO: 7356 - DNA, 566 bp, Homo sapiens
  misc_feature (435)..(435): "n" may be a, t, c, g, other or unknown
  misc_feature (474)..(474): "n" may be a, t, c, g, other or unknown
  misc_feature (518)..(519): "n" may be a, t, c, g, other or unknown
  misc_feature (523)..(523): "n" may be a, t, c, g, other or unknown
  misc_feature (560)..(560): "n" may be a, t, c, g, other or unknown
  misc_feature (563)..(563): "n" may be a, t, c, g, other or unknown
gagacagggtcttgctctgtcacccaggctgcagtagtagggcagtggcacaattatagctcactgtagcctcgaattcctgggctcaaacaatcctcctacctcagcctcccgagtagttgggactacaggcctacaccaccatgcctggctaatttttaaatttatttttatttttgtagagacaaggtctcactatgttgcccaggctggtctcaaagtcctagcctcaagtgatcctcccatttcagcatcccaaagtgctgggattacaggcatgagtcaccatgcctggcctcatcctcctccttctctctcccaagttgcccagctacctctggaaagcattccactggctgtggctgcccctaaaccattaagcaagtgaatggtagtactacagaccttggatcaagacaaagaatgtcccagatnggggaatcaggaccaaggacttaaggttgcattatcagncccaaacacctaagtgggcagggttggaaattctggattactgnnaagngcttctggaaaaggatggcaaggttgcaagcctactntcnccg

SEQ ID NO: 7357 - DNA, 541 bp, Homo sapiens
  misc_feature (450)..(450): "n" may be a, t, c, g, other or unknown
  misc_feature (452)..(452): "n" may be a, t, c, g, other or unknown
  misc_feature (496)..(496): "n" may be a, t, c, g, other or unknown
  misc_feature (503)..(503): "n" may be a, t, c, g, other or unknown
  misc_feature (512)..(512): "n" may be a, t, c, g, other or unknown
  misc_feature (521)..(521): "n" may be a, t, c, g, other or unknown
  misc_feature (534)..(534): "n" may be a, t, c, g, other or unknown
ccaactaggttttattttagtttccaatattatgagcaatgatacaggagtaactcaagcaaatacatcaccctaaatacatcagagaaaactcactgtgtcagcacgtcttgcgctccagcaaatgaacataaaaacaacaatgtcagcagcattaaagtgcttttggccatacttctttcagaaagggtctctccctcagtggtataaatttaattttacgtattgaagaagctcaaaatttcattcattccccaggggctacattgaaaaaaaattcatgtttacgctaaagaattttttttttttcaaaaagagcacaaaatccattggaattgtgtgacagtgattttccctgacatgctgtgaagtggcccctgtccattcaggcccggcacacgccgggaacatccacccacagcatgtccacctggcaaagtccatcacttngncccacacaacaggacagactgagggctttaaatcccagccggtntgtgacngggcattanctgggatgnggccccaacaggncccaagg

SEQ ID NO: 7358 - DNA, 433 bp, Homo sapiens
  misc_feature (381)..(381): "n" may be a, t, c, g, other or unknown
  misc_feature (399)..(399): "n" may be a, t, c, g, other or unknown
  misc_feature (408)..(408): "n" may be a, t, c, g, other or unknown
  misc_feature (411)..(411): "n" may be a, t, c, g, other or unknown
  misc_feature (417)..(417): "n" may be a, t, c, g, other or unknown
  misc_feature (424)..(424): "n" may be a, t, c, g, other or unknown
  misc_feature (428)..(428): "n" may be a, t, c, g, other or unknown
ctgccacaggtgcctcacctctcttccctcaaacctcaactgaaacttttgggccttctttcctccatggggtactcctagcagcctgaggcgcactgtgggctcgaaccagggacgtcagcgtcttcggggcccagctcaagggctgacggacactttcgtccgtgggggacccaggccccgcttctccgcggggcggtttttctttttctctgccacaagtgcctcaccttcccctcatgggccttctgtccgacttggggtacccctagtggccagacgcacaccctgggttcgaaactgggacactaggttccccggggcccagcgcaagggctgatgggaagacactttcttccttggggacccaggctctgcttntccgcggcgtttttttgntggtgttgntgntggttngtttttnggtntttgg

SEQ ID NO: 7359 - DNA, 548 bp, Homo sapiens
  misc_feature (473)..(473): "n" may be a, t, c, g, other or unknown
  misc_feature (485)..(485): "n" may be a, t, c, g, other or unknown
  misc_feature (541)..(541): "n" may be a, t, c, g, other or unknown
  misc_feature (548)..(548): "n" may be a, t, c, g, other or unknown
cgctcttgttgcccaggctagagggcaatggtgtgatctcagctcaccgcaacctctgcctcctgggttcaagcaattctcctgcctgagcctccggagtagctgggattacaggcatgtgccatcacgctcggctaatttttttatttttagtagagatggggtttctccgtgttggtcaggctggtctcaaactcacgaccgcaggtgatccgcccacctcggcctcccaaagtgcttggattacaggcgtgagccgccgtggctggcctgaaaaacaaagattcttaaaggttccaaggttctttaaaaaaaaaaaaaaaattgctactaggtaatattattcacctgggtggaaatgaccgagtaagaaaggtagcagagagcttgcaatattgaatcaagtctgatatattgcgagaatgctgctggcaaagaatcattaattggaaaagtagaaaaaaagaaactgngaaataagcagnccaaaagccaaaccaaaacttgttggaaacacattgatttgccaatcgtaaaagtntaagggn

SEQ ID NO: 7360 - DNA, 148 bp, Homo sapiens
  misc_feature (142)..(148): "n" may be a, t, c, g, other or unknown
gccaagcccgtgggaattgccatttattcccaaagttgccaaaatcatcaccaaggattcaccgagggtgcgtgagcgggtgcgtgaggggaacgaggaggctcaaacactgactgggggttgggagtttggagggaggggnnnnnnn

SEQ ID NO: 7361 - DNA, 469 bp, Homo sapiens
  misc_feature (389)..(389): "n" may be a, t, c, g, other or unknown
  misc_feature (464)..(469): "n" may be a, t, c, g, other or unknown
aaatcaaaacctgaaatctcctgaggaatcttagaataaactaaaaagacgaggaatgagtgaatctacctagaaggtacttgtttttccacaaaattgggtaaacagaagttgctgctgttatttgggacttaacagacagcagttagtaaagtcaataaaaagtattaggggccgggcgaggtggctcatgcctgtaatcccagcactttgggaggctgaggtgggcgaatcatttgaggtcaggagttcgagaccaggctggccaacatggtgaatccccgtctctactaaaaattcaaaaaaattagccaagtgtggtggcgggcacctgtaatcccagctactgggaggctgaggcaggagaatcgcttgaacccaggaggcanaggttgcaatgagccaaatcgcgccactgcttttcaacctgggcgactgagccagactctgtctcaaaaaaaaannnnnn

SEQ ID NO: 7362 - DNA, 561 bp, Homo sapiens
  misc_feature (410)..(410): "n" may be a, t, c, g, other or unknown
  misc_feature (499)..(499): "n" may be a, t, c, g, other or unknown
  misc_feature (501)..(501): "n" may be a, t, c, g, other or unknown
  misc_feature (552)..(552): "n" may be a, t, c, g, other or unknown
cggtttcacaactttattaaaaataaatttataagtaaacaaatcgtaactttatagattaaagttgattgggattaaggagaacctgggtataagaggatctggtacagagaggtctcaggatcttttcctgagtgggagtacatacgaggtagggaagagaaaacaacaaaccagaacaaagttgctgctcccaggtcctctttcatcctccaccttcccacacagcattctgacagcccctgagctctcctcaactgcactacaaaagggcaggccacccccagcacagtcaagtcctgagctccctctgcttgtagccaggcaccatgttagtgatttccacctcagggctttccttttaaaatccacaccccacatgcctttgcaagtcagctctctcacctctncatactcatttcactctttcccaacttcccccagcccaaccttttgccagcttccttcactcactggaattttccctcttctactattncnggaaccatttatttcattcaagccaggaagccatgccattgccagaaaacnccattttgg

SEQ ID NO: 7363 - DNA, 526 bp, Homo sapiens
  misc_feature (43)..(43): "n" may be a, t, c, g, other or unknown
  misc_feature (73)..(73): "n" may be a, t, c, g, other or unknown
  misc_feature (171)..(171): "n" may be a, t, c, g, other or unknown
  misc_feature (224)..(224): "n" may be a, t, c, g, other or unknown
  misc_feature (251)..(251): "n" may be a, t, c, g, other or unknown
  misc_feature (303)..(303): "n" may be a, t, c, g, other or unknown
  misc_feature (492)..(492): "n" may be a, t, c, g, other or unknown
  misc_feature (508)..(508): "n" may be a, t, c, g, other or unknown
  misc_feature (512)..(512): "n" may be a, t, c, g, other or unknown
gagacagaggcttgctctgtcacccacgccggactgtagtggngcgatctcggctcactgcaacctccacatntcgggtgcaagcgattctcctgcctcagccttgcaagttagccaggctgtttacagatacccaccaccacacctagctaatttttgtatttttagtanagacgggatttcaccatgttggccaggctactctcaaactcctgacctcaagngatctgcctgccttggcctcccaaagngctgggattacaggcatgagccattatgcccggctcatctcttaacacactntgccctataacatctttccaaaaatctttttttatgtgggtgtgcctggtggggagaaggaatggagcatttaacatagtaaataaaagtgagatattccaaatttctcatttttacactatgggataaggatgtttaatactaagggaaaaattaactggtggactggcttctatagcttaaggaatnttaaaatccactttanattnggatttccaaataa

SEQ ID NO: 7364 - DNA, 536 bp, Homo sapiens
  misc_feature (468)..(469): "n" may be a, t, c, g, other or unknown
  misc_feature (473)..(473): "n" may be a, t, c, g, other or unknown
  misc_feature (475)..(475): "n" may be a, t, c, g, other or unknown
  misc_feature (530)..(530): "n" may be a, t, c, g, other or unknown
  misc_feature (534)..(534): "n" may be a, t, c, g, other or unknown
gaaacagtgtctctgttgcccaggctagagcgcagtggcatgatcttggctcattgcaacctccacctctcagtttcaagcattctcctgcctcagcctcctgagtagctgggattaccggcacctgccaccacacccggctaatttttgtatttttagtagagatggggttccaccatgttggccaggctggtctcaaactcttgacctcaagtgatctgcccacctcggcctcccaaagtgctgggattacaggcgtgagccactgtgcctggccacgaagttcagaccgtagagtttttcataatgcaattgaaaccttatattcttatgtttcggacaggctgggtacttaacttaaatctttgaaaaaaaaattgaattcaactctcagaaagcttatggccttttgcagaattataagtttacaaatacctggcatgcacttaagtgataggatcagattannaaangngcaacatgcttcttggtttaacacgcctgaaataaacttaaaggaaccagaagtncctngg

SEQ ID NO: 7365 - DNA, 538 bp, Homo sapiens
gtacaaaaaggaaaaaaaaataggaagaggttgtttaaaatggctgaatcatgtaaacatgatttaaagctgtctacataaagaaacaacacaactagctggaaaggggaaaacctagtctttcgagcagcaggttatgtacacagtattaaaaaaggaatatagattggggttgttttctttttttaaaaaaaccagtttgagtagcttatctggccttgtgtcaaaaacaagccaaaagttttggaactggctggaatgtgctgaggggcaacttgggaaaacggcagggctcactcattcctgggagtatctgattgacacagaggacgctgttgaactggggccttatctgaaaagagacaaaaggatcatccgagtggcaactgatgggcccttctagttctcagacactctacataggtatagaaagctttggtcagtaaaaacaaattagtgaactgaatgaaattttaaatattgaatccagggtttctacaggcttcctttcccatgggttaaataccggggcattatt

SEQ ID NO: 7366 - DNA, 524 bp, Homo sapiens
  misc_feature (449)..(449): "n" may be a, t, c, g, other or unknown
  misc_feature (469)..(469): "n" may be a, t, c, g, other or unknown
  misc_feature (477)..(477): "n" may be a, t, c, g, other or unknown
  misc_feature (481)..(481): "n" may be a, t, c, g, other or unknown
  misc_feature (507)..(507): "n" may be a, t, c, g, other or unknown
  misc_feature (512)..(512): "n" may be a, t, c, g, other or unknown
  misc_feature (515)..(515): "n" may be a, t, c, g, other or unknown
gagacagtctcactctgttgcccaggctggagtgcagtgacaccattttggctcactgcaacctccgcctcctgggttcaagcgattctcctgcttcagcctcccaagtaactgggattacaggcgcatgctaccatgcccggctaatttttgtatttttagtagagacggagtttcaccatgttggccaggctggtctcgaactcctgacttcaggtgatccgcccaccttagcctcccaaagtgctaggattacagaagtgctcggcctcaaaaattttgaaaagaaacttagttgtcaacatgatttcataatagactgcatacttagtgttacgctttcccattcaattaaaagtaataatagtctgaaaaaaaataattgtataaaggaaagtctactttcagatatgggtagctttcaacctattaagttctgggattttggnaactgaagaccctttcatgngtcccaanaggncatcttattttaaaggggctatgctnaactnaantggcctaaa

SEQ ID NO: 7367 - DNA, 536 bp, Homo sapiens
  misc_feature (474)..(474): "n" may be a, t, c, g, other or unknown
  misc_feature (481)..(481): "n" may be a, t, c, g, other or unknown
  misc_feature (506)..(506): "n" may be a, t, c, g, other or unknown
  misc_feature (535)..(535): "n" may be a, t, c, g, other or unknown
aaagacagtgtctccctgtgttgcccaggctggtctcgaactcctgggctcaagagatcctcctgtctcagcctcccaaagtgctaggattataggtgtgagccaccatgcctggccataatttctcaaagtacaatataccataaggtaaaggtttgacattaatgacagtgaatatagattcatacttcctatcatcttcatgttaatttttaaacattttgtccaacttatcaggtcttattagtctgtgtttttattagatagccaataattttatcctgtaatatgtttgatgagcacagagtaggaaaatgtatccatttgcccttttcttgtgtttacatcatcgtcactatcttgcagaatttaaaaccttttagaacatgtgtccatgtggccacacatattatatgggacgaataaatccatataactaagcagatatagaatgcaaaatgctcaaagtaaacngaatgangaccccccaggtgaaactggtttangagctggggggtaactcatgggcacaatnt

SEQ ID NO: 7368 - DNA, 545 bp, Homo sapiens
  misc_feature (476)..(476): "n" may be a, t, c, g, other or unknown
  misc_feature (485)..(485): "n" may be a, t, c, g, other or unknown
  misc_feature (489)..(489): "n" may be a, t, c, g, other or unknown
  misc_feature (491)..(491): "n" may be a, t, c, g, other or unknown
  misc_feature (509)..(509): "n" may be a, t, c, g, other or unknown
aatggagaaatgacctggatgcaaacataagaagttcagtctaatgatgcataattcctactagaccaatgcaaatctgcaacaccagcctcaggagagcctgtctgcctttctcggccacctctgctgttgtagatagtgcttttttcagccaacagctcttaggtggagcaacactcactttaaatcagctttcaaagagctactcatccaagggaggtcaactcaaaagggctcaaattgggcagctgggaaatctgcactagagacatgacaaaagaagtcaaaagggacacagtgggagaatgactgtcaaagaggctggagtctctggatgtttaaacctgtgtttgaaaagtcttacagatcacaaatacagtcagtaaggaagcacaaccccttggtggccaactggattatcatctgaacacaccagacaatgattactgattacagaatggggaaaagggaagcanaggtgggtncaancnttttttgggagaattttnaccgcatttccatttcttctggaatactgggcctgc

SEQ ID NO: 7369 - DNA, 553 bp, Homo sapiens
  misc_feature (441)..(441): "n" may be a, t, c, g, other or unknown
  misc_feature (461)..(461): "n" may be a, t, c, g, other or unknown
  misc_feature (489)..(489): "n" may be a, t, c, g, other or unknown
  misc_feature (517)..(517): "n" may be a, t, c, g, other or unknown
  misc_feature (529)..(529): "n" may be a, t, c, g, other or unknown
gttttttttgagacagggtcttgcactgttgcccaggctggagaatagtggtgcgatcttggctcgccacaacctccacctcccaggtttgagtaattctcatgtctcagcctcctctcctgagtagctgggattacaggtgtgtgccactatgcctggctaatttttttgtatttttagtagagatggggttttgtcatgttggccgggcttgtctcaaagcctggcctcaagtgatctgcctacctcagcctcccaaagtgctggtattacaggtgtgagccacagcacctggttagaacgcatcttttctatagtatcaattaggcagcaacatgcccaggaaagcaggccctggaaacaaatcatgattggtgcatcacagaaatttcttctttgctggtggaaggactaggaagtggggccgagtcataagcagangtcaaggtggagcctttcanaagaggactttctttccttgacaagccnttttggagaagaaaggaccatttttcgngcctttaattcnttttggttcaaggccttaatttgg

SEQ ID NO: 7370 - DNA, 548 bp, Homo sapiens
  misc_feature (459)..(459): "n" may be a, t, c, g, other or unknown
  misc_feature (490)..(490): "n" may be a, t, c, g, other or unknown
  misc_feature (523)..(523): "n" may be a, t, c, g, other or unknown
  misc_feature (525)..(525): "n" may be a, t, c, g, other or unknown
  misc_feature (534)..(534): "n" may be a, t, c, g, other or unknown
  misc_feature (546)..(546): "n" may be a, t, c, g, other or unknown
gagatagggtcttgctctgtcacccaggctggagtacagtggcacaatcatagctcactgcagcctcaacctcctggggtcaagtgatcctcccaccttagcctccagagtagctgggactacaggtgtgagccaccatacccagctaatttttaaattttttgtagagacgtggtcttgctatgttgcccaggctggtcttgaactcgtgggttcaagcaatcccttcaccttggccttccaacgtgctgggattataggcatgagccactgtgcctggccctttgttgcatttctaataaacttcttagaagagaccaaacagtttgatttttaaagtcaagtacaaatttctattaaggaagtacttattttcagttaaataagtcataaaatataccaagaataaagtttgtatctagctagaaaaactggcagaagtttcttagaacattctgngatcatatttataccccgttatcatcactgncaaaaataaaaattggaaactagatcactggcngnttataatcnggaagccctctnaa

SEQ ID NO: 7371 - DNA, 554 bp, Homo sapiens
  misc_feature (380)..(380): "n" may be a, t, c, g, other or unknown
  misc_feature (480)..(480): "n" may be a, t, c, g, other or unknown
  misc_feature (484)..(484): "n" may be a, t, c, g, other or unknown
  misc_feature (494)..(494): "n" may be a, t, c, g, other or unknown
  misc_feature (503)..(503): "n" may be a, t, c, g, other or unknown
  misc_feature (515)..(515): "n" may be a, t, c, g, other or unknown
  misc_feature (545)..(545): "n" may be a, t, c, g, other or unknown
aggaagcagaaaatcaatcatccctctttctctttcccagcgtggctggccaccaccaaaaacaggtatttcttttttaagccgatgacacacagtattacaaagacagagataactgccctgggtcatgggaggaggggaggctttataaccaagtaaatttggagaaatactggattaaaaaaagctaagcaagtttctttactgaagggcttcttagagccattaataagcttattaataagcttataggctccttcgttctctaagaggggaacatttcgtcatggaatccactcctcatagagcatctcggaggaccaagttttcactttgagaaacacttccagaaacccagcccgttatcatccctggctcangaggggtggtcctgaagctgtggttcttggctacgctgctctggggacttgcagaatcccttcttctgaaaaagtatgttagttcgcatgcacccacatngaangatctataanggccgactnttttaaactcantattgggagcccaaatagggttagggaaanaagcccttt

SEQ ID NO: 7372 - DNA, 560 bp, Homo sapiens
  misc_feature (397)..(397): "n" may be a, t, c, g, other or unknown
  misc_feature (492)..(492): "n" may be a, t, c, g, other or unknown
  misc_feature (507)..(507): "n" may be a, t, c, g, other or unknown
  misc_feature (524)..(524): "n" may be a, t, c, g, other or unknown
  misc_feature (526)..(526): "n" may be a, t, c, g, other or unknown
  misc_feature (535)..(535): "n" may be a, t, c, g, other or unknown
  misc_feature (558)..(558): "n" may be a, t, c, g, other or unknown
aagagacaggatctccctgtgttacccaggctggtctcgaactcctggactcaagcaatcctcccgcctcagcctcatgagtaactgggactacaggtgtgaactaccatgcccagcaatgccgcaacttttaaagaaattcagtcacctgagggccactgaatttcctgggcctccatggacaggtgctgaagtgtccacatataccagcatcagcagaactctaacttttacacagtaggtgctcaataaagagagggcaagaccaccaactgggaaggacctccttcttagtaatgataattttcctttgcaggtgaaacagctcaacatgcaagtgactggcactcaccacaacttcttgacgatcttctcttcctcatgaagatatttttgnctctcttgctccactaggacgcgctgtcgctgcacgggatcccccagtctcttcattggttccatcactttgccactgatttcagctcgggcttnttcatcattggcctnagcaacttctggtttgnanctgggaacnccaaaaatcaaccttagggggtntg

SEQ ID NO: 7373 - DNA, 560 bp, Homo sapiens
  misc_feature (486)..(486): "n" may be a, t, c, g, other or unknown
  misc_feature (535)..(535): "n" may be a, t, c, g, other or unknown
  misc_feature (551)..(551): "n" may be a, t, c, g, other or unknown
  misc_feature (553)..(553): "n" may be a, t, c, g, other or unknown
  misc_feature (560)..(560): "n" may be a, t, c, g, other or unknown
gaggagtctcactctgctgtccaggctggagtgcagtggcacgatcacagttcactgaagcctcaacctcctgggctcaggtgattctcccacctcagcctcccaggtagctgggagtacaggcatgcaccaccaggcccagctaatttttgtattatttgtagagatggggttttgccatgttgcccaggctggtcttggactgctgggctcaaacaatcctcccgcctcagcctcccaaagcgctgggatgacaagtgtgagtcaccaagcctggctcatttactctttaacagaaaaatttattgcacagacatttgtaatgaatcagtaacattaacaaataataccaacacacctcaatgccttcatgctatacttaaaaaacagaagggagaatgggatcactgtgcaagaaataattcttcacagaaagtttcatgtgagggtttccaaaagcccccttgtacccattccctggtgggnacttaactttcaaggaactttccctgggaaaggaggccttttatattgnatttgctttaagggcnanacctggn

SEQ ID NO: 7374 - DNA, 547 bp, Homo sapiens
  misc_feature (8)..(8): "n" may be a, t, c, g, other or unknown
  misc_feature (110)..(110): "n" may be a, t, c, g, other or unknown
  misc_feature (230)..(230): "n" may be a, t, c, g, other or unknown
  misc_feature (360)..(360): "n" may be a, t, c, g, other or unknown
  misc_feature (494)..(494): "n" may be a, t, c, g, other or unknown
  misc_feature (523)..(523): "n" may be a, t, c, g, other or unknown
  misc_feature (526)..(526): "n" may be a, t, c, g, other or unknown
ctcatggngtagttttattgtttcttccacgatattcagatgtgcaaaaaatttcacaagaaaacaagtcagcaagctcttaagagggcagcaaattcttcacaagtcanagggctcctgaacccacaaaaagacaagaagtgagtgtaagattataaaatgttaatgatgaaattccagaacaatgtacttttctcaagctctgctgcaaatttaacacaaacatcagngttaattacactttgtcatgtatgactgagcttgctttaagctcttacactgaaaggaagtctcatttcatgcacaaaatctgttgcatgcctggcttccttaataaaactacagttgaacatttccagngtcaaaaaaaattcaacgaagctaaactacaggaaaatgcaggttagtagacttttaactaatgcttctgaggaataatataaagttatcaaactgatacttagaaacaaaagaaaagacattggcatcttggnaatttcattagtttcaatacccaacattntcnaagcataaaattttctcttac

SEQ ID NO: 7375 - DNA, 561 bp, Homo sapiens
  misc_feature (462)..(462): "n" may be a, t, c, g, other or unknown
  misc_feature (484)..(484): "n" may be a, t, c, g, other or unknown
  misc_feature (536)..(536): "n" may be a, t, c, g, other or unknown
  misc_feature (553)..(553): "n" may be a, t, c, g, other or unknown
  misc_feature (558)..(558): "n" may be a, t, c, g, other or unknown
aatttttttaattttttttttttttgtagagacaaagtctcattatgttgcccaggctggtctcaaactcctaagtgcaagtgatcctcccgcctcggcctcccaaagtgctggtattacaggtgtgagccaccacaccatgcctacagaaggctttaaacatttccaacgtgagtcatacagtaactcaaaaattacacgttgtcttctcttacaagcagtgacttcaaagaacacatcaaattcttccatatggttgtttacttcttgtaacttcatagagaagtctctattaaggtgtttggtaacccttggtttttatttttaaatggttaaagtttaggacccccacgataaaagaatctgtgatacaaagcttgggaacacctctagagagatgtccaaaagaaggaacagataaccttatgacaagcagaaaagggagttctataaactccctgncttttaacccctgagcaaatgnctcagcatattctggcatcggttcgctttatctctaactctatctctaaatncaggttttttttcctcngcttngga

SEQ ID NO: 7376 - DNA, 508 bp, Homo sapiens
  misc_feature (444)..(444): "n" may be a, t, c, g, other or unknown
  misc_feature (453)..(453): "n" may be a, t, c, g, other or unknown
  misc_feature (486)..(486): "n" may be a, t, c, g, other or unknown
  misc_feature (489)..(489): "n" may be a, t, c, g, other or unknown
  misc_feature (497)..(497): "n" may be a, t, c, g, other or unknown
  misc_feature (500)..(500): "n" may be a, t, c, g, other or unknown
  misc_feature (503)..(503): "n" may be a, t, c, g, other or unknown
gagacagggtctcagtctgttgcccaggatggagtgcaatgccgtgatctcggccaccacaacctccacctcccaggctcaagcaatcctcccacctcagccttccaagtagctgggaccataggcacacaccaccatggctggctaatttttgcagagatggagttgaactcctgggctcaaggcatcagcctgccttggcttcccaaagtgctggaattatagatgtgagccaccacacccagctagctgtgagtgttctttttaatgttcggtatattatgatgttttgacatcttaaaaacaaaactaaatgaaaaagaacctttctagctggggaatgactgcccctcctggggttagccaagtcttatgcatagcaagggctcagccaggagtatgcccttgatctgcaaactgaccaatccagagactccatgccgnctctagcangcctgtacaccacaggagacaatattccttgcntangcatccanggncangtcca

SEQ ID NO: 7377 - DNA, 559 bp, Homo sapiens
  misc_feature (502)..(502): "n" may be a, t, c, g, other or unknown
  misc_feature (510)..(510): "n" may be a, t, c, g, other or unknown
  misc_feature (521)..(521): "n" may be a, t, c, g, other or unknown
  misc_feature (524)..(524): "n" may be a, t, c, g, other or unknown
  misc_feature (541)..(541): "n" may be a, t, c, g, other or unknown
  misc_feature (551)..(551): "n" may be a, t, c, g, other or unknown
  misc_feature (554)..(554): "n" may be a, t, c, g, other or unknown
caagtagttgtgtttctttattggcgtcttgctgtctccttttctcctctctgcgctctcttgctaatctttgttttatgtcatttttaagcatggatccatcgattactggtttaaatgtcgatcttatatttgaggaatgggttgcaacacgattaaccacatcttgcttcctcctttccttagcaatctcgtttgctgcagcaaccatccgtgcccgcagctctctcaaggatgggctgccgccagcgccagctgcggcgccgtccgccatcatcagcaaggcggcgcaattctgtcaaaatttttgttgccgcctcggcattcataatacctgcagtactcttattaccagactcttcatagatcatatgcctttggctcaaagcctcacatctgttagtggttttagaaactgtttcttttttctttttgacagtacttgatgcactttgcacagacagggtgtgttgaataggcattattttataagggaaaaaantctggggngactggtttgnaanaaaggggaaaggggaanggagggcaanttnttttg

SEQ ID NO: 7378 - DNA, 481 bp, Homo sapiens
  misc_feature (355)..(355): "n" may be a, t, c, g, other or unknown
  misc_feature (376)..(376): "n" may be a, t, c, g, other or unknown
  misc_feature (394)..(394): "n" may be a, t, c, g, other or unknown
  misc_feature (418)..(418): "n" may be a, t, c, g, other or unknown
  misc_feature (443)..(443): "n" may be a, t, c, g, other or unknown
  misc_feature (446)..(446): "n" may be a, t, c, g, other or unknown
  misc_feature (449)..(449): "n" may be a, t, c, g, other or unknown
  misc_feature (460)..(460): "n" may be a, t, c, g, other or unknown
  misc_feature (478)..(478): "n" may be a, t, c, g, other or unknown
cagatgaagtctcgctctgtgacccaggctggagtgcaatggcatcatcttgtctcactgcaacctctccctcctgggttcaagcaactctcctgccccggcctcccacgtagccgggaccacaggcgcccaccaccacacctggctaacttctctatttttagtagagacggggcttcaccatattgcccaggctgatcccgaactcctgacctcaagcaatctgcccgccctggcctctcaaagtgctgggattacaggcatgaggcacggtggccagccattcaaccattaatgcattactttagtcactcacggcccatctcaatgaaattgagggcaaagaccagccggntcaggcagtgtcagccctcanaatttattagtgagggcncactgcgttcaggggaaggcatanaggagggactgcagttcctgggctnttnaanaggacccccancccttattaaaaagttgngac

SEQ ID NO: 7379 - DNA, 558 bp, Homo sapiens
  misc_feature (452)..(452): "n" may be a, t, c, g, other or unknown
  misc_feature (482)..(482): "n" may be a, t, c, g, other or unknown
  misc_feature (491)..(491): "n" may be a, t, c, g, other or unknown
  misc_feature (517)..(517): "n" may be a, t, c, g, other or unknown
  misc_feature (524)..(524): "n" may be a, t, c, g, other or unknown
  misc_feature (528)..(528): "n" may be a, t, c, g, other or unknown
  misc_feature (558)..(558): "n" may be a, t, c, g, other or unknown
gagacagagtctcacgcctgtaatcccagcactttgggaggccgaggcgggcggatcacctgaggtcaggagctcaagaacagcctgaccaatatggtgtttttttcttttttaaagaagaacaatcaatcatattgccagaagaatcaatgacccagccctactgcacgccgagtggttgcgacaggcttagatattgttagaggtttgcttctgctgccaaaccgtttgcattctcctggggacagtgctctcctgatgtgactcttattctgaatttagagcagaaggtggtggcatatacctggtgagacccagggagggcaggatcagcaccatgaagatcaagaatatgtagactttggtcatcatgatctggttttcccccgacctgcaggaagtcaaaggtgagcactcgcagtcccccaaatgctctatgtgcccccagtgangcccctggcatgtgcccactggctgagcancttgggggntaaggtgtggaccaagggaccggcanagatatncctnttaaggcaaggccttgggcttcccggcacn

SEQ ID NO: 7380 - DNA, 501 bp, Homo sapiens
  misc_feature (30)..(30): "n" may be a, t, c, g, other or unknown
  misc_feature (266)..(266): "n" may be a, t, c, g, other or unknown
  misc_feature (331)..(331): "n" may be a, t, c, g, other or unknown
  misc_feature (381)..(381): "n" may be a, t, c, g, other or unknown
  misc_feature (437)..(437): "n" may be a, t, c, g, other or unknown
  misc_feature (448)..(448): "n" may be a, t, c, g, other or unknown
  misc_feature (452)..(452): "n" may be a, t, c, g, other or unknown
  misc_feature (470)..(470): "n" may be a, t, c, g, other or unknown
  misc_feature (490)..(490): "n" may be a, t, c, g, other or unknown
  misc_feature (492)..(492): "n" may be a, t, c, g, other or unknown
  misc_feature (499)..(499): "n" may be a, t, c, g, other or unknown
cttgttttttttttttttttttgagacagngtctctttctgtttcttaggctagaatgcagtagttacaatcacagctcactgcagccttgatctcccaagctcaagggatcctcccatcttaacttcctgcatagctggaactacaggcatgtgccaccacatcaggctcaattttaattttaatttaatttttttgagacatagtctcactctgtcgcccaggctggagtgagaccccatttcaaaaaaaaaagtgccaaatgngtcccttcaattccagtcagcacttttggaaacacgcgtaaaattgttgccaatgtgcattctgngtgtttgggagtcattgtgcaaaatgcgtgggcagcaagcactcttttgngaaccaagttctatgaaccaccaagtattctttctctaggctgaattccaaggctntggttcaaaanagtncagggttctgaaaggaangggattggactatggatgcngntttcttntt

SEQ ID NO: 7381 - DNA, 501 bp, Homo sapiens
  misc_feature (420)..(420): "n" may be a, t, c, g, other or unknown
  misc_feature (467)..(467): "n" may be a, t, c, g, other or unknown
  misc_feature (473)..(473): "n" may be a, t, c, g, other or unknown
  misc_feature (475)..(475): "n" may be a, t, c, g, other or unknown
  misc_feature (479)..(479): "n" may be a, t, c, g, other or unknown
  misc_feature (481)..(481): "n" may be a, t, c, g, other or unknown
  misc_feature (485)..(485): "n" may be a, t, c, g, other or unknown
cttttgatacagagtcacactcttgtcacccaggctggagtgcagtggcgtgatcttggctcactgcaagctccgccccccaggttcacaccattttcctgcctagcctcccaagtagctgagactacaggtgcccgccaccacgcccggctaattttttgtatctttagtagacacggggtttcactgtgttagccaggatggtcttcatctcctgacctcatgatccacccacctcgacctcccaaagtgctgggattacaggcgtgagccaccacgcccggcccattttcgtctttttctccactggctttatttcctcctcaccgcgttcccccctaccaaaaaaaagtggggcaactaggccagtacaagacagtcatcagcctcagggcctgtgcgcacacgggtgtgctgganatgctggcatggatggggggggtgggatttgcttgagtgctcgtctntgacangnccantnaggnatggttctctacatgg

SEQ ID NO: 7382 - DNA, 565 bp, Homo sapiens
  misc_feature (444)..(444): "n" may be a, t, c, g, other or unknown
  misc_feature (457)..(457): "n" may be a, t, c, g, other or unknown
  misc_feature (475)..(475): "n" may be a, t, c, g, other or unknown
  misc_feature (505)..(505): "n" may be a, t, c, g, other or unknown
  misc_feature (531)..(531): "n" may be a, t, c, g, other or unknown
  misc_feature (545)..(545): "n" may be a, t, c, g, other or unknown
  misc_feature (548)..(548): "n" may be a, t, c, g, other or unknown
  misc_feature (565)..(565): "n" may be a, t, c, g, other or unknown
cttgtgccttggtcctcctgctcactattaggaggacaagagctgagggccaagctatgttgtgaaagccaaaagaaacaactgctatagatcgccaaacctcactggtaatatacggcttttcctttttgctttgagaattgctcatcattttcccacatgtaagttcacagactttaatcaaaggcttcctttgtcataactaccaataatcggaactaggattttaaaaggctggtaccagttctccaagctactgccttcccagctctactgtattcaagacagcaacctaaggctgcaaacaactcatgctttaggaggaaatgagcaaagagacatctctgaaccccgctaaagatttcagcaggatggccagcatctccccaaaagccaagtttccagctttcccataatagttcaccaggctgtcatctttcatgnactttgatcccgntttgccaaggttttcttnccactttcctttatcaaggaggtccccagnccaaccttagccccggaaccaagccncagatccgaaaganccnacttttccggacaagan

SEQ ID NO: 7383 - DNA, 564 bp, Homo sapiens
  misc_feature (428)..(428): "n" may be a, t, c, g, other or unknown
  misc_feature (465)..(465): "n" may be a, t, c, g, other or unknown
  misc_feature (491)..(491): "n" may be a, t, c, g, other or unknown
  misc_feature (494)..(494): "n" may be a, t, c, g, other or unknown
  misc_feature (503)..(503): "n" may be a, t, c, g, other or unknown
  misc_feature (555)..(555): "n" may be a, t, c, g, other or unknown
aaagctagtcaagtgaagcagtgagagtggagaaggaacaaataatctgtaactagttgtgatcaattagttgtaaacaccactgcactcggaccagcgcaaactcattcttaacctaatcacctaaaataattcttatcatctattcttcttcaggtaaaaatggagccctggatgttattttaacgacttgccatccttcctgttttgagagtgtctttgttaactggtggcataccttcgtgacccggtcctaccttcctcattcagacctgtgctgttcattgctgtattcccagtcccttaaaaagtactcaacacgtgaattgcaaaatgaattaacaactttgagggaggtgttattatcatcctggctttacagatgaggaaactaaggtttacttagcaagattaagtaacttgcctangggttacaaaccactagccaggaaacaaacccacatntgaccccaaaggccttggttttactntancctactggntagaaaagctttttaaaggcttgccttttggggcttactgggggcagttttnttttaaagg

SEQ ID NO: 7384 - DNA, 484 bp, Homo sapiens
  misc_feature (77)..(77): "n" may be a, t, c, g, other or unknown
  misc_feature (85)..(85): "n" may be a, t, c, g, other or unknown
  misc_feature (229)..(229): "n" may be a, t, c, g, other or unknown
  misc_feature (256)..(256): "n" may be a, t, c, g, other or unknown
  misc_feature (318)..(318): "n" may be a, t, c, g, other or unknown
  misc_feature (420)..(420): "n" may be a, t, c, g, other or unknown
  misc_feature (427)..(427): "n" may be a, t, c, g, other or unknown
  misc_feature (429)..(429): "n" may be a, t, c, g, other or unknown
  misc_feature (450)..(450): "n" may be a, t, c, g, other or unknown
  misc_feature (467)..(467): "n" may be a, t, c, g, other or unknown
  misc_feature (472)..(472): "n" may be a, t, c, g, other or unknown
  misc_feature (476)..(476): "n" may be a, t, c, g, other or unknown
gagacagagactcactctgttgcccatggtggagtgcagtggtgcgatctcggctcactgcaacctctgcatcccanattcaagngattctcttgcctcagcctcccaagtagctgggattacaggcgcctgccatcacgcccactggctaatttttttttttgtatttttagtaaagacagggtttcactatgttggccaggctggtctcgaactcttgacctcaggngatctgcccacctcggcctcccaaagngctgaaattacaggcatgagccaccgtgctgggtccctaactatatatttccaggcaccatntgggaggtactggcttagcagactgaggcaggactgactcaggggaagctgaatgcctgcagtcagatccagagagccttttggacaagaaggggacaagcnagaaccncngaagtcagggaagggggaaanggaatcttgcagggcantatancaancgttgagt

SEQ ID NO: 7385 - DNA, 563 bp, Homo sapiens
  misc_feature (449)..(449): "n" may be a, t, c, g, other or unknown
  misc_feature (482)..(482): "n" may be a, t, c, g, other or unknown
  misc_feature (522)..(522): "n" may be a, t, c, g, other or unknown
  misc_feature (533)..(533): "n" may be a, t, c, g, other or unknown
  misc_feature (536)..(536): "n" may be a, t, c, g, other or unknown
  misc_feature (546)..(546): "n" may be a, t, c, g, other or unknown
  misc_feature (556)..(557): "n" may be a, t, c, g, other or unknown
aatttaagagacagggttttgctacattggccaggctggtcttgaactcccggcctcaagtgatccacccgcctcagcctcccaaagtaagttttgttccagttctcactgtgggtggctgtctcctcacagtgacttaacacctgcttgtgaattcctgcaactatgtaattacaacatggttgacatgcaaagaaatatggcttatgagaatttaaaagaaaaatcaatggctttatgtttattcattagcaggtgagacaattatttttgaaactaactttttttttaagatgccaacagcactttgggaggccgaggcaggcagatcactaggtcaggaaatcgagaccgtcctggccaacacagtgaaaccctgtctctactaaaaatcaaaaaaattatctgggtgtggtggtgtgccgcctggagtcccagctcttcaggangcttgtggcaggagaattgttgactctggaagnggaagcttgaatgagccaagaatggaccactggacttcancctggcaacanaangagacttcgnttccaaaaanntttcca

SEQ ID NO: 7386 - DNA, 569 bp, Homo sapiens
  misc_feature (381)..(381): "n" may be a, t, c, g, other or unknown
  misc_feature (392)..(392): "n" may be a, t, c, g, other or unknown
  misc_feature (466)..(466): "n" may be a, t, c, g, other or unknown
  misc_feature (474)..(474): "n" may be a, t, c, g, other or unknown
  misc_feature (482)..(482): "n" may be a, t, c, g, other or unknown
  misc_feature (485)..(485): "n" may be a, t, c, g, other or unknown
  misc_feature (497)..(497): "n" may be a, t, c, g, other or unknown
  misc_feature (512)..(512): "n" may be a, t, c, g, other or unknown
  misc_feature (515)..(515): "n" may be a, t, c, g, other or unknown
gtttggcaactttctggtattacttgtaaacactggttccttcaactttctgatattacttgtaaacactggttccttctcaaccaccgtattctgattgggtctataagtagcacccagtccacaccacagcacgcttctggggtccaggagaccgccttcactactgtgctggccccgcctgtgtacgggccccggggccgggccatccagggtgcctgtggtgctcacacccccatggcgctcttctcgctgtctttggggctgggctcctccggagtcttcttcatctcccagcccctgacccaggtgtaggcggaggagccgcccagcaccatcatgttgctcgtccaccagaggaagctcttggtctcctcgtantagaacacggncagcactgctgggcacaagccttggccgtgcccgacacaattgggggtcaaccggactggtgaacttgaactgnaatcctgncacgtaanccnatggcaaagccnaacaggccggccaanggnattaatcccccaaaatgggcacttgccaaattgggcaaagtacccaagggctga

SEQ ID NO: 7387 - DNA, 554 bp, Homo sapiens
  misc_feature (434)..(434): "n" may be a, t, c, g, other or unknown
  misc_feature (484)..(484): "n" may be a, t, c, g, other or unknown
  misc_feature (504)..(504): "n" may be a, t, c, g, other or unknown
  misc_feature (515)..(515): "n" may be a, t, c, g, other or unknown
  misc_feature (518)..(518): "n" may be a, t, c, g, other or unknown
  misc_feature (529)..(529): "n" may be a, t, c, g, other or unknown
  misc_feature (538)..(538): "n" may be a, t, c, g, other or unknown
  misc_feature (550)..(550): "n" may be a, t, c, g, other or unknown
agcttttctctcatttttttttgttgttattttttttaaaaagatgtcacatatgaactggggaactttagcaccaaaatcaagtctctcctagtccatctagcttccccttcctccccacttaaaaaaaagaaaaaattaaatcacaaagtcccacttaagtcaaaatcttcgtccgctttttcagccttccttcctgcagaccctggcttagtcatctgagatggaaagtctgctgaagatgggcaggcgtcttgagttgtccaaggtcggggagtctgagccactgtggctgctgctggagctgctcaggtagccctcctggtcccgagagagaagtcctgagggctggggggagaagtcaaacatgtgaaggggactcggacatgggcccggaagaaggaaggtgggtcggggaagccacccccggcagncccatgctaggggcaaaaagcttggcagcttctggctggaaaagcaaaangggtattgggccatcggcanggtaggtgaanccnggaggcattgngctcaaaanaagggggggggnaatg

SEQ ID NO: 7388 - DNA, 497 bp, Homo sapiens
  misc_feature (3)..(3): "n" may be a, t, c, g, other or unknown
  misc_feature (10)..(10): "n" may be a, t, c, g, other or unknown
  misc_feature (17)..(17): "n" may be a, t, c, g, other or unknown
  misc_feature (41)..(41): "n" may be a, t, c, g, other or unknown
  misc_feature (92)..(92): "n" may be a, t, c, g, other or unknown
  misc_feature (108)..(108): "n" may be a, t, c, g, other or unknown
  misc_feature (134)..(134): "n" may be a, t, c, g, other or unknown
  misc_feature (174)..(174): "n" may be a, t, c, g, other or unknown
  misc_feature (227)..(227): "n" may be a, t, c, g, other or unknown
  misc_feature (305)..(305): "n" may be a, t, c, g, other or unknown
  misc_feature (330)..(330): "n" may be a, t, c, g, other or unknown
  misc_feature (352)..(352): "n" may be a, t, c, g, other or unknown
  misc_feature (425)..(425): "n" may be a, t, c, g, other or unknown
  misc_feature (434)..(435): "n" may be a, t, c, g, other or unknown
  misc_feature (475)..(476): "n" may be a, t, c, g, other or unknown
  misc_feature (492)..(492): "n" may be a, t, c, g, other or unknown
  misc_feature (495)..(495): "n" may be a, t, c, g, other or unknown
ganacaaggncttgctntgtcacccagggctggagtgcagnggtgcgatcatgatcttgtctcactgcaacttctgcctgctgagttcaagngattcttgggcctcancctcctgagtagctgggattacaggngcccgccactaagcctgactaatttttgtatttttaatanaaatgggatttcaccattttggtcaggctggtcttgaactcctgacctcaagngatctgctcgcctaggcctcccaaactgctgggattacaggcttgagccaccgcccctgactccaaatgaatatttgntctaatcttgctatggcgaatgcanttggtattgaggtcttgtatanacctgggttttaggatgtagcagaactggattaatatcctgcatcaccatttattaacagcattgctaaaacnaagctatgnntcctttctgaaccctggtttctcatcttaaaaaacaagtnnttgaataaattggccnttnta

SEQ ID NO: 7389 - DNA, 560 bp, Homo sapiens
  misc_feature (499)..(499): "n" may be a, t, c, g, other or unknown
  misc_feature (511)..(511): "n" may be a, t, c, g, other or unknown
  misc_feature (518)..(518): "n" may be a, t, c, g, other or unknown
  misc_feature (544)..(544): "n" may be a, t, c, g, other or unknown
  misc_feature (550)..(550): "n" may be a, t, c, g, other or unknown
  misc_feature (560)..(560): "n" may be a, t, c, g, other or unknown
caaatcctaggtttggtcctttattttattcagcagtgaaagccatgaatacagaacgaataacagctgttacaattctcaaccatgacttctaacgtcagagaattcaaagtatgaacatagtacacagtaatgaaaagtatcaaaaattaatttacctcaaaaaagataaataaaacaggtatattccaccaatacataaacagatgtttgtgctacagtttaaaatttgctgtatacaaaagatcatagtccccataatcagcttatgatagaagcaagaatacatgagccatttaaattgtcagacattatgctttataaggtatgcacagaagttcaagcaataaatacatacattagttcaaagccttacaatagctacgcaaagcagatgcagaaaagcagatttgctattactagcaagcaatgatataagagtaaaaattcatgaaatgcatcaaagcacatttttcttagaaaaaggctgggatttatnggtcccccacanttttacntaatatgcccaattttcaaatccggnccagcntttagggacn

SEQ ID NO: 7390 - DNA, 562 bp, Homo sapiens
  misc_feature (435)..(435): "n" may be a, t, c, g, other or unknown
  misc_feature (486)..(486): "n" may be a, t, c, g, other or unknown
  misc_feature (490)..(490): "n" may be a, t, c, g, other or unknown
  misc_feature (494)..(494): "n" may be a, t, c, g, other or unknown
  misc_feature (513)..(513): "n" may be a, t, c, g, other or unknown
  misc_feature (521)..(521): "n" may be a, t, c, g, other or unknown
  misc_feature (555)..(555): "n" may be a, t, c, g, other or unknown
  misc_feature (560)..(560): "n" may be a, t, c, g, other or unknown
gtagagacgggatttccgccatgttgcccacgctgttccccaacttctgaactcaagcgatccgccagcctctgcctcccaaagtactgggattacgggcgtgagccaccgtgcacagccagtgacttcttaatatatatcctaaagcgcaagaggcactggatatttgtggagtcttgataaccaccagggaggggcccaaggtaggagagaacaattgttctgagagacaagtaaccataaacaacgcgctgacacaacgaccttgctccacaggtagcccaaatggcacaacctcgatcagcatgtagccccctccagaagaccttataaaacttccctccagcccctgcctctttgcagacagccccttctctgtagtggctacatattgcacccttgcaatgaaatttcatactttctctaataaatggngcctttatttttcttcccctacactggcttggtaaattccttaccaccggnacancagncccaagcaggcacacttgnaagaagtnctaacagtggagcaacacttattttcacagactntaggnga

SEQ ID NO: 7391 - DNA, 561 bp, Homo sapiens
  misc_feature (466)..(466): "n" may be a, t, c, g, other or unknown
  misc_feature (489)..(489): "n" may be a, t, c, g, other or unknown
  misc_feature (546)..(546): "n" may be a, t, c, g, other or unknown
gttgttgttgttgttttcttttttttttttttgagacggagttttgctgtgttggccaggctggagtgcagtgacactatcttagctcactgcaacctctgcctcggcctcaagcggttcttctgccgtagccacctgagagtagctgggattacaggtgcctgccaccacgcctggctaacttttgtatttttagtagagacggactttcaccatgctggtcaggctggtcttgaactcctgacctcaggtgatccacctgcctctgcctcccaaagtgcaggtgtgagccaccacgcccggcctgtgtggtatttttcaaaatttcaacaacaccgtcataaacaggaaaaccgtttcacagagccccgatcacagagtagttacctgagggactgcacgccgtgtctctcagacttcacgaagaaggggaccttcccgttcctggtgatatccaccaggcctnccttgtcatccaggatcccgtantggatggcggcgcggcatatgctaaacagctttatagacagagttccaaaaatcttngccttgggggtaagg

SEQ ID NO: 7392 - DNA, 559 bp, Homo sapiens
  misc_feature (513)..(513): "n" may be a, t, c, g, other or unknown
  misc_feature (548)..(548): "n" may be a, t, c, g, other or unknown
gagacagagtcttgctctgttgcccaggctggagtgcagtggtgccatctcggctcactgcaagctccgcctcctgggttcacgccattctcctgcctcagcctcccaagtagctgggactacaggcacccactaccacacccagctaattttttgtattttaagtagagacggggtttcaccatgttagccagcatggtctcgatctccgagatcccactttatacaaaagaaaggtgttctccattcttaggaacatggaaaaggggaatccatacttgtgtgaaagtagcccctaagccacctccctcctggagattctaaggaaacttatcagcccaccatccctaaagaactcctcccaaggcctcaggcactgctcctttccaggtttcagggggagcatgctccagcagccgacctgtccccacccggcaccagctgccacaacctgaaaatccgcttgctgccaagagctgcctgagcccagcccaagcttccaccctgccttanagacaggatccacctgctactctggtgagaagctntaaaaagctac

SEQ ID NO: 7393 - DNA, 568 bp, Homo sapiens
  misc_feature (484)..(484): "n" may be a, t, c, g, other or unknown
  misc_feature (554)..(554): "n" may be a, t, c, g, other or unknown
  misc_feature (568)..(568): "n" may be a, t, c, g, other or unknown
ggcttagggggtggaatcttatttttgactaattccctctgggcattatttctaaaggagagaaatttaagatctaacttccatataggggggttatgctcattaatcccactccttatgattgtaaattgaagagaaaggatgttccccaaaggaatgaaggttggaggaaaacctttagcccttcttttcagaagtaatttatctgacaaggatggcagaagaccaattattggcatctgctttctttggccttctctcttcctatactccatacctccagcaagcacttatgtattcttgggcttgacaagggtgaggtcaggtgcaatcttctatccagctgatggctctgtccactctaccaagtcaactcttcccaagtttaggctccaaagtccagttacagggttagaataaataaaggccaattcgatttccagtctaaactgcattctacaatttggcttcattggcaatgcancacgtatctgaatctccatctcactcctcattctgaacttggagatttgatggcttccacaaaagcccanactcatatggtttn

SEQ ID NO: 7394 - DNA, 566 bp, Homo sapiens
  misc_feature (449)..(449): "n" may be a, t, c, g, other or unknown
  misc_feature (479)..(479): "n" may be a, t, c, g, other or unknown
  misc_feature (508)..(508): "n" may be a, t, c, g, other or unknown
  misc_feature (516)..(516): "n" may be a, t, c, g, other or unknown
  misc_feature (556)..(557): "n" may be a, t, c, g, other or unknown
gagttaacaaaatatctttaataaaatctttttgtttgtttgttttgttttggagacagagtctgtcacccaggttggagtgcagtggcgcgatctcggctcactgcaacctctgcctcccgggttcaagcgattctcctgcctcagcctcccgagtagctgggatgacaggtgcatgccaccactctcggctaatttttgtatttttaatagagacggaggtttcaccatgttggccaggctggtctcgaactcctgactcaggtgatccgcccgcctcagcctctcaaagtgttggattacaggcgtgagccacggcgcctggcctaaaacccttttttaccacaaaatggagacctgtaaggcgaagtgaggttggatggctggacggtgggggtggggtgcaagtcctggatcagggccggagctgcacttcttcctcttcttgntgcccgggggcgcctcgtcttcttgcccanaatctttaaaaagctcttggcatgtatanggcccggnccaaggagccgttggttccgttcaaggctttcaggaagcnnaggaaaact

SEQ ID NO: 7395 - DNA, 569 bp, Homo sapiens
  misc_feature (514)..(514): "n" may be a, t, c, g, other or unknown
  misc_feature (529)..(529): "n" may be a, t, c, g, other or unknown
  misc_feature (531)..(531): "n" may be a, t, c, g, other or unknown
  misc_feature (541)..(541): "n" may be a, t, c, g, other or unknown
gaggtggagactcgctctgtcgcccaggctggagttcagtggcatgatctcagctcactgcaacctctgcctcccgggttcaagtgattctcatgcctcagcctcccaagtggcttggattacaggtgcaacaccaccacacctggctaatttttgtatttttagtagaggtggggtttcaccatgttggccaggctgatctcgaactcctgacctcaagtgatccaaccactcagccacccaaagtgctgggattacaggcatgagccaccgcaccaggccctttttgggcttttgtttgttgtttttgtttgtttctttttagagacaagatcttgcttgattgcccaggctggagtgcaatgacaccatcatagctcactgcaaactcgaattcctgggctaaagcaatcctcctgcctgagtcttctgggtagctgtaactacaggcacacactaccacaaacaactaatttttttttttttttttacagattcttactatgttgccaangctgatctgaaactntnagcctaaagngatcctccactttgggcctctaaatatt

SEQ ID NO: 7396 - DNA, 573 bp, Homo sapiens
  misc_feature (461)..(461): "n" may be a, t, c, g, other or unknown
gagaaaggtctcacttcgccatcaaagctagaatgcagtggcatgattatgggctcaagccatcctcccacctctgccctccaagtagctgggactacaggtgtctgccaccatgcttggctaattttttaatttttttgtagagacggggtttagccatgttgcccaggctggtctcaaactcctaagctcaagcaatccgcccaccttggcctcccacagtgctggggttacaggtgtgagccaccgtgcccagtgagcaattttatttttatatcatctctggacctcacattaatctatttttctcagtaaaagtatactgcaaacaggctccagcaatgacagtcacatccagttcctcaaattctttttcttattaagtatgttgagtaaactgaccgtggttttgtgtatagactgataccaaaggcctgaccctaaagccctcaaagacttanagggctgtagggacattagacttcaaacccatcatatcctctttctatccttggaaaagcaacgcacaaagactttcttaaactcttaattctcaagattattccagggggg

SEQ ID NO: 7397 - DNA, 574 bp, Homo sapiens
  misc_feature (534)..(534): "n" may be a, t, c, g, other or unknown
  misc_feature (561)..(561): "n" may be a, t, c, g, other or unknown
gggacggagttttgctcttgttgcccaggctggagtgcaatggcccgatctcgactcacagcaacctccgcctcccgggctcaagcgattctcctgcctcagcctcccgagcagctgggattacaggcatgcaccaccacgcccagccaattttgtatttttagtagagacgggtttcgccatgttggtcaggctggtttcgaactcctgacctcaggtgatccgcctgcctcggcctcccaaagtgttgggattacaggcatgagccactgcgcccggccctattcaattctatttagtcactaagtatgaaaagtattcaggttttgctaagccagggtcaaacactccccacatcctagtttagagtgcttagattttccctctttttcatgcaatttaatgaatgttaaattagcatgaaaattaaatgttatttttaaactccctaaaactttaaaatgttgctaaagttatttttccaaatgtataaaatgacctcatttaataaaaataaactatcttaatggtagnatatgatccgaattggagtggagaatngaaaacagtccca

SEQ ID NO: 7398 - DNA, 569 bp, Homo sapiens
  misc_feature (502)..(502): "n" may be a, t, c, g, other or unknown
gagacggagtcctcactctgtcgcccaggctggagtggagttcagtggcacaatcttggctgactgcaacctctgcctcccgggttcaagctatcctcctgcctcagcatcccaagtagctgggaatataggcatgtgccccatgtgctggggatttttttgtatttttgtatttttagtagagatggggtttcatgttgcccaggctggtctcgaactcctgacctcaagtgatctgtcttagtctctgtgttgggattacgggcgtgagccatcacatccaacaagaccttagatttaagccaaaacaggacttgctgactggggttcaggcagcaatctacaatagggtttgtccactatcaactggatgaagtcaggacagagacagaacaggaaggggattgaagtacaggggattcccaggcacccttgctaggtaagctgggctctgacaaggaagtgtgatgagggtaaacagttaaggaattgcctgcaaggncttctcgcttccaagttttcttggtgagcaaaagtaagaatgagctctttctctttttttttttttt

SEQ ID NO: 7399 - DNA, 476 bp, Homo sapiens
  misc_feature (172)..(172): "n" may be a, t, c, g, other or unknown
  misc_feature (174)..(174): "n" may be a, t, c, g, other or unknown
  misc_feature (189)..(189): "n" may be a, t, c, g, other or unknown
  misc_feature (271)..(271): "n" may be a, t, c, g, other or unknown
  misc_feature (291)..(291): "n" may be a, t, c, g, other or unknown
  misc_feature (300)..(300): "n" may be a, t, c, g, other or unknown
  misc_feature (362)..(362): "n" may be a, t, c, g, other or unknown
  misc_feature (392)..(392): "n" may be a, t, c, g, other or unknown
  misc_feature (396)..(396): "n" may be a, t, c, g, other or unknown
  misc_feature (414)..(414): "n" may be a, t, c, g, other or unknown
  misc_feature (434)..(434): "n" may be a, t, c, g, other or unknown
  misc_feature (454)..(454): "n" may be a, t, c, g, other or unknown
  misc_feature (461)..(461): "n" may be a, t, c, g, other or unknown
  misc_feature (471)..(471): "n" may be a, t, c, g, other or unknown
gagacggagtctccttctgtcgcccaggctggagtgcagtggtgcaatatcggctcactgcaagctccgcctcccaggctcacaccattctcctgcctcagcctcgtgagtagctgggactacaggcgcccgccaccacgcccggctaatttttttttgtattttttggtananacggggtttcactgngttagccaggatggtctcgatctcctgacctcgtgatccgcccgcctgggcctcccaaagtgctgggattaccaacttgganaaagtcatgagtttttgaanagtctgganaagttctagaaacccctgaactgacgagcttcttctcagtgaaaagacggtccataaacagnggatttagaaacgcgacccgaccttactgngagnggttctgatagtccttgncacgggagatccaaacgcancaggaaagggaatgggactnccggggngctttttccnacaaa

SEQ ID NO: 7400 - DNA, 567 bp, Homo sapiens
  misc_feature (555)..(555): "n" may be a, t, c, g, other or unknown
gatgtgttgacactgataatttccagcttgagcaactgaatagatggcaatgtcacttgattgtcaaaaatagatacttgtatccctacttggagcaaacttaccacaaaaatacatttctttcttaaatacatgggctctgagtttctattccttgacctggagcaggattacaaaataagaagaaatgcattccatctcatctacctctcctagtctcttagagttataactgagaccaagctaagaacctcctagttgcatgtaaattataaccattaattgactggaattcctagcatgtacttggtcttcattaacattcatgttaactgcaggccaaaacagttctgctgctgttaaatcattgattctgcaatggcctaaacactaactcttggataactagccatctaaatcccccttcacccacactttatttctgagattctcagtaaagctctccagaaacccggttgaccatggaaaaaccaggaggaatcatacttctggatggggtttctcctccaaacttatatcggaactggacaccanttttgggaggtt

SEQ ID NO: 7401 - DNA, 557 bp, Homo sapiens
  misc_feature (466)..(466): "n" may be a, t, c, g, other or unknown
  misc_feature (498)..(498): "n" may be a, t, c, g, other or unknown
  misc_feature (521)..(521): "n" may be a, t, c, g, other or unknown
  misc_feature (536)..(536): "n" may be a, t, c, g, other or unknown
  misc_feature (557)..(557): "n" may be a, t, c, g, other or unknown
gctttccattttctttgtaaatattcctccatccatttgttttgagcctatgtgtgtctttgcacacgagatgggtctcctgaatacagcacaccaatgggtcttgactctatccaatttaccagtgtgtgtcttttaattggggcatttagtccatttacatttaagtttaattattgtttcatgtgaatttgatcctgttattatgacagtagctggttattttgcctgttagttgatgcagtttcttcatagtgtcgatggtctttacaattttgtatgtttttgcagtggctggtaccagtttttcctttccatatttagtgtttccttcaggagctcttgtaaggcagccctggtggtaacaaaatcccttagtatctggttgtctgtaaaggattttatttctccttcacttatggaatttagctaggttggataggaaatctgggttgaaaatctttcnttaagagtgtgaatattggcccccactttttntggcttggaaggttctgccaaanaaccgttgtaagccngatggcttcccggcccggctn

SEQ ID NO: 7402 - DNA, 557 bp, Homo sapiens
  misc_feature (473)..(473): "n" may be a, t, c, g, other or unknown
  misc_feature (476)..(476): "n" may be a, t, c, g, other or unknown
  misc_feature (491)..(491): "n" may be a, t, c, g, other or unknown
  misc_feature (502)..(502): "n" may be a, t, c, g, other or unknown
  misc_feature (534)..(534): "n" may be a, t, c, g, other or unknown
  misc_feature (536)..(536): "n" may be a, t, c, g, other or unknown
  misc_feature (546)..(546): "n" may be a, t, c, g, other or unknown
acataaatcgaggcttttatttacatcataggacaagaaaaggatacaaaagaagtctcttggtcaagcacatcaagcgaaagctctaaaactcaatactcagtaaggtgtgggcactgatattgaaaaaaagaaaaaaaaagaaagaaaaggtaaaaaggtaatctgtgacacaatccaaatgcttacactccagggattgagtaagagaaacccagggcagccctgccacagagaatgacggctcaggttgagtgacatctgagattcatcttctgtacccgtgaacctgactcccaggacaacccctaggaggttttgacttttgacattagtgagttaattcttaaccagattcttaagaatttcagggccaaacaggcttgaatgtacggtttttccaatttgggggatgggagtggggaagctcttcctgggacagattcccaggcaaggaaaggccccagcagttntgnccctacctgggcttntgcttcatttnccacgagaaacttgggggcttgctggggcttntnaacaacctgnacaagctttta

SEQ ID NO: 7403 - DNA, 544 bp, Homo sapiens
  misc_feature (3)..(3): "n" may be a, t, c, g, other or unknown
  misc_feature (17)..(17): "n" may be a, t, c, g, other or unknown
  misc_feature (20)..(20): "n" may be a, t, c, g, other or unknown
  misc_feature (40)..(40): "n" may be a, t, c, g, other or unknown
  misc_feature (168)..(168): "n" may be a, t, c, g, other or unknown
  misc_feature (170)..(170): "n" may be a, t, c, g, other or unknown
  misc_feature (427)..(427): "n" may be a, t, c, g, other or unknown
  misc_feature (496)..(496): "n" may be a, t, c, g, other or unknown
  misc_feature (505)..(505): "n" may be a, t, c, g, other or unknown
  misc_feature (527)..(527): "n" may be a, t, c, g, other or unknown
  misc_feature (535)..(535): "n" may be a, t, c, g, other or unknown
  misc_feature (543)..(544): "n" may be a, t, c, g, other or unknown
ganacagagtctttctntgnggcccaggcttgagtgcagnggcgcaatctcggttcactgtaacatccgcctcctgggttcaagcaattttcctgcctcagcctcccgagtagctgggattacaggcgcatgccaccatgcccagctaattttttgtagttttagtananatggggtttttccacattggctaggctgatcttgaacttctgacctcaggtgatccacctgtctcggcctcccaaagtgctgggattacaggcgtgagccaccgcgcctggctgtattgtcattttaaacaccgtatccagataaactgtaagagggaacatggaatagaatgcttgtttttcacttgttaatattttttttaattttcaaaaaatagaagtgatgtactctaaccaccatataaataatggccagngctctggatatccttttttttaattttttagagcaagacgtatttcaacgactggcaccaatttggttnctgcctttnttggccaaaaagaaaatttggntttaaaanaaggttann

SEQ ID NO: 7404 - DNA, 420 bp, Homo sapiens
  misc_feature (368)..(368): "n" may be a, t, c, g, other or unknown
  misc_feature (376)..(376): "n" may be a, t, c, g, other or unknown
  misc_feature (378)..(378): "n" may be a, t, c, g, other or unknown
  misc_feature (387)..(387): "n" may be a, t, c, g, other or unknown
  misc_feature (399)..(399): "n" may be a, t, c, g, other or unknown
  misc_feature (411)..(411): "n" may be a, t, c, g, other or unknown
  misc_feature (413)..(413): "n" may be a, t, c, g, other or unknown
gagacggagtctcacactgtcgcctgggctggagcgcagtggtgcgatctcggctcactgcaacctcgacttcccgagttcaagtgattctcctgcctgagcctcccgagtaggtgggattagaggcacccgcctccacacccagctaatattttgtatttttagtagagatgggatttcaccatgttggccaggctggtctcgaactcctgacctagtgattggcccacctaggcctcccaaagtgctgggattacaggcatgagccactgcgcctggcctttctctttctctctttttattttttgaaaaacccggtagactttgcggtgaccatttttgttgtactttttttttttttttttganacggagtntnacactgtcncctgggctggancccaatggtgcnanctcggtt

SEQ ID NO: 7405 - DNA, 525 bp, Homo sapiens
  misc_feature (448)..(448): "n" may be a, t, c, g, other or unknown
  misc_feature (475)..(475): "n" may be a, t, c, g, other or unknown
  misc_feature (477)..(477): "n" may be a, t, c, g, other or unknown
  misc_feature (488)..(488): "n" may be a, t, c, g, other or unknown
  misc_feature (501)..(501): "n" may be a, t, c, g, other or unknown
  misc_feature (511)..(512): "n" may be a, t, c, g, other or unknown
aaaggtcaccgggctttttattgcagttgaagcagactcggacgggatggtcctagccacgagaaggaacagcccggcggtcatgggagcactcatcacagaagccctgtccgcaggcccggcagtggtgcttggagagcttgatgctgaactccttccggcagttgtggcagtggaggatttcgtggtcaggcacccagtacgcaggcctggccgcgtcctttaccagacctagtggtatgtcaatggctgtcaccacggctcccagagtgttctgcacggcctcgcccaccttccgagcaatgagcgttccaccttcatcgtctacttgtgcctcggtaacagctaactggacgttcctggcttcgtagcagttgtcacagacccgactggcgcagggccccagccccgctcaggcactggccgagtctttgatgaacaagcttgncacagaagcccttcccacaggcttggnantgatgcttaanggccgtatctttnaaggacgttnnacacttggtgcag

SEQ ID NO: 7406 - DNA, 559 bp, Homo sapiens
  misc_feature (436)..(436): "n" may be a, t, c, g, other or unknown
  misc_feature (498)..(498): "n" may be a, t, c, g, other or unknown
  misc_feature (521)..(521): "n" may be a, t, c, g, other or unknown
gagatggagtctcactctgtcatccaggctggagtgctgtggcatgatctcggctcactgcaacttccgcctccctggttcacatgattctcctgcctttgcctccagagtagatgggattacaggtgcctgccaccatgcctggctaatttttgtatttttagtagagatgggtttcaccatgttggccaggctggtctcaaactcctgacttcaggtgatccaaccgcctcggcctcccaaagtgctggggttgtttccagtttttggctattaagagtaaagcaacattgtttgtttttttgactcttaaatgcctgtcttataaatggcgctaagcagggaaaagctaattattaaatattgtttgactgaaatgtgaaccacatttttccctaatttatgtcagaaatcactatttaataatattggttgngtttatatgtgattttaaaatgatccccaccttaattaaaatgaccatccctgaaagtgaanccaaaaggaaggaatcctctaanctactttggcatgacttggctttaaaagggcccggttt

SEQ ID NO: 7407 - DNA, 533 bp, Homo sapiens
  misc_feature (472)..(472): "n" may be a, t, c, g, other or unknown
  misc_feature (499)..(499): "n" may be a, t, c, g, other or unknown
  misc_feature (512)..(512): "n" may be a, t, c, g, other or unknown
  misc_feature (514)..(514): "n" may be a, t, c, g, other or unknown
  misc_feature (520)..(520): "n" may be a, t, c, g, other or unknown
  misc_feature (522)..(522): "n" may be a, t, c, g, other or unknown
  misc_feature (533)..(533): "n" may be a, t, c, g, other or unknown
aagttctgggatacatgtgcagaatgtgcaggtttgttacataggtatatacgtgccatgctggtttgctgcacccatcaaccccgtcatctagggatgacgccgggaatttcaagccccgcacgcattaggtatttgtcctaatgctctcccttccctcatcccccacccccaacacccccgacaggccccggtgtgtgatgttcccctcccggtgtccatgttgaacaataacttctgcatccctgtatatagccacaggtgatgtggccaggttttctattgattctgatagtcacaaaggcaagaactatattattcactccctcttagtaaaagctctagcctagtctaggtctttagatcaccaatagttcggtaactttcacttgtcttccagatttcatgggtagagcagtaggctacaggccaacaaagagcaaatggtacagtgagagatgtgacaggcgangtaaagcaggaacagagacccccacanggcaagccagacngnacacancnggaatggtgcn

SEQ ID NO: 7408 - DNA, 569 bp, Homo sapiens
  misc_feature (343)..(343): "n" may be a, t, c, g, other or unknown
  misc_feature (355)..(355): "n" may be a, t, c, g, other or unknown
  misc_feature (458)..(458): "n" may be a, t, c, g, other or unknown
  misc_feature (469)..(469): "n" may be a, t, c, g, other or unknown
  misc_feature (518)..(518): "n" may be a, t, c, g, other or unknown
  misc_feature (544)..(544): "n" may be a, t, c, g, other or unknown
  misc_feature (551)..(551): "n" may be a, t, c, g, other or unknown
gtacagacggggtttctccgtgttggtcgggctgatctcaagctcctgacctcgggtgatccacccgcctccgcctccctgggtgctaggattgcaggcgtgagccaccgcgcctccggcccaatttagtaaccagaaaggaatagatcggcctggcgtggtagctcatgcttgtgatcccagcactgtggacggccgagcgcggcgatcgattgagcctaggacttccagaccggcctgggcaacgtggtgaaacactgtcttttttttttttttttttttttgagtggagtttcgctcgttttgcaggctggagtgcagtggcgtggtctcgactcaccgnggcctccacctnccgggtttaggtggttctcctgcctcaacctcctgagtgtctgggattgcaggcatgagccaccatgccagctaattttgggtttatttttttggtacaaacngggtttttcgngttgggcaagctgatctgagcttctgaccttgagtgatacgcccgcttnggcttccctgggggctgggaattgangccttanccaccgggcccccggtct

SEQ ID NO: 7409 - DNA, 548 bp, Homo sapiens
  misc_feature (443)..(443): "n" may be a, t, c, g, other or unknown
  misc_feature (478)..(478): "n" may be a, t, c, g, other or unknown
  misc_feature (487)..(487): "n" may be a, t, c, g, other or unknown
  misc_feature (490)..(490): "n" may be a, t, c, g, other or unknown
  misc_feature (504)..(504): "n" may be a, t, c, g, other or unknown
  misc_feature (525)..(525): "n" may be a, t, c, g, other or unknown
  misc_feature (527)..(527): "n" may be a, t, c, g, other or unknown
  misc_feature (546)..(546): "n" may be a, t, c, g, other or unknown
cttgagacagagtttcgctcttgttgcccaggctggagtgcaatggcgtgatctcggctcaccgcaacctctgcctcctgggttcaagggattcttctgcctcagcctcctgagtagctgggaatacaggcatgtgccaccacgcctggctaatttttgtatttttagtagagatggggtttcttcatgttggtcaggctggtcttgaactcccagcctcacgtgatccgcccacctcagcctcccaaagagctgggattataggcgggagccatggcactcggccctattttgcccgttttcttgagacatcttaaatgaacatatagcttcaggaagccatggtagcagacaggaccacagtgctttccgtgatgtggcccgtctcctagagtccagcagaccggaccttcgcaagaaaaactgctgaggagatggagaangaaaggcccaaagcctggtattcacttcaaaagcnagcgctganganatggaggaagggcnaaaacctggatattactttanangcagccttaagaattgganga

SEQ ID NO: 7410 - DNA, 564 bp, Homo sapiens
  misc_feature (404)..(404): "n" may be a, t, c, g, other or unknown
  misc_feature (412)..(412): "n" may be a, t, c, g, other or unknown
  misc_feature (497)..(497): "n" may be a, t, c, g, other or unknown
  misc_feature (510)..(510): "n" may be a, t, c, g, other or unknown
  misc_feature (518)..(518): "n" may be a, t, c, g, other or unknown
  misc_feature (537)..(537): "n" may be a, t, c, g, other or unknown
  misc_feature (563)..(563): "n" may be a, t, c, g, other or unknown
gagatggagtttcactcttgttgcctaggccaggattacaggcatgagccactgcacccagccaagacagtaatttttaaaaatgaaaatcttgcagaagatagaggaaaatatcacagtagagtacagaataaataaattagtctgttatataatggcataaaatacatttactaatagtgatactgattcatgtaaattgaaagacggtatcattaattactaagagaggaaggtaggtttgaaagggtatgtataatttgggaggagatattttggtgaaattaagaacataggctctatgttcttaatttctataactttcagaatgtgaatctgagctctaacagttattaactgcttgtttcctcactagtaaaattgggataataatactataaggnatgactgnctcagctattaaatatcagaatatctaatacataccgcaatatgtaaagaatttttaaggttgggggtactattggaagatcagnaccttacccgganctggatcnagtttaaaaagaaactcantgctggtttaaatttttggaaaaggnc

SEQ ID NO: 7411 - DNA, 530 bp, Homo sapiens
  misc_feature (440)..(440): "n" may be a, t, c, g, other or unknown
  misc_feature (467)..(467): "n" may be a, t, c, g, other or unknown
  misc_feature (482)..(482): "n" may be a, t, c, g, other or unknown
  misc_feature (500)..(500): "n" may be a, t, c, g, other or unknown
  misc_feature (502)..(502): "n" may be a, t, c, g, other or unknown
  misc_feature (511)..(511): "n" may be a, t, c, g, other or unknown
  misc_feature (518)..(518): "n" may be a, t, c, g, other or unknown
gagacagacttttgctcttgttgcccaggctggagtgcaatggtatgatctcggcttaccacaacctccgcctcttgggttcaagcgattctcctgcctcagcctcccaagtagctgggattacaggcatgtgccactactcctggctaattttttatttttagtagagatggggtttctccatgttggtcaggctggtctcaaactcccgacctcaggtgatctgcacgcctcggcctcccaaagtgctggggttacaggcatgagccatcgcgcctggcccctacatttttaatgcctctaaaatccagacatgtttttataatcaatggcaccttggacttgatgaaataaagtaatcaaatagttttaataaatcaaatacctttaaaaatataaacaatttaaaaattggtctaagacccaggttccaaccttangatctggatatgaccataatgctatantagcatattaaagcngagaccccgaccatagcngnaaccctttnaaagggnaaaaacctggta

SEQ ID NO: 7412 - DNA, 561 bp, Homo sapiens
  misc_feature (130)..(130): "n" may be a, t, c, g, other or unknown
  misc_feature (138)..(138): "n" may be a, t, c, g, other or unknown
  misc_feature (160)..(160): "n" may be a, t, c, g, other or unknown
  misc_feature (244)..(244): "n" may be a, t, c, g, other or unknown
  misc_feature (269)..(269): "n" may be a, t, c, g, other or unknown
  misc_feature (340)..(340): "n" may be a, t, c, g, other or unknown
  misc_feature (445)..(445): "n" may be a, t, c, g, other or unknown
  misc_feature (452)..(452): "n" may be a, t, c, g, other or unknown
  misc_feature (473)..(473): "n" may be a, t, c, g, other or unknown
  misc_feature (506)..(506): "n" may be a, t, c, g, other or unknown
  misc_feature (517)..(517): "n" may be a, t, c, g, other or unknown
  misc_feature (540)..(540): "n" may be a, t, c, g, other or unknown
  misc_feature (548)..(548): "n" may be a, t, c, g, other or unknown
cctttcattttctttttcttaaaaaaacaaaatgaaacaaaaaaaaaagcctgaatcaaaacctttttaggagtagttacagatattatagggatgggggcggggggcactaaaacaaaagagaaaagcnccagtganatgtctttcccattttcttctntccgccacggaacacgcacaccaacagagcccaggccactttttgccctcttcccttggaaaaaggaggaacagaagatttaanaattttgaaaggatttttttcttgngtgaatgtgtgtaaaagtcaatgctataaatctaaaacgaggtctgtttttttaaaaaagttctaaaacancaggaggaaaacacatggaaagaaacccctcgcggagacctgcttccttacagatggaggctcttttggagggaaagttgtgaaaggggcaaagggctccttgcnccggcanggacctgcccggccaccttcnattccctggccttaacccttcttttttcctttnaaaaggcaaanccccacttttgggactcggtcgncctccgancccggtgggaagg

SEQ ID NO: 7413 - DNA, 562 bp, Homo sapiens
  misc_feature (536)..(536): "n" may be a, t, c, g, other or unknown
  misc_feature (538)..(538): "n" may be a, t, c, g, other or unknown
  misc_feature (543)..(543): "n" may be a, t, c, g, other or unknown
  misc_feature (548)..(548): "n" may be a, t, c, g, other or unknown
  misc_feature (550)..(550): "n" may be a, t, c, g, other or unknown
  misc_feature (561)..(561): "n" may be a, t, c, g, other or unknown
gaggtggaatcttgctctgtcgcccaggctggagtgcaatggtacagtctaggatcactgcaacctccgcctcccaggttcaagtgattctcctgcctcagcctcccaagtagctgggactacaggcgagcgccaccacacccggctaatttttgcatttttagtagagaaggggtttcaccacgttggccaggctggtctcaaacccctgaccttgggatacgcctcggtctcccaaagtgctgggattacaggcatgagccaccgtacccagccggcctgatactattacaatagcaaagcactgtttagtgggccagtgtcctgtcatggatttcgacaacataattcctgaatgtgtgttccagctctaccactaacaagcgatgtaaacttgggcaggtagcaatctcttctgacctgtttcctcatcttaaaatataacaatatttcctgccctgcctaaaccattgggatggtgggaagaatccaatgagatggcctatgtgaaagctttggaactgggaattcccggntnaaacncctgngngaccatgtcang

SEQ ID NO: 7414 - DNA, 563 bp, Homo sapiens
  misc_feature (542)..(542): "n" may be a, t, c, g, other or unknown
  misc_feature (544)..(544): "n" may be a, t, c, g, other or unknown
  misc_feature (557)..(557): "n" may be a, t, c, g, other or unknown
aaagcaaaccctgatctctttctttgaattggaacatttagtcaattaataattaatgcaattatggatatatttgaatttaaatctaccatcttactacttgttatttattccatttgttctatgtccccttttttttcctttcttgccttcttttggattattttttattattccatttccttcctgctaataacttaatggatatatattactttttaccatcataaatgctttataaccagtgttctaataagtcatctattaaaattttattttacttctgacagattggaatgataaatgagtctgttttctcaatggctggcataattttgatagcaaactttccaaacagcaggacatcacaccccgacaacatgactcatcttcagagaaaatttagttagaatgacggagaattccagaaaaattactgcatactcagagtgccaatttttcagaacttcatgcaaaatgtttatttggccacaatctcaaaactatattcccaacttgttctgaagttcatattaatattngnaacttaaatggcntttaaa

SEQ ID NO: 7415 - DNA, 559 bp, Homo sapiens
  misc_feature (497)..(497): "n" may be a, t, c, g, other or unknown
  misc_feature (512)..(512): "n" may be a, t, c, g, other or unknown
  misc_feature (519)..(519): "n" may be a, t, c, g, other or unknown
  misc_feature (535)..(535): "n" may be a, t, c, g, other or unknown
  misc_feature (540)..(540): "n" may be a, t, c, g, other or unknown
  misc_feature (547)..(547): "n" may be a, t, c, g, other or unknown
  misc_feature (558)..(558): "n" may be a, t, c, g, other or unknown
atttttaaatcattttatttttcatttctaacagtcaaattttaatactgaattcagtttcattcatccaatattatttcaattaaaagcacagttttcaagttttcctgacaaaggaaaaacataaaagacatttaataagttataatcaagtattatgtttcaattttgttgtgagtttattacatttgaaagggtgtaacacattgcacataatgaaatagctgttatttcctttggaggggttaaggtaaatggagtacaatctgaagtatgctctgtttttttcctgcaagcctctgaacattacagctgtttacagtatgctgctgacaaattcaaagtcaggtggtgaatctttgagtaagcccattagctaggaagagattataacactgttccctgactataaacttaatcctagttagcagctttctaactccctttacaacagggaagactcagtgggaaaatgtagaaaacccaatgcactttgnaccacaggagagaancacctgngaatatcatgctaggnggaanggaaggncttttatttang

SEQ ID NO: 7416 - DNA, 525 bp, Homo sapiens
  misc_feature (315)..(315): "n" may be a, t, c, g, other or unknown
  misc_feature (434)..(434): "n" may be a, t, c, g, other or unknown
  misc_feature (437)..(437): "n" may be a, t, c, g, other or unknown
  misc_feature (446)..(446): "n" may be a, t, c, g, other or unknown
  misc_feature (450)..(450): "n" may be a, t, c, g, other or unknown
  misc_feature (484)..(484): "n" may be a, t, c, g, other or unknown
  misc_feature (500)..(500): "n" may be a, t, c, g, other or unknown
  misc_feature (514)..(514): "n" may be a, t, c, g, other or unknown
atgtagacacagtgatatgacaggctggagcaaggtggtgggattggtgaagatgtatatatgctggaaatcttgaattcatcaggctgtcctgtttggcttcctcaaaatcaatactgcctccactgtcccttcccctcaccaaaaattaagtatagaccacctgactgcatccatttatcaatattaactcagctctggcttcatcagatttctccttaggtctgatttcttcactcatttaaaaaaagattgcttctcaaactatttattttctgagatagggttttgctctgctgcctaggctggaatgcnagtggtggaatctcagctcaatgcaaactctgccttctgggttcaaggcccatcctccaccttaagcctcctgagtaactgggaccccaggtggccaccaccacaccgggctaattttnggntttttattnaagncaaggtttaccatggttgcccaggctggtcttcnaattcctggctcaagnaacctattggcctngggcttccaaa

SEQ ID NO: 7417 - DNA, 480 bp, Homo sapiens
  misc_feature (62)..(62): "n" may be a, t, c, g, other or unknown
  misc_feature (73)..(73): "n" may be a, t, c, g, other or unknown
  misc_feature (119)..(119): "n" may be a, t, c, g, other or unknown
  misc_feature (194)..(194): "n" may be a, t, c, g, other or unknown
  misc_feature (209)..(209): "n" may be a, t, c, g, other or unknown
  misc_feature (229)..(229): "n" may be a, t, c, g, other or unknown
  misc_feature (382)..(382): "n" may be a, t, c, g, other or unknown
  misc_feature (395)..(395): "n" may be a, t, c, g, other or unknown
  misc_feature (418)..(418): "n" may be a, t, c, g, other or unknown
  misc_feature (454)..(454): "n" may be a, t, c, g, other or unknown
  misc_feature (459)..(459): "n" may be a, t, c, g, other or unknown
  misc_feature (470)..(471): "n" may be a, t, c, g, other or unknown
gatttttgattttttaatggcagcactctcataactacattcacggaccaaccaaagccatntccaagcctanaaaggatacatactacacgcagcgaaaatgccaaccactgatccanaattttcaagatggcacctttccccaaacttctataccattcattaaacatagactgcaaactgctagcctgtanaccaaattcaacctntaagtattatttgcttaggngcctaagcatctttaaaaatttgatttagttggcaatacactgggaggtttcacataaatatctaggtttccagcttctctgaagaaatgagaaaatccattcccacatggcaacaaccagctggagctaacagctgttagacagcatgctgntccccgctactgncttacacccaaccagcttcatgngggcatggtatctgcctggcattcacatcgggtctncttgnttaacaaatgnnccaccttaa

SEQ ID NO: 7418 - DNA, 558 bp, Homo sapiens
  misc_feature (381)..(381): "n" may be a, t, c, g, other or unknown
  misc_feature (468)..(468): "n" may be a, t, c, g, other or unknown
  misc_feature (482)..(482): "n" may be a, t, c, g, other or unknown
  misc_feature (511)..(511): "n" may be a, t, c, g, other or unknown
ggaaatccaaaatacaactcatccactgaaatacctggcttagtgtcaaatgttttattctgcaatggtggcttaattcagatgggttggttacatgctacctgctattaagatggcctcatgcaaactgtcattctttgaaactgctggtatgtggagattgcacaacttcatgtacaaatgaacatggaaccagagaaaccacttagcagttacactggtacaacaacaccatacaaatgaattacaaagcagccctcaagagatgttacacacgtgataacaagtagtcactgctggcctgtcattttagcaatttatagtttgcttgatatatgtgtctgtgtgtatgaatctaaagaatgagaaaaaattaattgngtagtgattcatttatcaggagtcagacttaataaaatggaacaaaaacatcacaaacaggtaaagcatggagaatctggtggggtnaagggccttggaantgccaaaggaaaatggatggtactatccntttggggggtcaatcacttatttgaaagggctggaaaaagacaagta

SEQ ID NO: 7419 - DNA, 545 bp, Homo sapiens
  misc_feature (338)..(338): "n" may be a, t, c, g, other or unknown
  misc_feature (355)..(355): "n" may be a, t, c, g, other or unknown
  misc_feature (466)..(466): "n" may be a, t, c, g, other or unknown
  misc_feature (470)..(470): "n" may be a, t, c, g, other or unknown
  misc_feature (490)..(490): "n" may be a, t, c, g, other or unknown
  misc_feature (506)..(506): "n" may be a, t, c, g, other or unknown
  misc_feature (513)..(513): "n" may be a, t, c, g, other or unknown
  misc_feature (529)..(529): "n" may be a, t, c, g, other or unknown
  misc_feature (542)..(542): "n" may be a, t, c, g, other or unknown
agaaagggggtcttgtatcgttaaccaggctggtctcaaactcctggcctcaagcaatcctactgcctcagactcacaaagtactggtattacaggcgtgggtcaccacatccagcctaaaatggtaactttttctatcatttcacattaatccagttattcattgtatgatatctatttctttttttaaaaaaattcgttgatatacagtattattaatggggagtacgtgataatttgatacatttatataatgtgggaagatcaaatcagagtaattagaatgcctatcacctgatatatttatcttttctttatgttaagaacatttgaattgntctcttttggctactgngaaatgtcaacatactattggtaagtatagttcccccaccccaaccactggatctattaacactgagtcttaattcttctatctgactggatggatctaaggatttttacncatnggtggtgtaaggggaaaggncccaggttggagacanttaagtnccccatttaccattanggaaaaggaaaanggc

SEQ ID NO: 7420 - DNA, 558 bp, Homo sapiens
  misc_feature (281)..(281): "n" may be a, t, c, g, other or unknown
  misc_feature (404)..(404): "n" may be a, t, c, g, other or unknown
  misc_feature (473)..(473): "n" may be a, t, c, g, other or unknown
  misc_feature (489)..(489): "n" may be a, t, c, g, other or unknown
  misc_feature (520)..(520): "n" may be a, t, c, g, other or unknown
  misc_feature (530)..(531): "n" may be a, t, c, g, other or unknown
  misc_feature (554)..(554): "n" may be a, t, c, g, other or unknown
  misc_feature (557)..(557): "n" may be a, t, c, g, other or unknown
gagacagagtctcactctgtcgcccaggctggagtacagtggaacgatctcagctcactgcaacctccacctcccgggttcaagcaattctcctgcctcagcctcccaagtagaagtgctgcatacaaagcctactttctggcccctacccacttctctagtcagatatatctcactgaatcagctgtagttcctgaaatataccatgttgttttataccactgagcttttgtctaagctgttccttctgcctggagtagctcactttctgtcaaccttgngaacaatttctcaacttttaggacagaactcaggtatcattcctccaaatagtcttctaaatctcccttggcagatcaaccactccttcctttggatcctctctccctaactgctatagaagntggtgggtggttttttggttggttggtttgagacaaggcttgctctggcacccaagaaggaatggtggnggcatgaacttggctnatggaacttcacttccaaggtcaagcaattntccggcttanncctcggagaactgggaataccgngcnc

SEQ ID NO: 7421 - DNA, 548 bp, Homo sapiens
  misc_feature (460)..(460): "n" may be a, t, c, g, other or unknown
  misc_feature (469)..(469): "n" may be a, t, c, g, other or unknown
  misc_feature (474)..(474): "n" may be a, t, c, g, other or unknown
  misc_feature (490)..(490): "n" may be a, t, c, g, other or unknown
  misc_feature (514)..(514): "n" may be a, t, c, g, other or unknown
  misc_feature (518)..(518): "n" may be a, t, c, g, other or unknown
  misc_feature (540)..(540): "n" may be a, t, c, g, other or unknown
ggctccacctcgaccttttttatttgcattttttaaaaacaattaaattagaatacaaatattagaaaacagcggccttcagctgcccgtgcgggcgggaggggccgagctgcgcagcgggctgcgggctctgcagtgagactgaactgccctcggccagatgcacgtccctttctttagacctgaaatgatattgcttcctgactaggagttctgtttatacaaaggaaaattctgggctggggaggacaaaagcaaaacagaccgcaggcagcggtgttggagaaccaggtgaggccggtgccccgcctgcgccccggtctcctggggggcaaggggggtgcccagctgtgggctcctgaaggcagagccctggtagctcccccagttgttggaccctgaggccaagggcatgggtggggcctgcgaggggcccgggaaccctggggacaggaaggangcccctggnctggncctgctggaaaatgangctcccgggggacaggtgccgggncagncttgtacccgtcggaaaaccangagcaaaa

SEQ ID NO: 7422 - DNA, 569 bp, Homo sapiens
  misc_feature (19)..(19): "n" may be a, t, c, g, other or unknown
  misc_feature (468)..(468): "n" may be a, t, c, g, other or unknown
  misc_feature (501)..(501): "n" may be a, t, c, g, other or unknown
  misc_feature (534)..(534): "n" may be a, t, c, g, other or unknown
  misc_feature (558)..(558): "n" may be a, t, c, g, other or unknown
  misc_feature (568)..(568): "n" may be a, t, c, g, other or unknown
cttttttgctatttatcangcaggttgtgtggagctgagtggtgtgagcctcaccctgctaaataaagctttggtatttctgataaagccatcaaattccttatcgcactgacacaaagtgcatttaaagagacagacaccctgtccctccctcctcaccagcccctgccccctccaaccagttcagatttccagctgctcagacactttgggatcagacaccaaatacggctcctgaggacatggatggggggcagggggcaggggacaggggcggaggtagaaaacccttgccaattcccccccaactgatgtcagagctgccggcaccctgaactcggtcccagggcgtggcatggggcttcctgacccaactctggaagccgaagggagctatgaatagagacgtcctgcaccggaggacgtcctcataaacagaacaatcctgtggtaggacaacagcatcantgggaggaagaagtccggcaggctggtgggccnttaaggctgtgcagccgttgcaacacccctggncgcttaacgaccaaagcggttcanggaccggccna

SEQ ID NO: 7423 - DNA, 558 bp, Homo sapiens
  misc_feature (453)..(453): "n" may be a, t, c, g, other or unknown
  misc_feature (505)..(505): "n" may be a, t, c, g, other or unknown
  misc_feature (556)..(556): "n" may be a, t, c, g, other or unknown
gagatggagtctcactctgctgcccaggctggagtgcagtagcgcaatcttggctcactgcaagctccgcctcccgggcccacgccattctcctgcctcagcctcccaagtagctgggactacaggtgcccgccaccacgctcggctaatttttttgtatttccagtagagacggggtttcaccgtgttagccaagatggtctcgatctcctgacctcgcgatctgcccgccttggcctcccaaagtgctgggattacaggcgtgagccaccgcacccggctttaatttttttttctcctttggtatgcatctctgcacatggtgagaacatcaatagataatccatattcatcacctcttagcatttcagttttcagttgaagactaaaaaatcaaatcaattttaaagttaaaatatactctaaatattatccctccttgggagtaattgntgctattgggtttatgatagtcatcaataaataagaaaggaaacagacgcancaaaaagaaagacagggactaggggctttctcctaataggaaaaaagttgngg

SEQ ID NO: 7424 - DNA, 569 bp, Homo sapiens
  misc_feature (486)..(486): "n" may be a, t, c, g, other or unknown
  misc_feature (542)..(542): "n" may be a, t, c, g, other or unknown
  misc_feature (567)..(567): "n" may be a, t, c, g, other or unknown
gactgctccttatggagcagggctaacccatagagtagccctgttcctgagtttgtgaagagaagttgccttttcagacccacccaggcagagccaggagctagccctcactgtgtccacagtgcagcctgccaggccagcagcaaactaactagtgctggcccagaagcctctgctccattttgatatgaatcaaatgtaagtcagtataactattcgaactttccaaaccttcctgtccaacacatgaaaggttagaaaggttaggcaattggtctgaggtcacccagccacctaggtcactgacagattccaaagcttaggttctttcccactccccacccaggagtaaggaattcttagttcccagctgcagagaagtgccaaaagcaaaaccaaggatggtatgggtccactctgttcagtaagtatgaacaaaattagaactgggtagccagcccggggtcggtggggaggtcccaaggnttgaagtgggaagtaaaaaaggggctaatgctaaatctcagttactaaaagctaanctggccctgggataacttttagccngg

SEQ ID NO: 7425 - DNA, 545 bp, Homo sapiens
  misc_feature (394)..(394): "n" may be a, t, c, g, other or unknown
  misc_feature (454)..(454): "n" may be a, t, c, g, other or unknown
  misc_feature (488)..(488): "n" may be a, t, c, g, other or unknown
  misc_feature (517)..(517): "n" may be a, t, c, g, other or unknown
  misc_feature (520)..(520): "n" may be a, t, c, g, other or unknown
  misc_feature (530)..(530): "n" may be a, t, c, g, other or unknown
  misc_feature (536)..(536): "n" may be a, t, c, g, other or unknown
  misc_feature (544)..(544): "n" may be a, t, c, g, other or unknown
atggtaaaaagctttaataacagacaatgtgatttcataggcaaccaattagcagattaatggatcatttaactttctttacttaaaaccaatactccactcaagaaagatgaacccaaaatgcatcctctaacactgaccaacataactaagtacaaatgaagtcaatggtgtaccccattagcatgctgcgttgtatgtcaataaaacaagccctcccccaccccgagccctggcccctggcaaaacatagataaatgattgtgcactgcgtgatgataccattaggtgagaactttggttcatgcagtcggctgccgcagaggttgcacccaaaacccgcagccccggcacccaaagtcagtcagcggtggtggctcatggtgtcagcccngctcctttcacaacaccaggtgaatctggggcaaggcatgctggtgggcaaagacccagncccgggcattggggccattccggccatttagccnggatgctttggctggcaggaagcttgggnctnttttggattnctggancctggcana

SEQ ID NO: 7426 - DNA, 570 bp, Homo sapiens
  misc_feature (473)..(473): "n" may be a, t, c, g, other or unknown
  misc_feature (483)..(483): "n" may be a, t, c, g, other or unknown
  misc_feature (496)..(496): "n" may be a, t, c, g, other or unknown
  misc_feature (520)..(520): "n" may be a, t, c, g, other or unknown
  misc_feature (531)..(531): "n" may be a, t, c, g, other or unknown
  misc_feature (540)..(540): "n" may be a, t, c, g, other or unknown
  misc_feature (549)..(549): "n" may be a, t, c, g, other or unknown
gagacagagtctcactctcttgcccaggctggagtgtagtggcgtgatcttggctcactgcaacctccacctcccgggttcaagcaattctcccccatcagcctcccaagtacctgggattacagatgcctgccaccacgcccagctaattttttgtatttttagtagagacggggttttgccatgttggccagggtggtcttgaactcctggcctcaagtgatctagccgcctcggcctcccaaagtgctgggattacagacgtgagccactgcgcccggcctcaggctggaattctgatccccccaatttgcagacaaggaaactgagattcagggaggtgaatggatttttccaagctcacacacctgacaagtggtacaacaaaattcaaacccaggtccgcagggttctgaggtcaaggctataatccccaagggagcctggctgggtcaagctcaaggagcatttgnggaactgaantaacgcctaatcnggtgctgggtatgaacgcaacaancaccactgganaaggccaanttggcacancttgttaagcaggaagcccca

SEQ ID NO: 7427 - DNA, 574 bp, Homo sapiens
  misc_feature (481)..(481): "n" may be a, t, c, g, other or unknown
  misc_feature (503)..(503): "n" may be a, t, c, g, other or unknown
  misc_feature (546)..(546): "n" may be a, t, c, g, other or unknown
  misc_feature (561)..(561): "n" may be a, t, c, g, other or unknown
  misc_feature (568)..(568): "n" may be a, t, c, g, other or unknown
  misc_feature (571)..(571): "n" may be a, t, c, g, other or unknown
aaagactggttctgtcaccaggctggagtgcaatggtgtgatcgtggctcagtgctgcttcaaccgcctaggctcaagcaatcctcccacttcagcctcctgagtggctgggactacagacatgcatcaccatgcctacctaatttttgtattttttgtagagatggggttttgccatgttgcccaggctggtctcgaattcctgagctgaaatgatctacccaccttggcctcccaaagtgctgggattacaggcgtgagccaaaagtcaaaaattttaaaaaggtaaatgttgccaattcatttttaaaagttttattatttttggtgctccaaaacatttctttttgaaaatgaagcacacagaatacatttaaaatctgatgtaaaaaaccaaacatctgattttaaatggtggtatacaaaaatccaatcccagtaaattggctcctttccaagaatggaagcatcttttccttangaactacattttcttttatggnaggaaaaaaaaaatctattaaataaagtctggtccaaagactnaagacactggaaatncccgggngangga

SEQ ID NO: 7428 - DNA, 555 bp, Homo sapiens
  misc_feature (3)..(3): "n" may be a, t, c, g, other or unknown
  misc_feature (94)..(94): "n" may be a, t, c, g, other or unknown
  misc_feature (451)..(451): "n" may be a, t, c, g, other or unknown
  misc_feature (471)..(471): "n" may be a, t, c, g, other or unknown
  misc_feature (512)..(512): "n" may be a, t, c, g, other or unknown
  misc_feature (527)..(527): "n" may be a, t, c, g, other or unknown
  misc_feature (541)..(541): "n" may be a, t, c, g, other or unknown
  misc_feature (544)..(544): "n" may be a, t, c, g, other or unknown
  misc_feature (553)..(553): "n" may be a, t, c, g, other or unknown
ganaaggagtctcactttgttgcccaggctggagtgcagcggtgcaatttcagctcactgcaacctccacctcccaggtttacgcaattcttgngcctcagcctcctgagtaggtgggattacaggtgcccgccaccacgccctgcttatttttgtatttttagaagagatagggttttgccatgttagccaggctggtctcgaactcctgacctcaggtgatctgcctgcctcggccccccaaagtgctgggattataggagtaagccaccgcgcccggcccaataaagctctttttaagtgatcatgtctgaactctacagtaatgaggctttaccacattcccatgtgacccgacgttgatgtgactacacaagaagaacctgttaactaaagccaagaaggcggagtcgacagctccgtgactcgttaggaaggatgggaaatgcantgtagaaagacaaccccctntccagagcttggaacacaagcttcatctgaagacgattaanattcccttcttgganaaattggcaattcncanggcatgccnct

SEQ ID NO: 7429 - DNA, 561 bp, Homo sapiens
  misc_feature (464)..(464): "n" may be a, t, c, g, other or unknown
  misc_feature (524)..(524): "n" may be a, t, c, g, other or unknown
  misc_feature (538)..(538): "n" may be a, t, c, g, other or unknown
  misc_feature (547)..(547): "n" may be a, t, c, g, other or unknown
  misc_feature (555)..(555): "n" may be a, t, c, g, other or unknown
  misc_feature (561)..(561): "n" may be a, t, c, g, other or unknown
gcttataaatataatttattacctgtttaaaaattctttcttacattttgtacatgttggctgacagaataaatgcaggcaatttacaaaccaaggggactgcagggaaaatcaggattggcagccagggagagaaaagaggcacacccggagctggtatccctcacctccaccactcagcaaggcgccggacagatatccggagggcactctgcctctgccggggggtttttttagaaaaggaattgcatagaagatacagcaagagggaactccacaacaacaaaagtgttccatatcggaaaagccaaggttgtcatgttttgtttaaaaaagaaaaacgacaaagcacaaaacctcaatccgacctttctgcagttgaactgttccaaaggggacagtaggtggatgacactgcctcttcaacacgactgctggggatttttctctgacaaacattgggncttctttacaagagcaaagaggaaggcaccaacttgcttaactcacattaactcaacacntttacaccatgacntaccacacncagggagntcctgn

SEQ ID NO: 7430 - DNA, 560 bp, Homo sapiens
  misc_feature (413)..(413): "n" may be a, t, c, g, other or unknown
  misc_feature (474)..(474): "n" may be a, t, c, g, other or unknown
  misc_feature (478)..(478): "n" may be a, t, c, g, other or unknown
  misc_feature (553)..(553): "n" may be a, t, c, g, other or unknown
gtagatagatttctcatagatttatttctgcgtcatattatatatagatatatgcatatatacctttttttttttaatacaatctatatacccttcccttccccaccaaactcacaaaaggagattaaacccttccaggattgccatcaagcttcccgagatggccagggccaagaaagaatcatctctcaacatgttaagaaacggctgccattcttaggctctggggttgaagcagcagcattcccaggacccaagggccagagagaggaaaagaaatgactgtagtgtgacaggattctaggatgaacatgtccagtgactcctggcatggcagactggctcccagaattctcagggtgtgagtaaaggtgggggccctatggctcttcagaggctgctcaataggtcangggtagggtataggaactggggatcaggcatgcagggatggggtggcagaaaaaacgctgngggntatgctccagacagagcgaccccatcaggctacccactactcatgacatgtaatgaacagggccaatcctgactnttaagga

SEQ ID NO: 7431 - DNA, 555 bp, Homo sapiens
  misc_feature (483)..(483): "n" may be a, t, c, g, other or unknown
  misc_feature (550)..(550): "n" may be a, t, c, g, other or unknown
gagatggagtcttgtattgtcacccgggctggagtgcagtggcgtgacctcggctcactgcaacctctgcctccaagcgattctcctgcctcagcctcccaagtagttgggattataggtccctgccaccacgcccagctaatttttatatttttagtagagacagggttttgccatgttggccaggctagtctcgaattcctgacctgaggtgatccacctgcctccgcctccctaagtgttgggattataggtgtgagccaccacgcccagccctttttaagaaggtctttctactgccttggaaaaaattcagattgctttaggaatcattactttctccaggcctacacctctcacagggaagaaaaaagtgcatgtctcctaagaagtgccagagcagttaactaaagcacttgcttcaatgctggctctaagctaatagaacaagaatcccaaatgaagcccacaagagttttctgnaaaacactgacccgaaaaacacttgcttttggttttaacttggccgttaaaaaatattattaacctnccgaa

SEQ ID NO: 7432 - DNA, 558 bp, Homo sapiens
  misc_feature (308)..(308): "n" may be a, t, c, g, other or unknown
  misc_feature (466)..(466): "n" may be a, t, c, g, other or unknown
  misc_feature (469)..(469): "n" may be a, t, c, g, other or unknown
  misc_feature (479)..(479): "n" may be a, t, c, g, other or unknown
  misc_feature (500)..(500): "n" may be a, t, c, g, other or unknown
  misc_feature (506)..(506): "n" may be a, t, c, g, other or unknown
  misc_feature (524)..(524): "n" may be a, t, c, g, other or unknown
cttgccagaagggttgatttttaattatgtgtatatacaaacttctctattttaacattcaacatattcaggattaattctagaaagatgctatagctgatttataaaacaaaatgatttaggatcagaaagaaaataggggcacacaatttcatgtagtctctccctaactacccccaaccatagcatcacaaggtttttttttttcctaatgccacaattgaaacctgtattaacttaaaagttgacactaaaggcaggaattaagaagtcattttttatggcttttaagcacttgaatgctttanaacccccttgaaaatgctagtgaacaggtcttattcctttaaatgttgctttgatttgaatcttggtgaaatctagattccctattaaatagctgcatgctaattttggagaaaagtcaatttaaaacctttaacaactactctattggacttgaaanaangggactttancatgtcccttgttgggcttanaaaaanctttcaacccctttttgncaacctaagataaaaaccatggatggggacctcc

SEQ ID NO: 7433 - DNA, 561 bp, Homo sapiens
  misc_feature (423)..(423): "n" may be a, t, c, g, other or unknown
  misc_feature (429)..(429): "n" may be a, t, c, g, other or unknown
  misc_feature (487)..(487): "n" may be a, t, c, g, other or unknown
  misc_feature (491)..(491): "n" may be a, t, c, g, other or unknown
  misc_feature (496)..(496): "n" may be a, t, c, g, other or unknown
gagatggggcctcgctctgtcacccaggctggagtgcagtggcaccatctcggctcaccgcaacctccgcctcccaggttcaagcaattctctgcatcagcttcccgagtagctgggactacagatgtgtgccaccatgtctggctaatttttgtatttttagtagagatggagtttcaccatgttggtctcaagctgctgacctcaagtgatccacctgcctcagcctcccaaagtgctgggattacaggtgtgagccactgtgcccggccagcatggactttttaaggaagtattttgtatcttggttaagaagttgcagcaagaggtctttcttgtcaagagagatattttatcttatttactggtggttaaaaattatctttctttaacaaacactctaaggagtcttttaaagaaccntaaaanggttattaccaaactagaatttttaatggtgcccataaacaaaattctggttgcttanttgnatggnaatcggcttcaacttgaaacttaggacccaacattttggcttggtgagccaacattaatctggag

SEQ ID NO: 7434 - DNA, 557 bp, Homo sapiens
  misc_feature (441)..(441): "n" may be a, t, c, g, other or unknown
  misc_feature (534)..(534): "n" may be a, t, c, g, other or unknown
cagattttcttgctttaattcttctctatattaccacagtaaaatatttaacaaagtccaagagattactgatatgcaataatgacctatgactttacattaatggagtgatgtatcaataataaactgatcagttaagtaactggaaaatgtttgcatgtaaagaatgattcactatcctttttatcttgtattgaaatcgtcaaaacatttaaaaacacaaagttgaagtaattttaaataataataactgtgaaatactgcaacatcttgaagtactttataaatgaccaaaaacaggtaaaattttgttcagtataacttcagtgaagaagttttttgacacagaactacatatatttttaaattggtaatccacataagatatacacaaaaccttcaaggtgactacattggtcaataaataaaactctacattgnttggttttacaggcctaggagcttatacctcagtaccaccctttaaggaaatctaagtctacagaaggacttgtccaaatggttgggcccatnaattctttacaaaaacctccaat

SEQ ID NO: 7435 - DNA, 555 bp, Homo sapiens
  misc_feature (1)..(555): "n" may be a, t, c, g, other or unknown
nnnnnnnnnnnnnnnnnnnnnnnnnnnnnnnnnnnnnnnnnnnnnnnnnnnnnnnnnnnnnnnnnnnnnnnnnnnnnnnnnnnnnnnnnnnnnnnnnnnnnnnnnnnnnnnnnnnnnnnnnnnnnnnnnnnnnnnnnnnnnnnnnnnnnnnnnnnnnnnnnnnnnnnnnnnnnnnnnnnnnnnnnnnnnnnnnnnnnnnnnnnnnnnnnnnnnnnnnnnnnnnnnnnnnnnnnnnnnnnnnnnnnnnnnnnnnnnnnnnnnnnnnnnnnnnnnnnnnnnnnnnnnnnnnnnnnnnnnnnnnnnnnnnnnnnnnnnnnnnnnnnnnnnnnnnnnnnnnnnnnnnnnnnnnnnnnnnnnnnnnnnnnnnnnnnnnnnnnnnnnnnnnnnnnnnnnnnnnnnnnnnnnnnnnnnnnnnnnnnnnnnnnnnnnnnnnnnnnnnnnnnnnnnnnnnnnnnnnnnnnnnnnnnnnnnnnnnnnnnnnnnnnnnnnnnnnnnnnnnnnnnnnnnnnnnnnnnnnnnnnnnnnnnnnnnnnnnnnnnnnnnnnnnnnnnnnnn

SEQ ID NO: 7436 - DNA, 558 bp, Homo sapiens
  misc_feature (519)..(519): "n" may be a, t, c, g, other or unknown
  misc_feature (550)..(550): "n" may be a, t, c, g, other or unknown
  misc_feature (552)..(552): "n" may be a, t, c, g, other or unknown
gcatttgaaacatttatttcaggaaatacattttcaacactttgtcatttatacaaaaagacaaatttctcgggaggcacgtagcaaaaggccattgaggaacagagcctgatgaaacgaacaatttttcaaagtctggttacagagaaggaaagtgaagcatctcaaggctgggatgctgctgcccacccccaccccaccccgccaccaagtgacattgaggctgggcaggccacatggcctgggccctggcgctggccactcatttccttcaaaatcttggttttggcaaaaacatggcaagtcggcaaagtaaactgtctcgccagtgggggtggtgaggggtccttcctctcttgggtggggagggagtcagacgcccagtgccccaacttccatgcacacacactcacactcatacactccttctcgctgaccttctcctggctgcaacaagccagcccggtgcctgcagatcacctggtgatgtgtgcacctgatggagctattaaggccctntttttcccaggaccaagacagtaacaggaancngaaggg

SEQ ID NO: 7437 - DNA, 590 bp, Homo sapiens
  misc_feature (450)..(450): "n" may be a, t, c, g, other or unknown
  misc_feature (463)..(463): "n" may be a, t, c, g, other or unknown
  misc_feature (496)..(496): "n" may be a, t, c, g, other or unknown
  misc_feature (503)..(503): "n" may be a, t, c, g, other or unknown
  misc_feature (545)..(545): "n" may be a, t, c, g, other or unknown
  misc_feature (550)..(550): "n" may be a, t, c, g, other or unknown
  misc_feature (580)..(580): "n" may be a, t, c, g, other or unknown
cattttttaacaagacttttatttgtacaaagcattacaatcttctcagcattcttcactcacaaacttttcactgtatttaacaagttaacagtgtcaaactacacgtcactacctgtcaaaccccaagcactcaacttagaaacaaaaagcgcttggagcactgaatggaaacagaaaaaggctaagaaaggccaacagagatattttagaagcagttaaagaggatggtttagggagagttagattcctgagcaccatcagatttcccttaaggttttttgtgaaggggcttcacaaaataatttttagaaggacatgagacaaaattagccaggcttggtggcacgcatctgtagtcccagatactcaggaggctcaggcgggaggatcacctgagcccaggatttcaaggatgcaatgagctatgatcatgccactggacttcancctggggccacanagtgagagactcctctttttaaaaccaaaccgngggattngaacttagggatcaagagatccgaggacttacactttggggnttaancgggttttaaactttccactggccaaatgnaaaaaggggc

SEQ ID NO: 7438 - DNA, 562 bp, Homo sapiens
  misc_feature (500)..(500): "n" may be a, t, c, g, other or unknown
  misc_feature (516)..(516): "n" may be a, t, c, g, other or unknown
  misc_feature (551)..(551): "n" may be a, t, c, g, other or unknown
  misc_feature (553)..(553): "n" may be a, t, c, g, other or unknown
  misc_feature (562)..(562): "n" may be a, t, c, g, other or unknown
agattcagatatttaacgaatagtattgcatggtacaatcatgcaggtttaaaataatagcaattgagtccataggagaagacgacattcttgcttgacaaggtaggaacaaattcattatatttcaccaagactaaaattacaaagtttgggtgtgtaaaggcaagatttaattgttgggaaaatttatccgagccagccaccacgacaaaagccaggctgaccaaatcaaatggattctttacatcctccaagtttcagaagaatcttgaatatggttagccagaagatatggtaaatttgaccccaaacatttgcttgaaggagtaaggtcttctaatgagtgaatgtcaagagatcagcacataagtaatagcttatttatcctttaggtcacatccatctgtgaatcaagcagccttgcagtccacatgggcagcatcttttccatggcttcgaggctcaatgatcaaaggttgtttaacccagtcttaaaggtnttttaaaaggcctctncattttttttttgggtggtttaaaagagagaaatncnccaggggan

SEQ ID NO: 7439 - DNA, 541 bp, Homo sapiens
  misc_feature (2)..(2): "n" may be a, t, c, g, other or unknown
  misc_feature (426)..(426): "n" may be a, t, c, g, other or unknown
  misc_feature (471)..(471): "n" may be a, t, c, g, other or unknown
  misc_feature (479)..(479): "n" may be a, t, c, g, other or unknown
  misc_feature (508)..(508): "n" may be a, t, c, g, other or unknown
  misc_feature (517)..(517): "n" may be a, t, c, g, other or unknown
  misc_feature (541)..(541): "n" may be a, t, c, g, other or unknown
gnttctttgaattttatctttatttctccataagggcaatcagagaaatatgctttcctttttaacaagctcatctttaatgtggtagcaaagatggaaggtgcgagaccaaatcttaccaaactagctatttttacaggccaataaagcaacatgcaatccccctcaacaaatttaaataatcaggcaatactaagaatgtatattccattaaactaaaataaacaaggttgaaatgtggtacagaattcactgatgagcctgtgaactccacgtgaggatgtccagtgccttatttatctcagtaaccagagtacccagcacacaagataaaagtgggtattacctaagtggccactattttattaataatgcacataacatatgcttatcattaactcttaaaaagattattatttaactatncaggaactaccatacacatttcaacatacaaggttcctatctttnttagaatncccattaatatttggaagaattgggaaangtttcccanggctttcctatacaatccccccan

SEQ ID NO: 7440 - DNA, 536 bp, Homo sapiens
  misc_feature (421)..(421): "n" may be a, t, c, g, other or unknown
  misc_feature (437)..(437): "n" may be a, t, c, g, other or unknown
  misc_feature (459)..(459): "n" may be a, t, c, g, other or unknown
  misc_feature (466)..(466): "n" may be a, t, c, g, other or unknown
  misc_feature (501)..(501): "n" may be a, t, c, g, other or unknown
  misc_feature (522)..(522): "n" may be a, t, c, g, other or unknown
acagttgcctgtttattatttttcaaaacaaaacaaaaacaaaagacattcaaaattcccctgtggtggacaactgagttgatgtggctgatccaggctgtctcccaggttgtctcagggagcatcagttgtactagggggtgggctgttgccctggcacggctggatgaacacttgcaccagggatggccatcagaagagctgcaggccagttttgagcccatgcagctgcccctggctccagagaaggccctcgaagttgctgctgctgctgttgctgcagttgccactgccgacaccacagctcaggcccaaggtgtcagtcttgcatgttgagggttccagccgctgctctagcacaggctggtccaaaagatcatggtgtcataattctccagcatgagctctgctgggtcctcgnctgactggcattcggnctaagggaaatgtgtcccatcnacgtttntgagcttaactgcatcaaagccttgcaaagttctntttttgggccaaaacctacantttcggaggggggg

SEQ ID NO: 7441 - DNA, 533 bp, Homo sapiens
  misc_feature (294)..(294): "n" may be a, t, c, g, other or unknown
  misc_feature (297)..(297): "n" may be a, t, c, g, other or unknown
  misc_feature (314)..(314): "n" may be a, t, c, g, other or unknown
  misc_feature (391)..(391): "n" may be a, t, c, g, other or unknown
  misc_feature (443)..(443): "n" may be a, t, c, g, other or unknown
  misc_feature (472)..(472): "n" may be a, t, c, g, other or unknown
  misc_feature (475)..(475): "n" may be a, t, c, g, other or unknown
  misc_feature (480)..(480): "n" may be a, t, c, g, other or unknown
  misc_feature (509)..(509): "n" may be a, t, c, g, other or unknown
  misc_feature (511)..(511): "n" may be a, t, c, g, other or unknown
  misc_feature (522)..(522): "n" may be a, t, c, g, other or unknown
aggttagagaaacttgttattaaatttatttttctttaaatatgtaactttctcccaccctcacccactccagggaggaacagaaaatccccacccccttccattctggagatttcgtatctaaagcctgagaggcgaggatgaagtataaaaatactatttacaaagggaaggaggtatctgttgcttaaccgtagacacccccatccccacaccccttttgatcaaaaaaaaaaaaaaaaaaaaaaaaaaaggcccctgggaatcaatttaagtatagaactagccctcctntanaggggcccacaaacctnaacatggaataggaagctccgagattaactgaggaagagactgaatggatagcacccgtgggtcctggcaggggaanggccctctcttactctggagcagctggcgcccgccaagccttggtttcatanggcccatgtaaccctggcattttcctttnggncctgntttttggttcaaacaagagcttcttggcntnccggggaggcncttggttcctt

SEQ ID NO: 7442 - DNA, 550 bp, Homo sapiens
  misc_feature (482)..(482): "n" may be a, t, c, g, other or unknown
  misc_feature (513)..(513): "n" may be a, t, c, g, other or unknown
  misc_feature (519)..(519): "n" may be a, t, c, g, other or unknown
  misc_feature (526)..(526): "n" may be a, t, c, g, other or unknown
  misc_feature (542)..(542): "n" may be a, t, c, g, other or unknown
actcggtatattaagagtttgattttattgatcagaaacattagtatttcaacataagtatcaaaaccctaaatccaaactaaaacatcccgattttttaactagcactctctttttctcttccattttcttaaggagtgagttcacatagcaagctctctgcccacacacccttggagctcagttaatgcttctcctcccagtcctccattctctccctggggccactttctcagagatgccttatttcatgaacaaagctgaataccctaaaagcgactcctaatggttcctctgggacaggaaacatctcttggcctcaataagaaatctctcatcatgttccaagtgaattttcgtatgttagcaagtttggactaaccaatctccttcacagaatgcctaggatgaaatggcggggcaagcatgtgtgggtaggagctctgcactcattccagattccataggaaccaccttaaaangactcttctctgaagttggcctggtggtatngggganggcagcnttgcagttaatggctnttccttaa

SEQ ID NO: 7443 - DNA, 553 bp, Homo sapiens
  misc_feature (544)..(544): "n" may be a, t, c, g, other or unknown
  misc_feature (546)..(546): "n" may be a, t, c, g, other or unknown
  misc_feature (550)..(550): "n" may be a, t, c, g, other or unknown
gcataataccaaagaatttattgtaaatgtagtggcaaatacattcagaataatcatcattaaaaaggaactagaaaattatacatgtttaaagtatgtgcttttttcccaccacctttaagttaatggctagtaccaacattttaagtaatgaaatacttaatgtgatgacccattttcagataatttcatgactgtatcttcatcttaatttttaaagcagttgaccatgaatttcagtttcagttattctctgtttttatcaattccgtaatgatctgcagaatcttgtcattttcaagggacatctttggattttcaagcttttttcttaaaactgaatcaatgagaactctcagctgcttgaaaatgacagctatctttacaggggcctgaaaatagatccagccatcaatagaaagaagacgttctcgggctgaacttctatatcaccaccaaaaagtaaaactggaaaaaggggttattaagggtagtttctctcaaatcactttggcataccttaatcttctccgggattaagaancnttcntga

SEQ ID NO: 7444 - DNA, 551 bp, Homo sapiens
  misc_feature (460)..(460): "n" may be a, t, c, g, other or unknown
  misc_feature (474)..(474): "n" may be a, t, c, g, other or unknown
  misc_feature (513)..(513): "n" may be a, t, c, g, other or unknown
  misc_feature (524)..(524): "n" may be a, t, c, g, other or unknown
  misc_feature (537)..(537): "n" may be a, t, c, g, other or unknown
  misc_feature (543)..(543): "n" may be a, t, c, g, other or unknown
  misc_feature (551)..(551): "n" may be a, t, c, g, other or unknown
agtggagacggggtttcactgtgttagccaggatggtcttgatctcctcgtgagccgcccacctcagcctcccaaagtgctgggattacaggcgtgagcaaccacgcccagctgtcagacaaaatttttaagaaaacaaaattttttccagaatattacattacaaaaatcaatgaataaatgaactacactgtaactttaatacttattccatatgaaaaaccaaactgtttctggcaatttgattgatctcttgagagtctgcagtgcattcattccatggttaaaaccgtgtgtaggcattgcgttgctgctgctgctgtaatggctgctgggcttgctgctgttgtaagcgaatttgctgggaataagggtcttccagggattttacaaatatggtagttctgggaccagtcttccatactataccattggcatctttcacagaagattccactgnaatggtggggggtnccaggatagccaaggtcaaccgaaattgagtcctgaagnatcattatganggtcaacccttgnttcatntaatgggn

SEQ ID NO: 7445 - DNA, 549 bp, Homo sapiens
  misc_feature (387)..(387): "n" may be a, t, c, g, other or unknown
  misc_feature (463)..(463): "n" may be a, t, c, g, other or unknown
  misc_feature (476)..(476): "n" may be a, t, c, g, other or unknown
  misc_feature (498)..(498): "n" may be a, t, c, g, other or unknown
  misc_feature (522)..(522): "n" may be a, t, c, g, other or unknown
  misc_feature (534)..(534): "n" may be a, t, c, g, other or unknown
  misc_feature (537)..(537): "n" may be a, t, c, g, other or unknown
ccggaggcagtgggaggattttactgactgcacaacacacaacttccccaggcccccgaggatgccggcgtctccttcagccatcaggccccagcagtgccccttgctcctgtacccactctggactctcgccggtagggagggctgggctgacagtgccacgagtgggagaacaggggtcagggcaggacacagggttgggatcagggctgggcacaggatcagggtctgggctgggcacaggatcaaggtctgggctgggcacaaggtcaggaccagcgtcgtgcccagcctttgggtcagaagattccacaggagtagggctgggggtggatctggagccggggaagggtttggagctgggatccggcagagtgcccggcccanaaccagggtcagggttgcggccaaaactggtgccagggctgaagcccaagccagaacccagcacagaaaccagatnaggaccccagaanggaaaacttgcccgggcttatnatggattcaaggcttaaggcaagncccaaggccaanccnggggcctttttt

SEQ ID NO: 7446 - DNA, 552 bp, Homo sapiens
  misc_feature (19)..(19): "n" may be a, t, c, g, other or unknown
  misc_feature (146)..(146): "n" may be a, t, c, g, other or unknown
  misc_feature (154)..(154): "n" may be a, t, c, g, other or unknown
  misc_feature (172)..(172): "n" may be a, t, c, g, other or unknown
  misc_feature (332)..(332): "n" may be a, t, c, g, other or unknown
  misc_feature (471)..(471): "n" may be a, t, c, g, other or unknown
  misc_feature (479)..(479): "n" may be a, t, c, g, other or unknown
  misc_feature (492)..(492): "n" may be a, t, c, g, other or unknown
  misc_feature (519)..(519): "n" may be a, t, c, g, other or unknown
  misc_feature (532)..(532): "n" may be a, t, c, g, other or unknown
  misc_feature (538)..(538): "n" may be a, t, c, g, other or unknown
ccaaatgcaaagtaactgngttttttatttctatgaacaataaaatactttcataatttcacatcccattgcttttaagagcacatatattacaaataaaggaactccacaaactttaaagattagtatttatcaacgcttttgtncacatacncaaatattttaatataanggtatctgaaatgttattcatatatttttagtactgtcatagtattaactaaaaaggatcttttaaatttggtaaaaaccgtatattttacaatcttttatttacatctgaaatatgcttaaatgttacaaaaacattcactttaacctttaaaatatgngtactaggactggggtactgaccatacaataactgacagcaaacttagggtttgcatttgagctacacattcactggaatttcatggcaaatattcaacctggcttgatcaacactggtcaaaggaaaaaaaaattttnccaaatgngccaaattcaaanggtggcaaaaatcttgaagcttgccgngggaaaccaaaanttttanccccctggaaacct

SEQ ID NO: 7447 - DNA, 549 bp, Homo sapiens
  misc_feature (37)..(37): "n" may be a, t, c, g, other or unknown
  misc_feature (58)..(58): "n" may be a, t, c, g, other or unknown
  misc_feature (68)..(68): "n" may be a, t, c, g, other or unknown
  misc_feature (79)..(79): "n" may be a, t, c, g, other or unknown
  misc_feature (187)..(187): "n" may be a, t, c, g, other or unknown
  misc_feature (227)..(227): "n" may be a, t, c, g, other or unknown
  misc_feature (457)..(457): "n" may be a, t, c, g, other or unknown
  misc_feature (472)..(472): "n" may be a, t, c, g, other or unknown
  misc_feature (478)..(478): "n" may be a, t, c, g, other or unknown
  misc_feature (508)..(508): "n" may be a, t, c, g, other or unknown
  misc_feature (543)..(543): "n" may be a, t, c, g, other or unknown
cctcacatccaaacagctacagcttccctccttttgnggggtccccaaaccaagtctnttttcagganagcagacatgngcctccacacagttctgaagttctgggggctccacattgtcagctgggttggggtctcccatgtgagggaggctgatggcactcgcaggtttttgcctcatctatgcncaaaggctcaaaaaatttcttcggcatttgggaccctcgngttctgtagctccaccagtcgctgcacagcctcaggcaagtcccactccccaaggcgacgattatctcgagtccgaatgttcactgttctcttactttgctctttctggccaaccacaaactgaaaattgtagtgggcaagctgggcccggcggattctccggctgaggggtcaatccaaaagtctgcatccaggtcactgaccaagtcctggagccccgaagcttttgntgggccctttttggnggaatncctttggttacttcccacaggggttgaccnccacctggaacggggaaagccccagggggcatttncccccc

SEQ ID NO: 7448 - DNA, 520 bp, Homo sapiens
  misc_feature (448)..(448): "n" may be a, t, c, g, other or unknown
  misc_feature (452)..(452): "n" may be a, t, c, g, other or unknown
  misc_feature (465)..(465): "n" may be a, t, c, g, other or unknown
  misc_feature (497)..(497): "n" may be a, t, c, g, other or unknown
  misc_feature (511)..(511): "n" may be a, t, c, g, other or unknown
  misc_feature (515)..(515): "n" may be a, t, c, g, other or unknown
  misc_feature (520)..(520): "n" may be a, t, c, g, other or unknown
attatttaaaaatattttgttacaaaaggaaaaaaatacaatgcagtataaaagattgacagcgtcatcaagtttattacacaattttcaacctatcagaaagacaaacaaatcaccgacaacagggggacgggaccttggcctttttgagggatgggtgttttttttccttttgctatcaggaaataaaactaaaaatggtgtcattgagtaaaaacaaaacaaatggggagaaaaaaattctccgggtaaacggcatttctggtattctatatatatttttccttaaactgtcaccttttctctacattttaaaagacacccggagttgctctcaataagcacatcacttaacacttggccagttgggtggggtgccatgttctgaaatggaagtggggattggggttgggggacaggggaaaaaaagcttccaacctgtagcctntggncccaagggaatgngcctttccaatcctgcgggggacttccttaangactgagggctttnttanaaacn

SEQ ID NO: 7449 - DNA, 551 bp, Homo sapiens
  misc_feature (1)..(551): "n" may be a, t, c, g, other or unknown
nnnnnnnnnnnnnnnnnnnnnnnnnnnnnnnnnnnnnnnnnnnnnnnnnnnnnnnnnnnnnnnnnnnnnnnnnnnnnnnnnnnnnnnnnnnnnnnnnnnnnnnnnnnnnnnnnnnnnnnnnnnnnnnnnnnnnnnnnnnnnnnnnnnnnnnnnnnnnnnnnnnnnnnnnnnnnnnnnnnnnnnnnnnnnnnnnnnnnnnnnnnnnnnnnnnnnnnnnnnnnnnnnnnnnnnnnnnnnnnnnnnnnnnnnnnnnnnnnnnnnnnnnnnnnnnnnnnnnnnnnnnnnnnnnnnnnnnnnnnnnnnnnnnnnnnnnnnnnnnnnnnnnnnnnnnnnnnnnnnnnnnnnnnnnnnnnnnnnnnnnnnnnnnnnnnnnnnnnnnnnnnnnnnnnnnnnnnnnnnnnnnnnnnnnnnnnnnnnnnnnnnnnnnnnnnnnnnnnnnnnnnnnnnnnnnnnnnnnnnnnnnnnnnnnnnnnnnnnnnnnnnnnnnnnnnnnnnnnnnnnnnnnnnnnnnnnnnnnnnnnnnnnnnnnnnnnnnnnnnnnnnnnnnnnnn

SEQ ID NO: 7450 - DNA, 544 bp, Homo sapiens
  misc_feature (430)..(430): "n" may be a, t, c, g, other or unknown
  misc_feature (486)..(486): "n" may be a, t, c, g, other or unknown
  misc_feature (490)..(490): "n" may be a, t, c, g, other or unknown
  misc_feature (501)..(501): "n" may be a, t, c, g, other or unknown
  misc_feature (503)..(503): "n" may be a, t, c, g, other or unknown
  misc_feature (518)..(518): "n" may be a, t, c, g, other or unknown
  misc_feature (534)..(534): "n" may be a, t, c, g, other or unknown
  misc_feature (543)..(543): "n" may be a, t, c, g, other or unknown
acataaattaacccatttattataggccagtgatgtctcaaagagtagaggagcgtctactggtctttcaactccttcagtcttctgattttatttttccttgagtgcctggtgtaggttttcccgcagaactaatgaagtaggtatcttcagtttttcgaggaccaggtctcaaaaactcaggcttagttgtccgtctatcatagaagtcccctggggtttttccacttactgacctggccagaccacagctaactggtttgtcttttcccaaaaagtcagaagagacagacaaacttttcattacttcatctaaaagattctcttgacttgaggactttatctgtactgaggtaagcttattgctttcttccaaaaactgttgtagaagtaacaacttcacttccaggggaaccagttttgatcttgngatgtcgactcttcaggggttcaaaaattttgggctggaaccttgggcttggaacnggcnggcttttaagncncggattggactggtnccctgggtggaccaancctaagggna

SEQ ID NO: 7451 - DNA, 547 bp, Homo sapiens
  misc_feature (430)..(430): "n" may be a, t, c, g, other or unknown
  misc_feature (473)..(473): "n" may be a, t, c, g, other or unknown
  misc_feature (492)..(492): "n" may be a, t, c, g, other or unknown
  misc_feature (500)..(500): "n" may be a, t, c, g, other or unknown
  misc_feature (519)..(519): "n" may be a, t, c, g, other or unknown
gggctagaggtttgggctttaatggcagctggggtaaaaggaaacaaaaacagtaattctgaagagcacagggaacaggcagccaggaccagcctggcccattccaggccagctgagctgaaatgctgattctgtccagggggctgctgtatgtgtagactggtggcagtcttggggactgaggcctcttggagagaagggaagactgtcggctcagaagtccatggagctgtgggccaggtagtccttgcgaccgatgttgctgacctgcttggtctgcatagcctcgagtttggggcagtcagtgatccgatgacccaggcccccgcagaaggcacagccgcgctctcctccaatgtccagcatggactcatccccgcaatgcagcacctgcagcacggcggaccttctgcttggcttctagcaacancgcttttgaggtccatcagcacttgactcatcacaccttttgntgattaaaggtaatggccnatgcctgngtttccgacgcccggtgcnggcaatccggggacatagttttaatctc

SEQ ID NO: 7452 - DNA, 577 bp, Homo sapiens
  misc_feature (542)..(542): "n" may be a, t, c, g, other or unknown
  misc_feature (571)..(571): "n" may be a, t, c, g, other or unknown
gaggttttgctatgctgaatactttatttatatttttatgtaaacataatttgctttataggcacaatataacaaaagctctaaagccacaaagacattagacaatgtttcagttcacttcaatcaagcttaaattacagagaagccttcacagttcctttaaggcagactgagacattctttacacttccttcagaaaaaacaatcaagagacaggaaagaaggtgcttaaaatgagagtacgttaaacaattaacttgcgtcccccggttcttcatggcagaaattggtcttattggtcaaactctagttttctcgttctgtattctgaaagggttttctttaaccatctggagtaatttgcgattactggattaactttgctagttaaataaaaccaaaccaaacccagatttggtaggggtggtgggggagaagtgcctttttatgcctctcctctggacataacaaaggcgatggtgaattctgaatggtgctgagttcccacttccccgggggaaggagagcctaatatgggccanggctcttacttcttcactttgggaaaagncattct

SEQ ID NO: 7453 - DNA, 335 bp, Homo sapiens
  misc_feature (42)..(42): "n" may be a, t, c, g, other or unknown
  misc_feature (49)..(49): "n" may be a, t, c, g, other or unknown
  misc_feature (85)..(85): "n" may be a, t, c, g, other or unknown
  misc_feature (118)..(118): "n" may be a, t, c, g, other or unknown
  misc_feature (141)..(141): "n" may be a, t, c, g, other or unknown
  misc_feature (154)..(154): "n" may be a, t, c, g, other or unknown
  misc_feature (232)..(232): "n" may be a, t, c, g, other or unknown
  misc_feature (244)..(244): "n" may be a, t, c, g, other or unknown
  misc_feature (260)..(260): "n" may be a, t, c, g, other or unknown
  misc_feature (274)..(274): "n" may be a, t, c, g, other or unknown
  misc_feature (276)..(276): "n" may be a, t, c, g, other or unknown
  misc_feature (279)..(279): "n" may be a, t, c, g, other or unknown
  misc_feature (316)..(316): "n" may be a, t, c, g, other or unknown
  misc_feature (334)..(334): "n" may be a, t, c, g, other or unknown
ggttccattccattttattacagtcctgtccttgagttccanaatgaanggctatttaatacacaaccccaaacactcctaaaanggatcttgttaacattcaaaagtctcccatttntttctcagtatattaaatcaaanggaaaaaaaaatnttaaaaaaaaaaaatcaataggtttagttcaccccaggaaaagcacctttacaacaggaaactaaattgtcaggaatntgaccaaagacncaaagcagcagataanattcccgacagaananagngactcccactggaacataaatagatccccccaaagtntacatatttcacatgagng

SEQ ID NO: 7454 - DNA, 569 bp, Homo sapiens
  misc_feature (422)..(422): "n" may be a, t, c, g, other or unknown
  misc_feature (457)..(457): "n" may be a, t, c, g, other or unknown
  misc_feature (466)..(466): "n" may be a, t, c, g, other or unknown
  misc_feature (471)..(471): "n" may be a, t, c, g, other or unknown
  misc_feature (493)..(493): "n" may be a, t, c, g, other or unknown
  misc_feature (511)..(511): "n" may be a, t, c, g, other or unknown
  misc_feature (517)..(517): "n" may be a, t, c, g, other or unknown
  misc_feature (554)..(554): "n" may be a, t, c, g, other or unknown
  misc_feature (558)..(558): "n" may be a, t, c, g, other or unknown
  misc_feature (566)..(566): "n" may be a, t, c, g, other or unknown
ataataaagtctgtttattacagcaattaacagagcagcgtttgccggcatgcttttcagtggcaaccagaaaagtgcttactccaggtgcatagattcgggaaaccatgcaacttgagccaaaatgaaaccaattagaggcttagtaaatgggttccagccaccccaggaaacttaaccatccacgagtcagttcagccgaggtagaacctcagtgcaggaatttagcatgatatagattgctactttacagaattaatccagacctgtcgccagggttgtggtcttgaggacgtgaaatgtatccgcccaacacagccacccaggtgctgggttcaaatctcgataaactacataggggtatataggtggggaacgttagcaccattgactcttaagggtctcttgccactgccatggangtggggacataaggagaggactagaagctgggccnaaagggacnagacngagaaagaaccgaaatccttcnttaacctggcttcaaaanctggantggaaagtggccgcttgataggggtaagaggaattcntttnacctgganaaa

SEQ ID NO: 7455 - DNA, 568 bp, Homo sapiens
  misc_feature (241)..(241): "n" may be a, t, c, g, other or unknown
  misc_feature (468)..(468): "n" may be a, t, c, g, other or unknown
  misc_feature (470)..(470): "n" may be a, t, c, g, other or unknown
  misc_feature (475)..(475): "n" may be a, t, c, g, other or unknown
  misc_feature (496)..(496): "n" may be a, t, c, g, other or unknown
  misc_feature (534)..(534): "n" may be a, t, c, g, other or unknown
  misc_feature (536)..(536): "n" may be a, t, c, g, other or unknown
  misc_feature (564)..(564): "n" may be a, t, c, g, other or unknown
gttttgagacagggtctggttctgtcacccaggttgaaaagcagtggggcgatctcagctcacagcaacctccgtctcctgtgctcaaaccatcccgccacctcgacctcctgagtggctggaaccacaggcatgtgccaccacccccagctgatttttgtatttttttggtagagacaggatttcaccatgttgcccaggctggtctcgaactcctggacttgagtgatccacccacctntgcctcccaaagtgctgggattacaggcgtgagtcattgtgcctggcagggctagtagtcttcatgaaacttcatgtgggagtagaatgtttcttgatctgagaagattttcccacagatgctgcatgagcagccatcgtcctccttgtgtgaacgccggacatggctgtcatgggcagcatgggatgcaaaagatttaccacaggtacttgcatttgaagggcttntncccanaatgcttgcctgatgtgtgtnccgaatatgctggaagcttggaaccttttagtccaatncncacactgggatgggctggcttccaaagnggac

SEQ ID NO: 7456 - DNA, 558 bp, Homo sapiens
  misc_feature (416)..(416): "n" may be a, t, c, g, other or unknown
  misc_feature (428)..(428): "n" may be a, t, c, g, other or unknown
  misc_feature (433)..(433): "n" may be a, t, c, g, other or unknown
  misc_feature (463)..(463): "n" may be a, t, c, g, other or unknown
  misc_feature (498)..(498): "n" may be a, t, c, g, other or unknown
  misc_feature (501)..(501): "n" may be a, t, c, g, other or unknown
  misc_feature (519)..(519): "n" may be a, t, c, g, other or unknown
  misc_feature (540)..(541): "n" may be a, t, c, g, other or unknown
ggttattgaaaaaaatagaacagtccactgtccagcagaggctgcttcaactctattgctcgcagggctcattctgcatggatctgtgtttcaggatgctgcaaggacaactctgcgggcaggaaggccccttgacccaacgctgtagcataggtcctgctctgtggatggggaaagccagggggcacatacgtccccatgccgccccctccaaagactcctcgctggtgctgaggcagggagtggtaatcttccaggttatcatactgggacacaacagtcacactgctctggcgcttgccgtgtggttggtactggtacagcacactggggtccctctccacgttctgggtatgatggagtttgaggctatgactcctctctggtttaaggggtgggacgattgactgaatgangtgttcttcctncttgnaacaatctctggaatggttctcttgggcanaaagcttgctaaccaaggtcgttcatcttttgganaancttactttttggggtaancttaaaaatcttgccggatcnncatatttactccaaagt

SEQ ID NO: 7457 - DNA, 553 bp, Homo sapiens
  misc_feature (40)..(40): "n" may be a, t, c, g, other or unknown
  misc_feature (69)..(69): "n" may be a, t, c, g, other or unknown
  misc_feature (123)..(123): "n" may be a, t, c, g, other or unknown
  misc_feature (134)..(134): "n" may be a, t, c, g, other or unknown
  misc_feature (142)..(142): "n" may be a, t, c, g, other or unknown
  misc_feature (174)..(174): "n" may be a, t, c, g, other or unknown
  misc_feature (228)..(228): "n" may be a, t, c, g, other or unknown
  misc_feature (243)..(243): "n" may be a, t, c, g, other or unknown
  misc_feature (245)..(245): "n" may be a, t, c, g, other or unknown
  misc_feature (323)..(323): "n" may be a, t, c, g, other or unknown
  misc_feature (325)..(325): "n" may be a, t, c, g, other or unknown
  misc_feature (327)..(327): "n" may be a, t, c, g, other or unknown
  misc_feature (392)..(392): "n" may be a, t, c, g, other or unknown
  misc_feature (402)..(402): "n" may be a, t, c, g, other or unknown
  misc_feature (424)..(424): "n" may be a, t, c, g, other or unknown
  misc_feature (480)..(480): "n" may be a, t, c, g, other or unknown
  misc_feature (516)..(516): "n" may be a, t, c, g, other or unknown
ggtattttaccagtttattcaaactatttcatcttagctntttaatcttgggcagttttcaagccctanatccaactgaatttgccttggctggaattctgctgtttcatgagccagcagganatttgcaagtncattaacncagtttttaaagtagcaccttcaatacatganagctatataaatttaaaaataataaaaaaccaactaatacctattctgcttagngacctgtccctaagngncatacattctttcctcctttgaatatgataccaaggaagaagaatcaagcaaaaggggaaagtaattaaaaaaaaatntntntcaaagcctgtttggtttcatgtttcagggtctcctggccaaaattccccaaagctgtgaagacngaaaagtggngaactatttcagaaaagtgcancaggtttctgaaggcgcccctacaatggacttaaaacttggattactttccaagangaaaggatttttttccatcccaattggatgaatggngttttttaagaaaaaaaggattttttaccccaaactt

SEQ ID NO: 7458 - DNA, 541 bp, Homo sapiens
  misc_feature (1)..(541): "n" may be a, t, c, g, other or unknown
nnnnnnnnnnnnnnnnnnnnnnnnnnnnnnnnnnnnnnnnnnnnnnnnnnnnnnnnnnnnnnnnnnnnnnnnnnnnnnnnnnnnnnnnnnnnnnnnnnnnnnnnnnnnnnnnnnnnnnnnnnnnnnnnnnnnnnnnnnnnnnnnnnnnnnnnnnnnnnnnnnnnnnnnnnnnnnnnnnnnnnnnnnnnnnnnnnnnnnnnnnnnnnnnnnnnnnnnnnnnnnnnnnnnnnnnnnnnnnnnnnnnnnnnnnnnnnnnnnnnnnnnnnnnnnnnnnnnnnnnnnnnnnnnnnnnnnnnnnnnnnnnnnnnnnnnnnnnnnnnnnnnnnnnnnnnnnnnnnnnnnnnnnnnnnnnnnnnnnnnnnnnnnnnnnnnnnnnnnnnnnnnnnnnnnnnnnnnnnnnnnnnnnnnnnnnnnnnnnnnnnnnnnnnnnnnnnnnnnnnnnnnnnnnnnnnnnnnnnnnnnnnnnnnnnnnnnnnnnnnnnnnnnnnnnnnnnnnnnnnnnnnnnnnnnnnnnnnnnnnnnnnnnnnnnnnnnnnnnnnn

SEQ ID NO: 7459 - DNA, 392 bp, Homo sapiens
  misc_feature (302)..(302): "n" may be a, t, c, g, other or unknown
  misc_feature (328)..(328): "n" may be a, t, c, g, other or unknown
  misc_feature (330)..(330): "n" may be a, t, c, g, other or unknown
  misc_feature (342)..(342): "n" may be a, t, c, g, other or unknown
  misc_feature (360)..(360): "n" may be a, t, c, g, other or unknown
  misc_feature (378)..(378): "n" may be a, t, c, g, other or unknown
  misc_feature (387)..(387): "n" may be a, t, c, g, other or unknown
aaaaaatgtatttgtgttttgcaggttggaacgcaaacccagtctggccacgtcccgtgaagttgtggacaaaatgtttcagtttctgttcacctctgtgcgtgtgtgtgtatgtgttgtgtgcatgtgtgtgtgtgtgggggggtgggggatggggtaggtatgtgcttttggctcatgtttgtgatgataactgaagtcttttgtgggtccgacctgttgtagggtgtgggggaaagtgaaggaagagaatgaaggtgagtccccgccgttgcaaaccttcaccaaaccacgcggcccanttttcgtgagtacccctgtgtcccananaggaggacccancgtcctcggctctgccgnaggccttcttggtctggngggtactcnaggca

SEQ ID NO: 7460 - DNA, 564 bp, Homo sapiens
  misc_feature (474)..(474): "n" may be a, t, c, g, other or unknown
  misc_feature (491)..(491): "n" may be a, t, c, g, other or unknown
  misc_feature (505)..(505): "n" may be a, t, c, g, other or unknown
  misc_feature (541)..(541): "n" may be a, t, c, g, other or unknown
  misc_feature (564)..(564): "n" may be a, t, c, g, other or unknown
gagttgtaataggatgaatgtaattgtagaataggattgcacaaatacagaagtcatgccctaaaggctacagcaacaaattaatacaaataattctggcagtcttataaaattacatctatctctgtagatatttcacttttgtgtcatcaaaaacacagtttgtaaaaatattttcaaactttttttaaacttcaacagtaatcaaagttatctgactgcaagtaacatcaaaatgctagcaaatagaccattttaatcagttttattgattcatgcttccagttcttattcagttaaaaacaaggcacattaaatacatcctcttattgctctataaatgcatgcagctcattctgtgtatcaaaagtaataaataatggccataaaacaccaagacagttataaaaatgacaacccagcctcaaacatagtatttaacagtccagtctagaacaataacccaacatgatncataaaagtgccccatntgaaaacatgccgnggggatatccctctagcactgggcttacacttgctntttaaaacctagtagggcttttn

SEQ ID NO: 7461 - DNA, 574 bp, Homo sapiens
  misc_feature (479)..(479): "n" may be a, t, c, g, other or unknown
  misc_feature (501)..(501): "n" may be a, t, c, g, other or unknown
  misc_feature (511)..(511): "n" may be a, t, c, g, other or unknown
  misc_feature (554)..(554): "n" may be a, t, c, g, other or unknown
  misc_feature (559)..(559): "n" may be a, t, c, g, other or unknown
ggagggaaaggatgcactttcatgtttaacaaaataaattaaatatacggggcttcagctcaaactctacataaaattacagagatctggggccaccacgacagtggggtggggggtggtgtctggcctggacggggtgtggtcatcagcatggctgaaagaccaggcgggtcccgggccccaggagagaccacagtccctgcaacccagtcttccttccatcattattaatattatcttcatttcttaaatataaataccaaggccccttctctgtgtcagggggagaatgcagtggggatgagccactagccatgggctccagcctctcaggcttggggctgctgtgcccccaaccccagcccacagcagtaggggactcctgggcacccaaggcaggtggcaaaaatagcccgccaaggccaggggacagaggcggggatggaggcggggactgaggcggggacagaggcggccanagttgggggaatgacggtggancagggaaagnccctcataactatgagcctacgggacacgtacttgaaggcttnacggncaaccttccaaaagg

SEQ ID NO: 7462 - DNA, 585 bp, Homo sapiens
  misc_feature (542)..(542): "n" may be a, t, c, g, other or unknown
  misc_feature (577)..(577): "n" may be a, t, c, g, other or unknown
aacaggagaaaaagcaaacaaatttatttgatcataattgtatgtgagccctcagaatgaagaccccaagatacaggggaattgtccatttttatgtttaggttcaacagattatggactgtgtagaaatatgattggacaagaagggtatgatctaatagtaatagactgagaggggaaacccagcaaggctgtctagattcttcttggcctctctgtgcaggattccttccttctgggcacggggtgggaccctctctggaatgggtatcttacgacagtcaaacacggtaggtcagatcatttctttccaaccagtttttacacagaaaggggaatggggagtgagaggactatttttaggttttatggctggctttgggtaaaaccggttctggtttctgatgacctgccttggggaagagggattctagtttctatgggtagccttgggggagaatgaaaagccagaaacaagagggcaggaaaaggtcagagagaaactttgcttctggggctgcttctgaggcttccttttaagntatcagaaatgatcaggggcattctggctccaggnaaggctcc

SEQ ID NO: 7463 - DNA, 435 bp, Homo sapiens
  misc_feature (348)..(348): "n" may be a, t, c, g, other or unknown
  misc_feature (382)..(382): "n" may be a, t, c, g, other or unknown
  misc_feature (385)..(385): "n" may be a, t, c, g, other or unknown
  misc_feature (397)..(397): "n" may be a, t, c, g, other or unknown
  misc_feature (403)..(403): "n" may be a, t, c, g, other or unknown
  misc_feature (425)..(425): "n" may be a, t, c, g, other or unknown
  misc_feature (430)..(430): "n" may be a, t, c, g, other or unknown
cacttctaattctttttattcaaattaaaaaaaaaaaaaaaagcacccacatcagttgctatttttctctggtagctccctgagctgagttgctatgctgtcttctaactttttgccctttttaggctgtgtcccaagattcagaagagctggagagggagttcctttgaacttccattgctcacaacaatgactaagtgtgcaccaaagagaaagacctggctgaggaggagagagggagagaccaagaaagagagacacagagagggcaagaggcagccagagtgcaagagaccacagaaggctccatttctgcgggtgtccgcctggacgggcccccatctcagngccttccatccctcagtctggccggttggttatnagnccggatgcccanacccgngtggaggcacacgcattccagnaggcncctta

SEQ ID NO: 7464 - DNA, 589 bp, Homo sapiens
  misc_feature (482)..(482): "n" may be a, t, c, g, other or unknown
  misc_feature (507)..(507): "n" may be a, t, c, g, other or unknown
  misc_feature (554)..(554): "n" may be a, t, c, g, other or unknown
  misc_feature (556)..(556): "n" may be a, t, c, g, other or unknown
  misc_feature (560)..(560): "n" may be a, t, c, g, other or unknown
gcttagaatcatttaatgaatgttccaaacacacccttcactgggctacaggtaaatttcactgggatggaagcagatgaaccacccaatcaaacagtacatgattactcggtttccagaaatctggataccagaaaaactcagtaggaaacatcaggatcacctagccagaggttccttgtgattctttgcttcctcctctcctcttcctcctccctgctaaggaacttctccaggggtacaaatgttcaggatgggagaaggggaagtcaggtcccttatctctagggcaaagaggagtgctgtgacaccacaccccagagacaacaagatgatgtggaggcacaggcctgctcaataaatagttcccagaagtctccacagtgggattaatgggcccagggacgctgaactgcaggagccaccttcccgaggccaggctgtggcctgctcgctacgtgttgcacaccagcacatctgcnaagggtccaggaggatcttgtgaanatccacggcccaaccaggtaggtggtgaaaggctttgaggttttcangnaagngtggttttcaaaacccgatgtaaggccct

SEQ ID NO: 7465 - DNA, 596 bp, Homo sapiens
  misc_feature (490)..(490): "n" may be a, t, c, g, other or unknown
  misc_feature (493)..(493): "n" may be a, t, c, g, other or unknown
  misc_feature (550)..(550): "n" may be a, t, c, g, other or unknown
  misc_feature (582)..(583): "n" may be a, t, c, g, other or unknown
  misc_feature (587)..(587): "n" may be a, t, c, g, other or unknown
  misc_feature (591)..(592): "n" may be a, t, c, g, other or unknown
  misc_feature (595)..(595): "n" may be a, t, c, g, other or unknown
ccaatttgagatggagtctcactctgtcgcctaggctggagtgcagtggcacaatctcggctcactgcaacctctgcctcccgggttcaggcgaatctcctgccccagcctcccgagtagctgggactacaggaatgtgccaccacgcccggctaatgtttgtattcttagaagagatggggtttcaccatgttgggtaggctggtcgcgaactcctgacctcaagtgatccgcccaccccggcctcccaaattgctgggattataggtgtaagccactctgcccagccaaaaagttaatagaaatcttaatcaaaatataaatatacattcataactgccatctacaatattctgttttggtcctatatcttaatttgcctttatccactttattattctaattgtcaactgattttaataaaactgatacatctttacagttgatgcacatattagcacattcacaacataaaaacaaaaatttagangtnaaagtttgggaagtattaaggtaagtacccatgttcaaaagttaaccccgacctatntgaaaagtaactaagttccaaacaatggccgnntttntttnnaana

SEQ ID NO: 7466 - DNA, 593 bp, Homo sapiens
  misc_feature (444)..(444): "n" may be a, t, c, g, other or unknown
  misc_feature (458)..(458): "n" may be a, t, c, g, other or unknown
  misc_feature (529)..(529): "n" may be a, t, c, g, other or unknown
  misc_feature (542)..(542): "n" may be a, t, c, g, other or unknown
  misc_feature (550)..(550): "n" may be a, t, c, g, other or unknown
  misc_feature (556)..(556): "n" may be a, t, c, g, other or unknown
  misc_feature (559)..(559): "n" may be a, t, c, g, other or unknown
  misc_feature (561)..(561): "n" may be a, t, c, g, other or unknown
  misc_feature (587)..(587): "n" may be a, t, c, g, other or unknown
gaggcagagtcttgctctgttgcccaggctggagtgcagtggcatgatctcagctcactgcaacctccatctcccaggctcaagcaattctcctgccttggcccccagagtagctgggattataagcacctgccaccatgcccaggtaatttttgcatgtttagtagagatggggtttcaccatgttggccaggctggtctcaaactcttgacctcaggtgatttgcccgccttggcctctgaaaagtgctgggattacaggcgtgagcaaccgcgcccagccctatttttttgtattttagtagagacagcgtttcaccacgttggccaggctggtctcgaactcctggcctcaagcaatccacccgcctcagcctccaaaagtgctgggattacagatgtgagccatggcaccatgccaaaaggctatattcctggctctgngtttccgagactgnttttaatcccaacttctctacatttagattaaaaaatatttattcatggcaatctggaacataattactgnatcttaagtttcnctggatgnatatanaangnttaaggccaattttatcaaactagtngagtac

SEQ ID NO: 7467 - DNA, 591 bp, Homo sapiens
  misc_feature (477)..(477): "n" may be a, t, c, g, other or unknown
  misc_feature (503)..(503): "n" may be a, t, c, g, other or unknown
  misc_feature (553)..(553): "n" may be a, t, c, g, other or unknown
  misc_feature (558)..(559): "n" may be a, t, c, g, other or unknown
  misc_feature (589)..(589): "n" may be a, t, c, g, other or unknown
gatttttaaaaagccatttattttaaaaaactggtttgtcaaatcacatacatgagcagatacacaactaccaaagtggcctgtaatagacaccagtggggcggtcaccacacagtacctgaaaaatacagctaaaaaaggaggagtctgttgagtatttaatttcagatctacttgactccttgttgaatggctttaagttagcatatagtgagtgagaggtagagtcccaagtataatagctgatgcctcagggctccatttaaaaacaaaacaaaaacaaaaccatttctccctctgcacaagggaagcctatcctattttttttttcctttgcgaaaacagaagccaagtttctcttctcaaatggttcagcattcccaatcaaaaagtggtgtgtggtaacctaggtattgtgcttgttgagccatttaattttcctcaccttccgattcggattcttcttctgcattttgnaaccactcacaaattcttcatctggncaagaaaaacactttggcctttacacatgggcttccttataccatttaanaatgnntctttggttaaaacataagtttttaaaganac

SEQ ID NO: 7468 - DNA, 593 bp, Homo sapiens
  misc_feature (416)..(416): "n" may be a, t, c, g, other or unknown
  misc_feature (430)..(430): "n" may be a, t, c, g, other or unknown
  misc_feature (461)..(461): "n" may be a, t, c, g, other or unknown
  misc_feature (511)..(511): "n" may be a, t, c, g, other or unknown
  misc_feature (523)..(523): "n" may be a, t, c, g, other or unknown
  misc_feature (576)..(576): "n" may be a, t, c, g, other or unknown
  misc_feature (584)..(584): "n" may be a, t, c, g, other or unknown
  misc_feature (587)..(587): "n" may be a, t, c, g, other or unknown
  misc_feature (590)..(590): "n" may be a, t, c, g, other or unknown
agtgaaaagattatgtatttcaaataaaattatacatgttggaggcagaacagaaccaggggtcttcagcagaggatttctcagtcagccttcacaggcctcatgctgtggctggcagatactttccactgagcatagaaagtttcaggataacaagaaacttgttttttgcctccatgaactgggatgtcattattatagagaagatgaataatttaaaaagtgaagactattcattcaaaatgctagagtgacaaatttactttatgaaatttaaacacagcattcatcctcgggaagctgcatatacattatggtagtagaaccagattaggtacatttcagcgttgaaaagattttgtctaaaaatgaaaaggcagctttcttaaagaccagagttatagagtcactcttgnatttttcatcttgntttagtggccaaagctcaacttggtttaatnggaccaaagctcagtaactcactcagattagaactataattctgtgaagngtcaggaccccngaaagtcctcctgggactttctatgggaagtttggccaaattttcccatgganctgggccnganggngac

SEQ ID NO: 7469 - DNA, 586 bp, Homo sapiens
  misc_feature (3)..(3): "n" may be a, t, c, g, other or unknown
  misc_feature (80)..(80): "n" may be a, t, c, g, other or unknown
  misc_feature (527)..(527): "n" may be a, t, c, g, other or unknown
  misc_feature (547)..(547): "n" may be a, t, c, g, other or unknown
  misc_feature (550)..(550): "n" may be a, t, c, g, other or unknown
  misc_feature (566)..(566): "n" may be a, t, c, g, other or unknown
  misc_feature (580)..(580): "n" may be a, t, c, g, other or unknown
canattgtcaaaagcaatttaatttttggaggaaaaactgcatacgcagtacaacttatatctcaggcgaaatgtctcanaatcttcctgctcattggacagaaactcagcttcaccacattgccagccgggagaccatggaagggaactggcgccactgcccccagctgcccttcccaggggcaacttcaccaagatgtggaaatcctgggcccaccccacagtcagtcatcgctccatttcttcctggcaccaccacctccatctggcctgctccccaaccccccagaagcaggtgggcccaggctccaggccagtgcccccatcaagatcagacgtaaggcatcttcccaccgtcgctgtgctgcggggacttttccaatccttccttcctctctgtccagaggctgccaggctgagggggccaccgtccaggtggaacaggcacaggcatcggggaatcagatggtatcagtggggatagggcacaagcactttctgggaccatgtgacccagatcttctttnggcagttcccactggcttgnggnaaggggttttataaanggggccactttcangaacat

SEQ ID NO: 7470 - DNA, 579 bp, Homo sapiens
  misc_feature (27)..(27): "n" may be a, t, c, g, other or unknown
  misc_feature (69)..(69): "n" may be a, t, c, g, other or unknown
  misc_feature (414)..(414): "n" may be a, t, c, g, other or unknown
  misc_feature (486)..(486): "n" may be a, t, c, g, other or unknown
  misc_feature (504)..(504): "n" may be a, t, c, g, other or unknown
  misc_feature (521)..(521): "n" may be a, t, c, g, other or unknown
  misc_feature (555)..(555): "n" may be a, t, c, g, other or unknown
  misc_feature (579)..(579): "n" may be a, t, c, g, other or unknown
atttgttgaattcctaggtcccacctntttcactgcatcatcccagaatcccatgttggagtttttagngtcagcattactccaaatactactgactaggtcagatgcccactggttaggaggaccagtatttatagagccccaaacagaattcccaatgctggtgtgcaggttggaatgcgtattgttacgagctctgtttggttgctggtgttgctgctgctgctgctgctgcttttgcatttgcctggcctcttcctgctggatctccagaagagatttcgtggtacctgaaggtttgctgacattcccccaacctgagagtttctgctgttgctgctgctgctgctgctgaagagctttcatcaactccctctgctggcgcctttgctcttctcgaactgccgttctcgntcttcctctagtttttggatttcagccaacgacagcgtggcctgggactgacatgctggtggattggactgnttggccccacgttggaanaaaaaaggaactttatntgggcccacttgtggtgctgctggtgctggttgnaacctccggaaagcctttggtggn

SEQ ID NO: 7471 - DNA, 507 bp, Homo sapiens
  misc_feature (109)..(109): "n" may be a, t, c, g, other or unknown
  misc_feature (267)..(267): "n" may be a, t, c, g, other or unknown
  misc_feature (296)..(296): "n" may be a, t, c, g, other or unknown
  misc_feature (375)..(375): "n" may be a, t, c, g, other or unknown
  misc_feature (423)..(423): "n" may be a, t, c, g, other or unknown
  misc_feature (478)..(478): "n" may be a, t, c, g, other or unknown
  misc_feature (491)..(491): "n" may be a, t, c, g, other or unknown
  misc_feature (498)..(498): "n" may be a, t, c, g, other or unknown
  misc_feature (500)..(500): "n" may be a, t, c, g, other or unknown
  misc_feature (503)..(503): "n" may be a, t, c, g, other or unknown
  misc_feature (507)..(507): "n" may be a, t, c, g, other or unknown
cacgaatcactttgtatttacagatacacatgcatttaaaatagatgtaaataaacacaatactgtattgcacttttggccacttttgcgtctttagaagtcaagaggngttttttgttgttgttggtttgcttgttttgttttgagatggagtctcgctctgtcacccaggctgaagtgcagtggcacgatctcggctcactgcaacctctgcctcccaggttcaagcgattctctgcctcagcctcctgagtagggatttcaggngcccaccaccacgcctggctaatttttgnatttttagtagagataggggtttcaccatgttgcccaggctggtcttgaactcctgacctcaggtgatctgcccacctnggcctcccaaagtgctgggattacaggcatgagctgctgccccagccngaaatcaaagaggttttaaaaattttatttggaatggtgaggaaaaataaatccnggacaaagtggcnctacccntnttnccan

SEQ ID NO: 7472 - DNA, 540 bp, Homo sapiens
  misc_feature (475)..(475): "n" may be a, t, c, g, other or unknown
  misc_feature (502)..(502): "n" may be a, t, c, g, other or unknown
  misc_feature (532)..(533): "n" may be a, t, c, g, other or unknown
  misc_feature (538)..(538): "n" may be a, t, c, g, other or unknown
cctctggctacgttcagtccgactgagtgcagcgctatgcatatgtaaacatattcgttaaagccgatcacctttaaggtcattcggaaaaaagcggtccttgttttcgcggtgtgggtgtgggtcgtaacagcagtctcattcccccgggaggaaggctcttgggcgttggagagtcccactcgggttgtgccacaggacaatgtgggcagggcgtgagcggctcggcgggcgcggcccgggcgttacctcctgccgatctcgctctgccgcaggaactggatgttgttggcgctgtcggccagctcggggtactgctccaccgagagtacgtagtacccgtcgtagccctgcaccttgccggcgctcagcagctgccgcttctcgccctccgtccagaggcgcgcgccctcctcgccgtcgcgcacgcgcttgctgctcgcgcgcccaggcccgggcgaacgcgcgctgccgngcctgttcaagatgcgcgccttttctngtcaagggcatgccctaacgcacgtgcaanngccanct

SEQ ID NO: 7473 - DNA, 554 bp, Homo sapiens
  misc_feature (36)..(36): "n" may be a, t, c, g, other or unknown
  misc_feature (330)..(330): "n" may be a, t, c, g, other or unknown
  misc_feature (495)..(495): "n" may be a, t, c, g, other or unknown
  misc_feature (497)..(497): "n" may be a, t, c, g, other or unknown
  misc_feature (511)..(511): "n" may be a, t, c, g, other or unknown
  misc_feature (533)..(533): "n" may be a, t, c, g, other or unknown
  misc_feature (554)..(554): "n" may be a, t, c, g, other or unknown
ctttttttttttttttttttttttttttttagaggngtcatgtttactttttatttaggagtacaaactgagacaaaatcatccttccagttagtgaggttttgagggatcatactaaagagaagacaggaaaacaccagtaatggtgaaggtcttgagaaaaggacaggacccgcagatagcgagagatcagaggaggccctaatttctttcctcatttcctttccaaatatcccaaatgtgcaatgcatcacctgagacagaaggcagaaagcatcaagctctctgtttatcccaattcaatgacaaccagaacttattttttttganatggggtctcgttctgtcgcccaggctggagtgcagtggggcattcatggctcatcgcagcctccaactctcagtctcaagcaaccctcctacgtcagtgtcctgagtagctggaactacaggcatgcaccaccacacttggctcatttttaaaaaatttcttgnanagaccggatcttgntacattggccagctttgaatgncccggggggcattacaggttn

SEQ ID NO: 7474 - DNA, 540 bp, Homo sapiens
  misc_feature (490)..(490): "n" may be a, t, c, g, other or unknown
  misc_feature (517)..(517): "n" may be a, t, c, g, other or unknown
  misc_feature (519)..(519): "n" may be a, t, c, g, other or unknown
  misc_feature (521)..(521): "n" may be a, t, c, g, other or unknown
  misc_feature (530)..(530): "n" may be a, t, c, g, other or unknown
ccaaaagttctttggggtttatttgagttttaatatttgaattttaaatattaactctatgccactgtcttatcttttgtcttcatgagttccaatcttacctgtatcatcttttctttgacaatcttctttatctgtcattttatttctgggtctttttggctcttcctttaatattgctttgtttgttttgcttctcttagcttttcttactcctaccttctacgtgccttaatgtacttgtgaccatatctattttcattaagatataatttagtattcatatctgtgaagatttatctttttgttcaaattatttcccaagttcagtcagttctcttctcatatatgcttgtagctttttcatttttattctgagtttttgaatttctgatctctggtgttcttttatatccacaattatttattttcaaattcatgttgaaagtgtttaagttacagtttactggttcatgggccaagacagccnttttctgctggacaataatggaaaaangncnttaaaaagnaaggctaggg

SEQ ID NO: 7475 - DNA, 510 bp, Homo sapiens
  misc_feature (88)..(88): "n" may be a, t, c, g, other or unknown
  misc_feature (471)..(471): "n" may be a, t, c, g, other or unknown
  misc_feature (478)..(478): "n" may be a, t, c, g, other or unknown
  misc_feature (480)..(480): "n" may be a, t, c, g, other or unknown
  misc_feature (488)..(488): "n" may be a, t, c, g, other or unknown
  misc_feature (490)..(490): "n" may be a, t, c, g, other or unknown
  misc_feature (493)..(493): "n" may be a, t, c, g, other or unknown
  misc_feature (506)..(506): "n" may be a, t, c, g, other or unknown
cctgtcttctaattaaaaaagacattcctgggtgacaggcacagtgcaggagtgtgagctatcgaaacaacctggtgaagtctcgcanggcccagcaaacttgtttacattcctcagcactagtgacttgcttgtggaagtctgtaagttgtttgtgtgtcactgtgacggctcccacggttgtttcctttggcaaaccttttaaggaattttctaaccatcgacaaaaagtcggtctgtcaacctgcatgatctcccagagcacttcagccacatctggtagggtatagggggggaggcaaaagcagcaggtgtgcagcagctggctgacaagctgctgtccaagctggttcatcacctgtccaatcagttctttccgtaattcaaagtcttcttcatgatcattggctacccctgtatgaatgaggtctcgtagaaacctcatgacactacaattgggattcccgtggnccaaggnantaaaagcnanggncccctgtaaaaangggt

SEQ ID NO: 7476 - DNA, 523 bp, Homo sapiens
  misc_feature (315)..(315): "n" may be a, t, c, g, other or unknown
  misc_feature (421)..(421): "n" may be a, t, c, g, other or unknown
  misc_feature (438)..(438): "n" may be a, t, c, g, other or unknown
  misc_feature (468)..(468): "n" may be a, t, c, g, other or unknown
  misc_feature (478)..(478): "n" may be a, t, c, g, other or unknown
  misc_feature (482)..(482): "n" may be a, t, c, g, other or unknown
  misc_feature (489)..(489): "n" may be a, t, c, g, other or unknown
  misc_feature (519)..(519): "n" may be a, t, c, g, other or unknown
  misc_feature (523)..(523): "n" may be a, t, c, g, other or unknown
acatttttgtagagatggggtcttgctatgttccccaggtcggtcggtcggtcatgtggtacttcatttaggccaggcgtggtggctcaccacctatactcccagcactttgggaggccaaggcaggtggatcacttgaggtcaggagttcgagaccagtctagccaacatggtgaaaccctgtgtctactaaaaataccaaaaaaaacttagccgggtgtggtggcgggcacctgtaatcccagctactctggaggctgaggcaagagaatcgcctgaacctgggagatggaggttgcagtgagcagagattgngccactacactccagcctgggcaacagagcaaagcctcaaacaaaacgaaaacgaaacaaaacaaatatagtacttcatttaaccctttcaagcttggagccttanactaactgagagggtanactcaaagccggttggctcactcccaaatncacaggacantttncattatncaccagttaaaccctttgggggcttgcttnaagn

SEQ ID NO: 7477 - DNA, 482 bp, Homo sapiens
  misc_feature (436)..(436): "n" may be a, t, c, g, other or unknown
  misc_feature (438)..(438): "n" may be a, t, c, g, other or unknown
  misc_feature (450)..(450): "n" may be a, t, c, g, other or unknown
  misc_feature (457)..(457): "n" may be a, t, c, g, other or unknown
  misc_feature (461)..(461): "n" may be a, t, c, g, other or unknown
  misc_feature (479)..(479): "n" may be a, t, c, g, other or unknown
  misc_feature (482)..(482): "n" may be a, t, c, g, other or unknown
caggaacaagtttattgcagggaacacactaacctctttcataatagccaaaggcataaaaactacaaaaatatctggctctcgagtgtgggcagctcagtgtgggacctggtctgagtcatgacttgggctgccctgcaggccagaggcccgggagctttccggccactccccagagaggtccgtggcgctgagggggtgagaagtgccttggctgcttccacagcgtgaaggccaaggctgaggtggagctgggctggagtggttccagagaaggcttcatcgaggcccttcaaggctgatggcagagccagggtagggagacgcctggatgtggctgccctggctcaactggctcctggaccaaggccctaacccaccagtttttttctccagaacccctgctggctctcccatagccaagtgggtggagcananccctcctgaggntcccagngcanacagaccttcacccaacncan

SEQ ID NO: 7478 - DNA, 535 bp, Homo sapiens
  misc_feature (478)..(478): "n" may be a, t, c, g, other or unknown
  misc_feature (488)..(488): "n" may be a, t, c, g, other or unknown
  misc_feature (499)..(499): "n" may be a, t, c, g, other or unknown
  misc_feature (512)..(512): "n" may be a, t, c, g, other or unknown
  misc_feature (518)..(519): "n" may be a, t, c, g, other or unknown
  misc_feature (525)..(525): "n" may be a, t, c, g, other or unknown
gtctggcttattttgtgtgtgcatgtatatataggaacagcttgaggggaagggttatgtcatgcaatgaagcaaaaacaagacgacctcctctgacagaggagccttagtgttgtagaagagaagcaaggctgaggtcactggaaaggcttagaatgaagctgcccttgcctgttcctcctgagaacccagagcggcagtggtccagggcacaaagcataatgatctctcatgaggattcctatctgaacacatcagaagtcctatgaacatagatagttctgttttagaatataaatggtagtgacttcctgcgctcctgaggcggggcaaaataatccataaacacataatccttctgggcaataatgtttctggactcgccagcagagggctctaggaacagaggtgggggtagaagtcggggagaaaaaaggttctagagatggcatgtcttcaggggaactttgagaaatgncccttggtcnacatttctaantgaccggacccgngaaccnnggctgnaatggcatta

SEQ ID NO: 7479 - DNA, 558 bp, Homo sapiens
  misc_feature (478)..(478): "n" may be a, t, c, g, other or unknown
  misc_feature (490)..(490): "n" may be a, t, c, g, other or unknown
  misc_feature (523)..(523): "n" may be a, t, c, g, other or unknown
  misc_feature (527)..(527): "n" may be a, t, c, g, other or unknown
  misc_feature (539)..(539): "n" may be a, t, c, g, other or unknown
  misc_feature (542)..(542): "n" may be a, t, c, g, other or unknown
  misc_feature (553)..(553): "n" may be a, t, c, g, other or unknown
aaatagaaggtgagtttatttctccagtcttgaaattaacaattttcgagaaaacaaattattagaataactggtggagtcacagacatatttctagctccattaggtcaaaggaaaggaaagaggacaagggtagaaaggagacaagccctctaagaaactgtccattcagtctgtctgcagtcaatatgaagagatagcctttggagctacagaaaatattacattgaagtggattatgcttgctgttaaagaagctggtccagccgagcagcagcagaagacgaagactcaaatgtccatgtagagcatcatggtccctgaccaaagagacttcttctggttcctcttgctctcctcaccaagagcacagatgtgcccagcagcaatatgacagcaaatgtctctatggcttcgggatgaaaatgtccacacactttaagacccgagaagaaatggggagtgctccacacccaangaactgaagctngggaaagaccggtttcttggggttctggcatanaagnggactggtgctnaanccactgggctnttcca

SEQ ID NO: 7480 - DNA, 547 bp, Homo sapiens
  misc_feature (510)..(510): "n" may be a, t, c, g, other or unknown
  misc_feature (535)..(536): "n" may be a, t, c, g, other or unknown
  misc_feature (542)..(542): "n" may be a, t, c, g, other or unknown
  misc_feature (544)..(544): "n" may be a, t, c, g, other or unknown
gtgtccaaatgttgctttatctttcggcacgaaagatcttcacagtatcaaaagtaaagaattggaaaaaaacaaaataaaaacaaaaacaaaaaaaccaaacacaaagagagcagtgttgggccagcagtaccatcagccctggcccttaggccagcccagtccacgggctctgagtgtggaggctgcgtagcaccaggaagcggctctgctgaggtcaaggggccccagcacagtgtggcatccgttcagcttttggttggaccaggatggtggggagcacagagggtcttggacgggtaggtggggcacacggagggaaaaattatacgccttcagctggcagtcagggcctcaggatgccctgaagcagctcagcctgggcagggcctcactgagctgtgctaggagtggttttcttgaggctgaagttggtccagttcacagcaactttctgacgagtctgctttgcagaatccaaacagaaccttttaaagtacttcacctttnggcaggcttattcattttcacccgnncatggncntgg

SEQ ID NO: 7481 - DNA, 557 bp, Homo sapiens
  misc_feature (505)..(505): "n" may be a, t, c, g, other or unknown
  misc_feature (515)..(515): "n" may be a, t, c, g, other or unknown
  misc_feature (518)..(518): "n" may be a, t, c, g, other or unknown
  misc_feature (547)..(547): "n" may be a, t, c, g, other or unknown
  misc_feature (551)..(551): "n" may be a, t, c, g, other or unknown
  misc_feature (554)..(554): "n" may be a, t, c, g, other or unknown
ctaaagaagttatcactgactgcaaccaaacattttgttccattcaacatacatatcaagctccttttgagatatgctaggctgaatcttgcagaaagcattttcaaagtcttgatatgtaacgggcctcaactggctgggcataatggctgaaaggtctgtggctggcatggcatggagggggcccaccactgcttcctgacacaaatgagccacatctagtccagaaaagccttctgtgcgctggacgagcagtgcaaactccttgtcattgagacagtaattgtgctgtgagagcagttgtactattatctggtgcctcgctgtgctgtcaggaagtgggattaaaagtcgtttcatgaagtacctccgaagggattcatctatttcttctggtttactggtggcacaaattactacgatttggtcctcagcccgaagttagtacagtgtccagttgcatcagaaattcggtctcatccgactgactggctatggtcctcantccttgaganganagaacctggcaatggccttaccaaaatcnccgnggntgg

SEQ ID NO: 7482 - DNA, 547 bp, Homo sapiens
  misc_feature (115)..(115): "n" may be a, t, c, g, other or unknown
  misc_feature (460)..(460): "n" may be a, t, c, g, other or unknown
  misc_feature (475)..(475): "n" may be a, t, c, g, other or unknown
  misc_feature (481)..(481): "n" may be a, t, c, g, other or unknown
  misc_feature (483)..(483): "n" may be a, t, c, g, other or unknown
  misc_feature (524)..(524): "n" may be a, t, c, g, other or unknown
ggaggatcaggtttaatggtcactatgagggtatcgtacatcgttccaagcccggcccccgccccagccctccctcagctgggaacacagccaggtgccctcagacccctggctntgcacaaggggggcctgccccctcgccccagctatatacacgacagcccatcctgctggccgtggacaaaagctgggagctcctgtgcccagtcaggagcccctacagtccaccagctgcgcggccgggtccaggggcccactgtggtgccagcgagtttctcaaaacccagggcccagccccagctgggcccctgccaagccccaggcctgtgtgctgggatggagcctccacactgaggctggtaaaagctgaactcaacagcagcaatgagagtgctgggtgggcttggggggatgaggagcaggccccacccagagccttctctgaaggaggggacgctgngccctttctttctgntgccanantggcctaacgggttccgcgccggttgaggctaagtaagcanggattgggggtggcaaaaagaat

SEQ ID NO: 7483 - DNA, 549 bp, Homo sapiens
  misc_feature (458)..(458): "n" may be a, t, c, g, other or unknown
  misc_feature (498)..(498): "n" may be a, t, c, g, other or unknown
  misc_feature (501)..(501): "n" may be a, t, c, g, other or unknown
  misc_feature (514)..(514): "n" may be a, t, c, g, other or unknown
  misc_feature (526)..(526): "n" may be a, t, c, g, other or unknown
  misc_feature (529)..(529): "n" may be a, t, c, g, other or unknown
  misc_feature (549)..(549): "n" may be a, t, c, g, other or unknown
ctagaaaatcaaatattttattttcattaaaaaaaaaccttgaataataggaatcattttacacattaatggttgctctttaaaagttagaatctcaagagataccaaaagcacttaagagttaccaccacattttgcccaagttctaaggaaagttctgaaacttagtggtggtgtgtttgtactcagcaagctccagacagtctgagttgctcattccatgaacagaagcttgaaaatgcccttacagttgagatataaacgagggaagaggtgaagctttcaggaagccagagagcccctgccggtcaggtttcctgaggaaggcaggggtgctctatgctcatcagtcattcaagcttctcaggaaatgtgcccatcatgggaacagcagctatcttccaagcttaaaaattatgaatcccaggaagttaaagcccaaccagccaaccaccttnacatccttctcatctagtagagtcattcaaaaccgcaagnggngcttttgaggcancttaggaaggcnttngggggctttctaaaggggan

SEQ ID NO: 7484 - DNA, 554 bp, Homo sapiens; identical to SEQ ID NO: 5801
  misc_feature (1)..(554): "n" may be a, t, c, g, other or unknown

SEQ ID NO: 7485 - DNA, 555 bp, Homo sapiens
  misc_feature (469)..(469): "n" may be a, t, c, g, other or unknown
  misc_feature (479)..(479): "n" may be a, t, c, g, other or unknown
  misc_feature (498)..(498): "n" may be a, t, c, g, other or unknown
  misc_feature (513)..(513): "n" may be a, t, c, g, other or unknown
  misc_feature (516)..(516): "n" may be a, t, c, g, other or unknown
  misc_feature (543)..(543): "n" may be a, t, c, g, other or unknown
  misc_feature (547)..(547): "n" may be a, t, c, g, other or unknown
ctaaaattgaataaagattttattataccacacacacaaaaagcaatcggtacagaaaaggcagttttcagttattctgttgagaatttctttccatgatttctcccattaaagtatagttttcaaagcaaccaccacgacaaaggaagcatctaattagtccgttttcttctgatccaagaatgctgaacatttactgtcccatctgtagttgtatcagcagtgtaatgaacacagtttatattacttaactattctttgaactccaagaactgttgaagtcttttctgatgttctgcagatgcttgcacagcattcagatgttcaccaaatgtagtagttattcgatagatggcagttttcagtgatgctctgaatgcaaatcttaatgttttatatgaagtgtccacaaggcttcctgaaatccggggtggtttactggaagcatgaggaagcttaaaggacttgncgactggctnttgcagtggcaacaaagtnttaagggtagctggnaanggccgctggacacttccaaattatccnctgnaaaggagc

SEQ ID NO: 7486 - DNA, 559 bp, Homo sapiens
  misc_feature (494)..(494): "n" may be a, t, c, g, other or unknown
  misc_feature (511)..(511): "n" may be a, t, c, g, other or unknown
  misc_feature (527)..(527): "n" may be a, t, c, g, other or unknown
  misc_feature (530)..(530): "n" may be a, t, c, g, other or unknown
  misc_feature (549)..(549): "n" may be a, t, c, g, other or unknown
agtactcaaacaactttatttcactagccatgagcaaaaagttgaccggctccaggggattttccatcctgccctctccctgctggtggctcccatgatttggaaataacctcatgttccacttggcagtgcctggctttgtgcacccacatggttttggcctgggtcccagtgaaaatggtcctcacctggctggggaacatggttctgagaggccccttgatctgccctggggacatgtgtggccatgctaagggccctgcccaccttcacgtgactggccacctctgccagggtgcaggcagctcctagcatggagacatccttcatggaagtgagctttcccacccacctccatacccacatttctcagaaacagagttaacagggaaccaagagtcaagaagccacagggctggtaacgtgcctacagccaaatctgtgaccattacctgaaaagcaggacaaccaaaagtaatcaggaaagggagaanatgtgggctggaatganattggaccaggagaanacngaattaaggccggaaaacngaaaccccca

SEQ ID NO: 7487 - DNA, 556 bp, Homo sapiens
  misc_feature (476)..(476): "n" may be a, t, c, g, other or unknown
  misc_feature (478)..(478): "n" may be a, t, c, g, other or unknown
  misc_feature (492)..(492): "n" may be a, t, c, g, other or unknown
  misc_feature (520)..(520): "n" may be a, t, c, g, other or unknown
aatttaccctttttattttttacatattctcctggttatttttaactgccaatccattatgttgacaggccaatcattttaaaatatattccaaaatgcaatcatgaaaaataaaaatatgtcattgaatgagaacttctttgtgggccatctcccgctacactgactgagaactgactgttgcaattgcttctgaggaagtatatgatattgggatctggcggacacatccctgggaggggagcgtgttgggctgacagcagaggcccaggtcctcttggctccacagccggtgtgggaggaggtctcagttcacccagcacgcttttctgtctaacctctgctacctttattgcttaggtaaaacatgacttcatttggccttgttgatgcagcagtatctctttaacattaagtatgcttctgctcctattaatccaggacaattaaagaaagcatcaagtttgcaatactangncttttaaattctgncgaatcaaagtcttttgcttactaaagnacttaagaaagtgaagctattaaaagccctacccag

SEQ ID NO: 7488 - DNA, 555 bp, Homo sapiens
  misc_feature (485)..(485): "n" may be a, t, c, g, other or unknown
  misc_feature (504)..(504): "n" may be a, t, c, g, other or unknown
  misc_feature (528)..(528): "n" may be a, t, c, g, other or unknown
  misc_feature (549)..(549): "n" may be a, t, c, g, other or unknown
  misc_feature (555)..(555): "n" may be a, t, c, g, other or unknown
aactgtaaacaaagtagcatttattaaaatagaatatacacttaatttatactaaattccagggagatttatacaagtttttcagccttaatttttaaaggaatgcatgattttttttaaacattaccagtcaagtatatacaaaattgaagtatgccattcaagccagattgtgattttaaaataacaaacctctaaatagctaagtaatgtacaatgtgtaaaattccaattaaacacaggtataaatcttatataaatattggccctataataccgagcgatatttacaagcaaacatgatccaaacagcacatgcagattcagggtaagtaaatactcggacacgaactgccagtcgcacttggtctccacggcaacagattatttcttcacagaaaggagatcgaagacatgtggcaaatgcacgtcctgcatttctatacacaaaatgtattgggaaccctttaaatgtgggccattanggacaggcctttttatggnatcttggaaatcttcaatggctgntggaatacctggtggcccccnaaatcn

SEQ ID NO: 7489 - DNA, 559 bp, Homo sapiens
  misc_feature (482)..(482): "n" may be a, t, c, g, other or unknown
  misc_feature (494)..(494): "n" may be a, t, c, g, other or unknown
  misc_feature (555)..(555): "n" may be a, t, c, g, other or unknown
cttttttttttttcatctttttgagaattttattcacttcaaaacaaattcaacacacctatttacaaagggattccagagcccacttttcgaggctgaggaaagaccccgagagcgctttgcacagcgcgcttcccagcgtcggaaacactgctctcagggcggggcacagcggaagggctgcacctctcagggttccctaacttttcccttattcagtcgtctagagagcaaatacacagtaattcccccgtttcctattgacgtcccagcggaagtctgactcctgcgcgtcatgcagtttctgaggcaacgaatcactggcacggaagcttttcctggcgcgtttccagagaaccatgcgaactacaatgtccctcaccagaattcaacgtggcagagtccctgcatctgctccctgcctggcctgggctcccacatccacagaagggccacaagccgggagctttcggagtcaccgnacaagagtctgntctttgctctgggctcttaatccacaagtcccttcaagtacggaacttgaaggccaagganccct

SEQ ID NO: 7490 - DNA, 546 bp, Homo sapiens
  misc_feature (396)..(396): "n" may be a, t, c, g, other or unknown
  misc_feature (435)..(435): "n" may be a, t, c, g, other or unknown
  misc_feature (475)..(475): "n" may be a, t, c, g, other or unknown
  misc_feature (494)..(494): "n" may be a, t, c, g, other or unknown
  misc_feature (527)..(527): "n" may be a, t, c, g, other or unknown
  misc_feature (531)..(531): "n" may be a, t, c, g, other or unknown
  misc_feature (543)..(543): "n" may be a, t, c, g, other or unknown
  misc_feature (545)..(545): "n" may be a, t, c, g, other or unknown
aaagttacagatagtatttaattggttactgtgatatcatagaaataccaagaatcataaaagtaaaaaaagctgctaagttgtacataatgtttccggaatactaagaagttgctgctggtctacagagccctgggaggtgacggtgaggatggtcccaagaggcgcagctagggtcactggccccggtcctggtgcctcttgcctttgcctttcttcttcttgtcctctggccgtggctccagggcgcagacacaggcggacccgccagcgatggccttgggcaggtcgacgcccctgctccacttgtcggccctcgcggtcgtacacctgcacggtcttggagaaggcagtgttctcccagctgtagccgcccaggatgtagatgcggccctnccacactgccacgcccgactcgctgttggcgtgcaacancggcgccacgcgggtccactggttgcactgcggcttgtangcttcacgcccaacacgtnaaacgcttcatggactcatggtataatcgttgncccnatggagtaaaancnc

SEQ ID NO: 7491 - DNA, 546 bp, Homo sapiens
  misc_feature (423)..(423): "n" may be a, t, c, g, other or unknown
  misc_feature (471)..(471): "n" may be a, t, c, g, other or unknown
  misc_feature (540)..(540): "n" may be a, t, c, g, other or unknown
  misc_feature (543)..(543): "n" may be a, t, c, g, other or unknown
gttttttttcctttagtaaaaatgtgttatgtgctgtagcatacaccagagcttctactttccaatcaggcaacacagactccgagctgcttttgtttttggtccctggaggtgtatatgacaagttgacagaaacaaaaaggtgaagaccctgctccacccagtatagagtcctcttttctttggtgtctcatggaaacctattaacatgccttccacataagtctctatatataaaactatcaggcattatgaattaatttgcagtacagtcactttgataaagttgctatttatcttcaaagtggaaaagtcctgctaatcaaaatggaattgtgaattaaagtaggccactggcttaagtatcaggtagaaaatcaacagcttattttttctgctcaagtttgtgctaacactgatggnctttttgaggaatgctgagtatgccaagggtagaactttcgtacctangtaggtaccaatctcttaagaaaatccaggttctggctgggcctaactgcattgagacccttggcatgngtnacc

SEQ ID NO: 7492 - DNA, 546 bp, Homo sapiens
  misc_feature (492)..(492): "n" may be a, t, c, g, other or unknown
  misc_feature (497)..(497): "n" may be a, t, c, g, other or unknown
  misc_feature (507)..(507): "n" may be a, t, c, g, other or unknown
  misc_feature (522)..(522): "n" may be a, t, c, g, other or unknown
  misc_feature (544)..(544): "n" may be a, t, c, g, other or unknown
gaaaacacaaaaccagaatttattgaaagtaggtaccagctctgattagaacaatcagctcaaagataccattactcagaacaatatatacaaaaatctcagggaaaggagaataaaagaacttaaaagaatacaacttgaacaggactgttttactaaaatggtcttgttgcaaaataataacaaataccacagagagccctacatgagaaagccatgtgccttcaagcctggggatgaggactctagttctcaaattcttagaacatagcacatgattctccagggcagagaggctggctggagaatgaggacctcactgctgactctgcttaacaaagtccatgccccaggcacaggcacacatggaatgaggccaccaagcaagtcacacccgcccctgttcccatgaaccccataagagagaagtgctctctgaagtctacagacttggcagggaccactggaccatggatagcttaaagacagtantttgnggccatgacntaaaacttcagaatntgggcctacagttcccttttcnaa

SEQ ID NO: 7493 - DNA, 530 bp, Homo sapiens
  misc_feature (1)..(530): "n" may be a, t, c, g, other or unknown
nnnnnnnnnnnnnnnnnnnnnnnnnnnnnnnnnnnnnnnnnnnnnnnnnnnnnnnnnnnnnnnnnnnnnnnnnnnnnnnnnnnnnnnnnnnnnnnnnnnnnnnnnnnnnnnnnnnnnnnnnnnnnnnnnnnnnnnnnnnnnnnnnnnnnnnnnnnnnnnnnnnnnnnnnnnnnnnnnnnnnnnnnnnnnnnnnnnnnnnnnnnnnnnnnnnnnnnnnnnnnnnnnnnnnnnnnnnnnnnnnnnnnnnnnnnnnnnnnnnnnnnnnnnnnnnnnnnnnnnnnnnnnnnnnnnnnnnnnnnnnnnnnnnnnnnnnnnnnnnnnnnnnnnnnnnnnnnnnnnnnnnnnnnnnnnnnnnnnnnnnnnnnnnnnnnnnnnnnnnnnnnnnnnnnnnnnnnnnnnnnnnnnnnnnnnnnnnnnnnnnnnnnnnnnnnnnnnnnnnnnnnnnnnnnnnnnnnnnnnnnnnnnnnnnnnnnnnnnnnnnnnnnnnnnnnnnnnnnnnnnnnnnnnnnnnnnnnnnnnnnnnnnnnnnn

SEQ ID NO: 7494 - DNA, 538 bp, Homo sapiens
  misc_feature (437)..(437): "n" may be a, t, c, g, other or unknown
  misc_feature (472)..(472): "n" may be a, t, c, g, other or unknown
  misc_feature (503)..(503): "n" may be a, t, c, g, other or unknown
  misc_feature (508)..(508): "n" may be a, t, c, g, other or unknown
  misc_feature (513)..(513): "n" may be a, t, c, g, other or unknown
  misc_feature (522)..(522): "n" may be a, t, c, g, other or unknown
  misc_feature (526)..(526): "n" may be a, t, c, g, other or unknown
gagatcacaggctttattcctacaaccacagggcttgagcctgactggggcaagaaaacagagtttcatctgagaatgtctcttatgggctgggtcctgttcaggggagggtgggaacagaggacaaggaagacaagctcctctggccctaggaacaaaacacatttactccttcaaagaagcagatgatctgaataccctctggagactgaatctgcccatacagcccctggagccaatgggcagacagtactggcatctggcacaaaagggaattcagacccagaacagaagcagcaaaatattttaaaaatagtaaattgttcctggactcacaaatcattgtttttaagggcaagtgcatgcccaatataagtactggggcttcctaagagagctgcataggattacacagctgcctcctgcttaatggaggncctacatccctttgacacttaacttgggtaggaanaggagccttttggctctgtctgggttctganagctntgcanctggaggcncagnaaactgaggttg

SEQ ID NO: 7495 - DNA, 544 bp, Homo sapiens
  misc_feature (501)..(501): "n" may be a, t, c, g, other or unknown
  misc_feature (503)..(503): "n" may be a, t, c, g, other or unknown
  misc_feature (521)..(521): "n" may be a, t, c, g, other or unknown
  misc_feature (525)..(525): "n" may be a, t, c, g, other or unknown
  misc_feature (530)..(531): "n" may be a, t, c, g, other or unknown
  misc_feature (541)..(541): "n" may be a, t, c, g, other or unknown
acacagtcattaagttattaattaggctctgtaaaaaaaaggtttctacattagtgttccgggctaggcccgatcagtccttggcatattcacagtggcagccccagggcttggccccacaggcaggcagaggggaggcaggaggccacagagcagccggccccacagtgagcacagcaagtgtcctgggccacctccttgagtcttcagttcccttcctagcacctgcagtccagctgctcagcaagccggcagacaggtcctgatcccttctgtggccttctgcatggtggcttcgggcaacgtggcgggccctagaggatgctagccagctctgtggagtctgtttctgagcagccagagctgctggcctcgtccctcagtgcctgcagggccttcttattctgccgccgcctctcctcatcaatggggtacattttgaagagcagcaggcccagcaggatgagaactatgggagccatggtcacgagcatgttcagngnaaacttgaacgtttccgnttgnaacannccccggtctngga

SEQ ID NO: 7496 - DNA, 549 bp, Homo sapiens
  misc_feature (481)..(481): "n" may be a, t, c, g, other or unknown
  misc_feature (511)..(511): "n" may be a, t, c, g, other or unknown
  misc_feature (520)..(520): "n" may be a, t, c, g, other or unknown
  misc_feature (529)..(529): "n" may be a, t, c, g, other or unknown
acatttgcaaaacaacatttattcttttaaaaaatctatatacattgccatacaaagataccacattgaagcagttctcaggaaccttccagtgagccttctcttataattgcccgagcaagatttcgtgccagagaaagtctcagcatttccaccttggtggtctctatgtcatcatcctggagctgctcggtatcagattctccatgcacaggtcttcttgacgtcaagtcctccagacaccgcatcaactcataagtctgttctgctgagaaaatcacctgtttctgttccaaaaggggcaaggcatctgtcagcagagtcatccagaaagaccgaggggcaatccgagacgtcatcaaggacagaaggagagaagctgcgtcggcaaaacgcttctccccgtacatacggtggaactcgcgatactttcccaggaatgtcagtcggtcactgagcatcatggctggccccaggttgncaatgagatccaaatcagaaaagcagcctngcttacagnaatcctganggacctgtctgacacggcgt

SEQ ID NO: 7497 - DNA, 557 bp, Homo sapiens
  misc_feature (536)..(536): "n" may be a, t, c, g, other or unknown
  misc_feature (543)..(543): "n" may be a, t, c, g, other or unknown
  misc_feature (556)..(556): "n" may be a, t, c, g, other or unknown
gaaactgacatttggttttattgtgccaaggacattacagatggcggatcttgtcaacacctgcagggcacgggtgccccatctgccaaggctgctcccacactccctacactcaaatcccgggtggcagccataatccccaaagatggcccccaccccaagattccaaagaagctagtggtggtggaagcaaaaggaatgcagcaaggtcagggtttcattgtccaagccggcctgacacctgccgccctgcccttgcccagtgcacaccctagaccctgggccggcctccatgcagctggaggccagaagacagcaacccatagctttgcaccctcctccatgccccatggcctgcctgcccagaaagatgccaccttcacagagccagtgctgtcgtctatatcatttttgattagttgattttataagataaaagtaattttaataaagaaaaaattcaacattgaaggcttaaacgttctttggggtactgggaaagggaaatttccacttttttctcccaccttcctggnattaaangtccggggggggng

SEQ ID NO: 7498 - DNA, 555 bp, Homo sapiens; identical to SEQ ID NO: 7435
  misc_feature (1)..(555): "n" may be a, t, c, g, other or unknown

SEQ ID NO: 7499 - DNA, 395 bp, Homo sapiens
  misc_feature (337)..(337): "n" may be a, t, c, g, other or unknown
  misc_feature (353)..(353): "n" may be a, t, c, g, other or unknown
  misc_feature (359)..(359): "n" may be a, t, c, g, other or unknown
  misc_feature (364)..(364): "n" may be a, t, c, g, other or unknown
  misc_feature (378)..(378): "n" may be a, t, c, g, other or unknown
  misc_feature (381)..(381): "n" may be a, t, c, g, other or unknown
  misc_feature (392)..(392): "n" may be a, t, c, g, other or unknown
atgttcacagtttattatagtgtatggaagttaagtggcttctaaaggaagccaagatctatgactcaaaaaccagctcaacagcaaaacaccaaatgacccttttaaaggtaccaatattcaaatgctctaataaatacatatataacaaaagtgaaaaaagtaactatagtgagatgaggttcttccaaaaaaattctgtcttgtcaagcattctaggagtctgagccaaagaaacagcgccattttgttcattcctccccctgcccacggacacttcctttgagccacctctatacccagctaactctggtattccctctagggaaggttctgnatcagccctgggactngccagngcctnagtaaacagacggnctntgttaaaaagntaa

SEQ ID NO: 7500 - DNA, 519 bp, Homo sapiens
  misc_feature (6)..(6): "n" may be a, t, c, g, other or unknown
  misc_feature (45)..(45): "n" may be a, t, c, g, other or unknown
  misc_feature (64)..(64): "n" may be a, t, c, g, other or unknown
  misc_feature (88)..(88): "n" may be a, t, c, g, other or unknown
  misc_feature (94)..(94): "n" may be a, t, c, g, other or unknown
  misc_feature (253)..(253): "n" may be a, t, c, g, other or unknown
  misc_feature (314)..(314): "n" may be a, t, c, g, other or unknown
  misc_feature (426)..(426): "n" may be a, t, c, g, other or unknown
  misc_feature (446)..(446): "n" may be a, t, c, g, other or unknown
  misc_feature (456)..(456): "n" may be a, t, c, g, other or unknown
  misc_feature (459)..(459): "n" may be a, t, c, g, other or unknown
  misc_feature (492)..(492): "n" may be a, t, c, g, other or unknown
  misc_feature (512)..(512): "n" may be a, t, c, g, other or unknown
  misc_feature (518)..(518): "n" may be a, t, c, g, other or unknown
caggtncaatgtatattttaatatgggatttgtgtagtgatttanagcataaatatcacacagngaaaaatttatcacaaactaaatncagtancaaaaggaaagaaagagcttatgtccacatttccaaggtctttacaataagttatagcgtccaggtccaacacagcatatttgcatacaaagccactgatgtgaacactgaaaggaatctgtcctgtaggtctttcatcttgatttaataaagtttgtncagtatcaaataatatcaaaagtctaaaaaacacaatgagcttttatgtttataaattatngtttttataccataaaaaaagtcaaaagtgcagtttaaaaaaaagtggaagttgttattcttgataaaagctagaaaaatgtcatgtcccagttaaaaagcaatctcaaggntcatcccatttctaaggaantttacctggnatntaacccttgggtaccatatgctggaagccaaanccaccgaatgggagctttgnacaatnt

SEQ ID NO: 7501 - DNA, 563 bp, Homo sapiens
  misc_feature (417)..(417): "n" may be a, t, c, g, other or unknown
  misc_feature (449)..(449): "n" may be a, t, c, g, other or unknown
  misc_feature (479)..(479): "n" may be a, t, c, g, other or unknown
  misc_feature (499)..(499): "n" may be a, t, c, g, other or unknown
  misc_feature (501)..(501): "n" may be a, t, c, g, other or unknown
  misc_feature (538)..(538): "n" may be a, t, c, g, other or unknown
  misc_feature (563)..(563): "n" may be a, t, c, g, other or unknown
cacatcagtgacagtttatttctcaaagaaaaaaagagataacatttgaataaaaatgcaaaactgaagtacagttaatatgatcaaaattgttgtgtacatgctccatggagaaatcaggaattctttcacaaagaacagatccacagccaatttcagtcacttgtgatgctgaatcagcacccactggtagcaaccaggatccttctgtacagtcacgggcttgagcaggtgccataaagcatctgtttaagttaaacagtcaataatgtttactgactgcagtacattcccaccccccaaaaaaataagtgcaaaatcaacttctaagctcaagagctcaaacaagtcaaagctttggtatatactggaggttggtttggtgataaccaaagcctagtaagattctctgctcanggggttcgcccccaaaagaaaaacacctggtncacaaagcttaacccctttttaaataaggnactgtccaaggagaccaagncntggattcccttaaccaagggttatggttcctaggcanaagtttgaagccccacttaaacccn

SEQ ID NO: 7502 - DNA, 536 bp, Homo sapiens
  misc_feature (464)..(464): "n" may be a, t, c, g, other or unknown
  misc_feature (502)..(502): "n" may be a, t, c, g, other or unknown
  misc_feature (506)..(506): "n" may be a, t, c, g, other or unknown
  misc_feature (509)..(509): "n" may be a, t, c, g, other or unknown
  misc_feature (517)..(517): "n" may be a, t, c, g, other or unknown
  misc_feature (519)..(519): "n" may be a, t, c, g, other or unknown
  misc_feature (529)..(529): "n" may be a, t, c, g, other or unknown
actgagcatggaatacttttaatctctgccattaatattcatttccagctgcttataatagcagcgcctcatggccaaatcattagagttttacatctgggttgcaaatgacactttgattggatgtaatgttcaaatggccctccccacggcgtctccggcaagccttctgcggagaggtgtcctgttgagcgatccctcactgtgcgtgctggctcatcgtgtggttctgcagctcggtctggaagaagaacttctgagggcactgtgagcagtcgtagatcttgtcctcctgcccgtgcacggcaaagatgtgctgctgcaacttgttggcctggacgaagactgtgaaacacacggggcatttgaaggtgcccgcccatgccctcgaactgtgctcaatgaggtgacagaagagcttggcccggggaagtcgaacatctgggtgcacaagttacactcgngggtgaatgccttcctaaacatgggggttggcaaccgngganttngatctctntnttggtcttcnaaggcat

SEQ ID NO: 7503 - DNA, 556 bp, Homo sapiens
  misc_feature (459)..(459): "n" may be a, t, c, g, other or unknown
  misc_feature (503)..(503): "n" may be a, t, c, g, other or unknown
  misc_feature (527)..(527): "n" may be a, t, c, g, other or unknown
  misc_feature (547)..(547): "n" may be a, t, c, g, other or unknown
  misc_feature (553)..(553): "n" may be a, t, c, g, other or unknown
gaacagaatcatattcaatatttatttaaaaagaaaaaagagaagctaaatgtgctggttaattttttgttggcttacttgttggtctgtgatcggtgttgtcaggcagctgcactcccatgctttgtaaaagattggaagcaggtcctgccagtccagcttgggagctataggattccaatatatttgaaaccaggttcaggtctacatctactggtgccataacagattctcccgtaccagaatcttcctcatctgaattgttatcggtagtctgggatacaggttccacttggttcctagtggtgaaacttttgctgatgcaggtgtgtgctagttcctggtccatctgggccatgtatgacttgagattatcaagtgttcctttcagggaagcctcttcgccaggttcgtgtgtttcaaaagtccaagcatcatcactatctaaacattcaaagncttcatcatccagatcatcagaatctgactcattaggccttggncctaaaacttatcaaaataattangaaaaaaatctgcttcaaangggatnggg

SEQ ID NO: 7504 - DNA, 565 bp, Homo sapiens
  misc_feature (47)..(47): "n" may be a, t, c, g, other or unknown
  misc_feature (481)..(481): "n" may be a, t, c, g, other or unknown
  misc_feature (512)..(512): "n" may be a, t, c, g, other or unknown
  misc_feature (519)..(519): "n" may be a, t, c, g, other or unknown
  misc_feature (532)..(532): "n" may be a, t, c, g, other or unknown
  misc_feature (541)..(541): "n" may be a, t, c, g, other or unknown
  misc_feature (555)..(555): "n" may be a, t, c, g, other or unknown
  misc_feature (557)..(557): "n" may be a, t, c, g, other or unknown
aatcacaaaaaaattttattatgtttgaagaaagcttaaaaatttgngttggtctgcattcaaagccatcctggcctgcgggttggacaagcttgatctaaagcttttcccaagttcctcacagtattagtttcctagggttgctgtacaaaataacagactgaatgatttaaccaagagaaatttattgcctcacagttctggagcctggaagtgcaatatcaaggtggagacagggttggtttcctctggaggccataatgaaagcatctgttccaggtctctgtccttggcttgtagatggccatcttctggtggatccacacagtcttctccatgtgtatccttccttcagtttcccttatagggacaccagtgatgtcagattaggggatcgaacccaacaacctcattttgaagttactcacctggttggaaaccctatgtccaaatacagttatagtggtaaggaactaggacntaaggcttaccaaatattggagtggggcatnattccanaccattccatttnaaattgcangggttttcttcaangngaagtcac

SEQ ID NO: 7505 - DNA, 491 bp, Homo sapiens
  misc_feature (422)..(422): "n" may be a, t, c, g, other or unknown
  misc_feature (427)..(427): "n" may be a, t, c, g, other or unknown
  misc_feature (433)..(433): "n" may be a, t, c, g, other or unknown
  misc_feature (453)..(453): "n" may be a, t, c, g, other or unknown
  misc_feature (471)..(471): "n" may be a, t, c, g, other or unknown
  misc_feature (474)..(474): "n" may be a, t, c, g, other or unknown
  misc_feature (482)..(482): "n" may be a, t, c, g, other or unknown
attttttggaaagtattctcaaggtaatatttttttcctttggaaaaagaaatctttttccccccctaacctaagcaagtggagctgccactacctaatttatctattgttttgctaagaggtagataaaacaaaagtgaaatggggcttctatgaggaggtccattagagggtgggtggggaggggctgggatcgcccagtggaactcccccaactacaaagacggcctgaatgagtccaaggaccgcgccctcagactcccccagggcaaaggatcctgcttcacctcttctccttctagagccaactgggcccccattgaagactgaaaaagggcccaatggaggtgtaggatctcaaagaaaccctgttgaagaggtctcagctctggtttccccaggcttcctgactttggggctgngtggngggttncaggccaagccccaaggctnacttccaaccagcccctntanaagggaanaggccattc

SEQ ID NO: 7506 - DNA, 559 bp, Homo sapiens
  misc_feature (499)..(499): "n" may be a, t, c, g, other or unknown
  misc_feature (504)..(504): "n" may be a, t, c, g, other or unknown
  misc_feature (520)..(520): "n" may be a, t, c, g, other or unknown
  misc_feature (522)..(522): "n" may be a, t, c, g, other or unknown
caaaggaatcatcctatctttattctcagaaatccaatgttgaatatcacagttcttctttaatggaagcagaagattcagagtccttgtctcccaaaatgcctcagccagggtcagcacagagagtggaatataaaaagcttaattgtgttaatacatggaagacaacagttctcagtcaacctagccacaattttctgtcttggccatctgtaagaaatgactacgtttgaaattcaactttcacattcaaaaaaaagaaatcaattcagcttcagacacaaagcaaaaccaaaacaaaaaaacaaatggcaatagtctacatatctaaacacttgacaattggggaactgtcccacagtgatatgctcaaggccagtagcacctatttataatttggcatgtactgcttgaaggggcaacaggacccggagctaaaatattcaattataaagatataatacatcgatgaatcagacaaaagtagacatttatgatnccccnttaaggattcttttcngnactgggctgactttaagaaaatattttgggaccttaa

SEQ ID NO: 7507 - DNA, 546 bp, Homo sapiens
  misc_feature (13)..(13): "n" may be a, t, c, g, other or unknown
  misc_feature (50)..(50): "n" may be a, t, c, g, other or unknown
  misc_feature (86)..(86): "n" may be a, t, c, g, other or unknown
  misc_feature (121)..(121): "n" may be a, t, c, g, other or unknown
  misc_feature (128)..(128): "n" may be a, t, c, g, other or unknown
  misc_feature (178)..(178): "n" may be a, t, c, g, other or unknown
  misc_feature (258)..(258): "n" may be a, t, c, g, other or unknown
  misc_feature (309)..(309): "n" may be a, t, c, g, other or unknown
  misc_feature (391)..(391): "n" may be a, t, c, g, other or unknown
  misc_feature (427)..(427): "n" may be a, t, c, g, other or unknown
  misc_feature (445)..(445): "n" may be a, t, c, g, other or unknown
  misc_feature (461)..(461): "n" may be a, t, c, g, other or unknown
  misc_feature (480)..(480): "n" may be a, t, c, g, other or unknown
  misc_feature (510)..(510): "n" may be a, t, c, g, other or unknown
  misc_feature (532)..(532): "n" may be a, t, c, g, other or unknown
aacagttctctgntttattgcaatacagcaaagtctggttaatattaagngatatcaacataaagtattggtgaggagtcttttgngacattttttaccatcccaccttaaatatttctgngcaaaanaatccacatcattgtttggtagcagaggatctcttataaagttccctaanacactgagggcataaaaccaaacaaaataaaataaggagtgataggctaaagcagtatcttcccctccatccacatttgncagcattatattctaaccaaaaaatgatcacaccaggccatgcaaaactgncaatattacaacgagaaaaaccctaaaaaatttataaaatgaatgatattacactatcaaataaaaagacaagtcattttgntttcatgagatttcaagggtgatttgagtcagcttnccccggaactggcacggngtcctgtgtgggggangggcccaacgtgcttgcantgctggggggcaaggcttacactccttatnttgccaaaggcccaaagaaatntggacttggtaaca

SEQ ID NO: 7508 - DNA, 550 bp, Homo sapiens
  misc_feature (476)..(476): "n" may be a, t, c, g, other or unknown
  misc_feature (489)..(489): "n" may be a, t, c, g, other or unknown
  misc_feature (508)..(508): "n" may be a, t, c, g, other or unknown
gagatggagtttcacacttgttgcccaggctggagtgcaatggcgtgatcttggctcactgcaacctccgcctcccaggttcaaccgattcttctgcctcagcctcctgagtagctgggattacaggcatgcgccaccacgcccatctaattttgtatttttagtagagacagggtttctccatgttggtcaggctggtcttgaactcctcacctcaggcgatccgcccacctcggcctctgtgtttcctgtgcttcttagctctttccactgagaaggcttcagtgtggtgattctgtgggtctcttttataaaggcactaatcccattcatgagggctctgttgtctgacctaattgcctcccaaggccccacctcctaataccatcaccttgggggttaggatgtcagcatatgaattctaggggggcctaagcatttacaccatagcaagggccctgggtctcatctgaaangcagaaggagcantgggcccttaggcaacctnttaatggaaagaccttctgagaagaacttggaaataaggatg

SEQ ID NO: 7509 - DNA, 555 bp, Homo sapiens
  misc_feature (490)..(490): "n" may be a, t, c, g, other or unknown
  misc_feature (523)..(523): "n" may be a, t, c, g, other or unknown
  misc_feature (532)..(532): "n" may be a, t, c, g, other or unknown
  misc_feature (534)..(534): "n" may be a, t, c, g, other or unknown
gcatttgtttctttatttaaaaaaatcatctgggggcatggtctgaggaggacacccctcccatggctttggggaggacgcaggttccaggagtcacagggcagaaacacgcggggtgggtgggggcgtggccggagtggggaggggctgtgcccccagcacctgggggtggctcccacggcaccaggtgggctagggcaacagtatgtacaggcgagcagtgctcctggacccggtcggggccggctggggccccattctgcggcaggggagctctggggcacagggtctgagtcccatcttgggctgcagggaccgcgagggccgtccagggaggctggacagcgggggcctttatctgggcccatcaggtggatgagaacggacactgcaaaccgctcaccacctgggccagggctaggcctatccggcaggggccgtccccacactgaatcctgcgtgcgcagaacttaagccggcattcaagcantggggaacgccccgcaagcttggctttggtggnctcggcacntnacaagtggggcccttttctaa

SEQ ID NO: 7510 - DNA, 557 bp, Homo sapiens
  misc_feature (512)..(512): "n" may be a, t, c, g, other or unknown
  misc_feature (548)..(548): "n" may be a, t, c, g, other or unknown
acaaagtctcttaaatatagttcaggctggcaaaacacctctttgcacagaaccgtacagatttcgctgcacagtccattcttttaataataaatttctacgtttcattctctctggattacagctccatgtgctgggcaaaatctcattgactctttcttcacttaaggagagccatccattgtgtggcacagaaagaaatgtttaaacttccattgtaattaaaaaatatcaagtgtccttggctgagtttcagaagtgtcagctgcttccatgacgttggaaacacccggggccttgaaatgggtgatgtcctatcacactaaacattgattggagtggtagagatcttaaagcagttattttaacagaaatgtgtacttctcacatttcacagggtcagaagttgatcttgtaatactggaaaacaccaacgataagggtctgccgggatgggatgactgcctttttgcatttttggcttaagtcaagtgggacaaaaacattctggnctggaactttcttctctctctctttcctctctcttncttcctctt

SEQ ID NO: 7511 - DNA, 558 bp, Homo sapiens
  misc_feature (429)..(429): "n" may be a, t, c, g, other or unknown
  misc_feature (461)..(461): "n" may be a, t, c, g, other or unknown
  misc_feature (502)..(502): "n" may be a, t, c, g, other or unknown
  misc_feature (520)..(520): "n" may be a, t, c, g, other or unknown
  misc_feature (531)..(531): "n" may be a, t, c, g, other or unknown
  misc_feature (552)..(552): "n" may be a, t, c, g, other or unknown
aaaaaagtagggtttattgactcttatgcattgttaaattagagggtagaaagacagagctggtagtctttccctgaaggctgtaaggttatttttgtggtttggtgacttctcaggttggcagccgtcttgttgatgtcccctatgtcatccagagggcaggagcgggcagctctctaccttggcaactggttcctctctctccagcttcatcttttccattgttttttgtttgtttgcttgtttttgtttttcatttttaccttttacagattgatttaaacattttttaaaccacatgcttctttttctgggctccagccagatctctgggggaggagttgttggcagtggtgatggaattgggaagggtctgtgagaaaatctgaggagcttcctgcctcccccagatctccctcacaagactgnctctctcagggttgcttgtgagaatcatttangaactgctgcagtggttttgatgtttctgaacccttcccanaaaggcccagaagttggnaattgaaccangaagtccaaggaaagaccccnaatctt

SEQ ID NO: 7512 - DNA, 541 bp, Homo sapiens
  misc_feature (3)..(3): "n" may be a, t, c, g, other or unknown
  misc_feature (48)..(48): "n" may be a, t, c, g, other or unknown
  misc_feature (64)..(64): "n" may be a, t, c, g, other or unknown
  misc_feature (115)..(115): "n" may be a, t, c, g, other or unknown
  misc_feature (135)..(135): "n" may be a, t, c, g, other or unknown
  misc_feature (163)..(163): "n" may be a, t, c, g, other or unknown
  misc_feature (217)..(217): "n" may be a, t, c, g, other or unknown
  misc_feature (242)..(242): "n" may be a, t, c, g, other or unknown
  misc_feature (305)..(305): "n" may be a, t, c, g, other or unknown
  misc_feature (336)..(336): "n" may be a, t, c, g, other or unknown
  misc_feature (367)..(367): "n" may be a, t, c, g, other or unknown
  misc_feature (467)..(467): "n" may be a, t, c, g, other or unknown
  misc_feature (479)..(479): "n" may be a, t, c, g, other or unknown
  misc_feature (490)..(490): "n" may be a, t, c, g, other or unknown
  misc_feature (517)..(517): "n" may be a, t, c, g, other or unknown
  misc_feature (519)..(519): "n" may be a, t, c, g, other or unknown
  misc_feature (523)..(523): "n" may be a, t, c, g, other or unknown
  misc_feature (537)..(537): "n" may be a, t, c, g, other or unknown
canatttgacagtttaatcagaaaaatggaatgatagaaatgaagcanactccccacctactgngctaactgggtatgcaacagtttaatgaaataccataagccttagttgganactgtgatggaacagcgtanaggccatccgtttccaggccattctganatccaagatgccaactccttgtttctatgaaacttcacgggatgtgccagtcanaaatggcatgctgaacattctgcanagctgcagcactggcctgggcagccagggctaccacactggtgacagtgctgctggtacctgngatggctcttctggtatccatatcttatacncaacacctatccgtaggaagaacttccgcanaactgctcggagctcagggatcaggtcaaactgcataatttcacacaagtaggggtagtacattgaagcatgtgctttgaactttcatcattaatttgangggtttagttanaagtaccaccngaaactttggccaggcctcccgaaggntnttanaattcccggggtgnaaaa

SEQ ID NO: 7513 - DNA, 540 bp, Homo sapiens
  misc_feature (27)..(27): "n" may be a, t, c, g, other or unknown
  misc_feature (34)..(34): "n" may be a, t, c, g, other or unknown
  misc_feature (108)..(108): "n" may be a, t, c, g, other or unknown
  misc_feature (173)..(173): "n" may be a, t, c, g, other or unknown
  misc_feature (197)..(197): "n" may be a, t, c, g, other or unknown
  misc_feature (201)..(201): "n" may be a, t, c, g, other or unknown
  misc_feature (334)..(334): "n" may be a, t, c, g, other or unknown
  misc_feature (475)..(475): "n" may be a, t, c, g, other or unknown
  misc_feature (486)..(486): "n" may be a, t, c, g, other or unknown
  misc_feature (519)..(519): "n" may be a, t, c, g, other or unknown
  misc_feature (523)..(523): "n" may be a, t, c, g, other or unknown
  misc_feature (530)..(530): "n" may be a, t, c, g, other or unknown
cacgtttccaattgagttttattctanaacaaanggttttacaacaaagctgatcttaaatagtacatttccccgctgataacagcgccatcttccttcgacccccanaccaagggatcaaagctactgctcaatcgagtttgacatcagctaccgacttttaaggaatctanaacaaagttctggagccaggccanaagnggtaaaagattcagttagccccttcctctgtgctgtgctgacagggagggagccagtgactggacaatctatgaccccaagtttgtggaacgtggggcttcagctgagggtggggtagtgtgatttcagcagngtctccacctccctgacccctgcgctgctttgctctgttgtcacctcccgcacagtgtcgggacactgaccggaagccaaacctgtgcctggtggccacagacaagacacacggatatccgtgaaccttgctgtggccctnccgaggccagngcccaactggtggacagccaagccggacaattntgtntgggccnaaattgttaa

SEQ ID NO: 7514 - DNA, 544 bp, Homo sapiens
  misc_feature (469)..(469): "n" may be a, t, c, g, other or unknown
  misc_feature (475)..(475): "n" may be a, t, c, g, other or unknown
  misc_feature (493)..(493): "n" may be a, t, c, g, other or unknown
  misc_feature (529)..(529): "n" may be a, t, c, g, other or unknown
  misc_feature (532)..(532): "n" may be a, t, c, g, other or unknown
  misc_feature (541)..(541): "n" may be a, t, c, g, other or unknown
  misc_feature (543)..(543): "n" may be a, t, c, g, other or unknown
gtaatcaagccatttggtgaaaatctgtaattcacaagtcaaataacacagaacagagacaactttcggagcccactgtggacatggtgggggccagcctgtgctgctaaacatagattttgctgatctgttggcttctcagtttatagcattcagccccctggctcctcagcagctccttctcttcggctgtgtctcgagctttcagctgcgagaagtgggcaggagaggcgatgagatcatattgttggtccagataccgcaggtagatgagcatgtgcagggcataggccaacaccagcagcaggatcagggacattgccaggccgatcagaaaagctggcgagaaggaggaggcgcagtcttgggctttggtaaatcgtccccccttgatggcaaaaccttggatctggaaatcaataaaagtgacctcccacaggctcgacccatcatccgtgtcgctgggcancaaganggcctggtcctgctgcangcttgcccacccgttgcaaccggtaggaagtaaccnganggagccttntnc

SEQ ID NO: 7515 - DNA, 557 bp, Homo sapiens
  misc_feature (177)..(177): "n" may be a, t, c, g, other or unknown
  misc_feature (463)..(463): "n" may be a, t, c, g, other or unknown
  misc_feature (502)..(502): "n" may be a, t, c, g, other or unknown
  misc_feature (521)..(521): "n" may be a, t, c, g, other or unknown
  misc_feature (523)..(523): "n" may be a, t, c, g, other or unknown
gctcctcgaatgacaatcagttttattgcatgagttatggtgtccaaatgagttaatttgcttttttcaccgtctgagtcaaaataggccacctgcaggcctcatgcaaaatgtagaaactggatagatgatttaagcctcaaaaacgcaagtgattttttggggtgcacgcagganagggcggatctggggtgtggtcagcagatgaccagccgtggccttgaaggcagtttccagtctctgcagctgcgggatgagggtgaagccccccatttgctctgctcagcctctctgttgagtatttaagaaatcctgattctccgtgttctgccagggaggatactgcagaagagtggactggtgtggccattatttcagcatcttcaccatgtacgggccttgtaatctgtacccgatctttctataataattcctggtgccgacccctgatatcacaagcganttttccagacccatggtcttctctagctattctttctgnttcctcattaacagcatgncnaatcctgagcttgaaattaataggatcccggctg

SEQ ID NO: 7516 - DNA, 565 bp, Homo sapiens
  misc_feature (381)..(381): "n" may be a, t, c, g, other or unknown
  misc_feature (417)..(417): "n" may be a, t, c, g, other or unknown
  misc_feature (432)..(432): "n" may be a, t, c, g, other or unknown
  misc_feature (456)..(456): "n" may be a, t, c, g, other or unknown
  misc_feature (462)..(462): "n" may be a, t, c, g, other or unknown
  misc_feature (487)..(487): "n" may be a, t, c, g, other or unknown
  misc_feature (529)..(529): "n" may be a, t, c, g, other or unknown
gtatggaataataatttaatgctcactgtggccctgactgaaagtcaagctcaggcacaattagggccatggctgggctcccaccaatgaggatacaggcaggcaaggaggttggatgtggtggtgtgggatacaggagaagggcaaagggagctcataaatagggcccagcctggctctgggttcaaaggtggaggttccaggatggcacaggctgtgagggctaggcagctgaggaggtagtactcgtattggcccccttctcccagtcctctacagacacgatggtggttttgcagaagaagcagtccttgttgttcatcaggtgctggttgatacaggctttgcaggacttgtggccacagggctggaacacagcanagatggggtggcatagcagatggggcaaaggtcctnctcactggtgggcanggaagcaactgcttgcctgggcanatgcanaggtcaagtgccccagcatctggtncacttgggccacttatcggcacttgatataatccccatactnttcagggaaaaaccctttccggcaagggcttgcaaa

SEQ ID NO: 7517 - DNA, 557 bp, Homo sapiens
  misc_feature (244)..(244): "n" may be a, t, c, g, other or unknown
  misc_feature (464)..(464): "n" may be a, t, c, g, other or unknown
  misc_feature (544)..(544): "n" may be a, t, c, g, other or unknown
  misc_feature (550)..(550): "n" may be a, t, c, g, other or unknown
  misc_feature (553)..(553): "n" may be a, t, c, g, other or unknown
  misc_feature (556)..(556): "n" may be a, t, c, g, other or unknown
gtcatttctttaatatagaattttatttctggttatagaaacaaatgctaagaggagaaacaaaacttccccatccacatacaacaatttaatagataaaagaacagttaaaataaatgaaaaacaaaaagtagaaattttaaactttgttatagctttaaaacattaacgtctgatacaattagaaatcacattcagatctcaaactcttaaaaaaaagtatggctccttaaaaaaatactgnatcccacttgaaatgaaaacacaggtcgcctgctgttgacatgggtggggctgtcccttcctctggtgtcgtgcgtgccccctcccggtgctggggtgcagccacacccccccgccgggcgcccaccttcactcctccagggtgagacacgcaaggtgacatgaccagaacttcacatccaatgctctagaactgacatctccacttcataggacactgntgctttttaaagcactgattatcaaacatgttgggaaaaatctttagacaggcgccctggtaaaaaaaaaatcccccccncccccnccnccnc

SEQ ID NO: 7518 - DNA, 546 bp, Homo sapiens
  misc_feature (72)..(72): "n" may be a, t, c, g, other or unknown
  misc_feature (75)..(75): "n" may be a, t, c, g, other or unknown
  misc_feature (78)..(78): "n" may be a, t, c, g, other or unknown
  misc_feature (110)..(110): "n" may be a, t, c, g, other or unknown
  misc_feature (145)..(145): "n" may be a, t, c, g, other or unknown
  misc_feature (257)..(257): "n" may be a, t, c, g, other or unknown
  misc_feature (266)..(266): "n" may be a, t, c, g, other or unknown
  misc_feature (297)..(297): "n" may be a, t, c, g, other or unknown
  misc_feature (305)..(305): "n" may be a, t, c, g, other or unknown
  misc_feature (336)..(336): "n" may be a, t, c, g, other or unknown
  misc_feature (416)..(416): "n" may be a, t, c, g, other or unknown
  misc_feature (430)..(430): "n" may be a, t, c, g, other or unknown
  misc_feature (462)..(462): "n" may be a, t, c, g, other or unknown
  misc_feature (493)..(493): "n" may be a, t, c, g, other or unknown
  misc_feature (502)..(502): "n" may be a, t, c, g, other or unknown
  misc_feature (515)..(515): "n" may be a, t, c, g, other or unknown
  misc_feature (519)..(519): "n" may be a, t, c, g, other or unknown
  misc_feature (524)..(524): "n" may be a, t, c, g, other or unknown
  misc_feature (539)..(539): "n" may be a, t, c, g, other or unknown
ctcgtgttgcaattttactgtaagtttgaaactgtcaatacaaaaagttacaaagaattgtttataaagaanaanaanaaaaaagcaaacccaaccaagctcaagcctanatccgtatttggattcagctcgtctcggggcgganccaggcgtcacggcctccggattaaagtatccccccggggagtgtgctctgtgaatctgggtggggagggcgctcggtgctgttcccagcaacccaccaccctcctcctagngcttgcaanaataggcagggaactcagctgactgcatcanaacctganaagctggaggctgaagccagacaccagcctntcaggacttggggacactatgagcccactcagccccacaggtctgaatctttggggaggggagggttccagtctggactntgcccttgaccatnagggcagggggatcacactggctatcgggatnatcttttagccagtttttccagccccagccntaaaatcangcccagcttttancacntgcgngggtttgaacttgangattttt

SEQ ID NO: 7519 - DNA, 557 bp, Homo sapiens; identical to SEQ ID NO: 6455
  misc_feature (1)..(557): "n" may be a, t, c, g, other or unknown

SEQ ID NO: 7520 - DNA, 557 bp, Homo sapiens
  misc_feature (432)..(432): "n" may be a, t, c, g, other or unknown
  misc_feature (469)..(469): "n" may be a, t, c, g, other or unknown
  misc_feature (488)..(488): "n" may be a, t, c, g, other or unknown
  misc_feature (526)..(526): "n" may be a, t, c, g, other or unknown
  misc_feature (538)..(538): "n" may be a, t, c, g, other or unknown
agcagtcaattacggcaccttgtgtttattggaaatattccacctacagaacattaagatgccagcaaccggcccggcgcggtggctcacacctataatcccagcactttgggaggccgaggtgggtggatcacgaggtcaggagatcgagaccatcctggctaacacggtcaaaccccatctctactaaaaatacaaagaattagccaggcgtggtagtgggtgcctgtagtcccagctactagggaggctgaggctggcctggaggttgcagtgagccaaggtcacgccacttcactccagcctgggcaacaagagtgaaactccgtctaaaacaaacaaaaaaaaagacttcacccaactaactgtgcttgtgtagaaagaggttgcatccctgttccagtcatggccatgaggaacagctatgagaanggccctaagcacagcatggtttgcagtaaggaggcanacccagggagaaagaagtnaacatcatcttctgggctttggttcaaaatcacaaggngtgggccttaancctgttgcttgccaagtct

SEQ ID NO: 7521 - DNA, 568 bp, Homo sapiens
  misc_feature (384)..(384): "n" may be a, t, c, g, other or unknown
  misc_feature (419)..(419): "n" may be a, t, c, g, other or unknown
  misc_feature (432)..(432): "n" may be a, t, c, g, other or unknown
  misc_feature (472)..(472): "n" may be a, t, c, g, other or unknown
  misc_feature (490)..(490): "n" may be a, t, c, g, other or unknown
  misc_feature (496)..(496): "n" may be a, t, c, g, other or unknown
  misc_feature (532)..(532): "n" may be a, t, c, g, other or unknown
  misc_feature (538)..(538): "n" may be a, t, c, g, other or unknown
  misc_feature (561)..(561): "n" may be a, t, c, g, other or unknown
  misc_feature (567)..(567): "n" may be a, t, c, g, other or unknown
cttgaacatcaaagatgtttgttattgcagccaggagacaatgccataaaatgctaacaaaaaaaagttatactgttttccttaaagtcagtaaattgcataaaagtactctgagcatttttggaagaaaggcaccagataagtccaaaatcttattgctactaggatcatacagggtcacagactatggcactctgttcagccaggagactaagtctcagcaagtcagtctctgaccttgaggcttaaagagcaaggaaggaaaatgtcaataaaacagagccctgtatcacagattaaactggagtgaaaatgatttccagttttatgtcaaagtagaagctggttcctaggacgctggcgctattttagatggcactctgntttctttggcccattcttcatgatccggatcatgnattctacttgggnggtacctgggcttctcaagtaaatggagcacttttcgaanggtctctttgggtctctnccactntgatcatctggaaaatgccccacaggcaccccgttngccttnccaaaatcagggttaggatccancctttna

SEQ ID NO: 7522 - DNA, 549 bp, Homo sapiens
  misc_feature (422)..(422): "n" may be a, t, c, g, other or unknown
  misc_feature (475)..(475): "n" may be a, t, c, g, other or unknown
  misc_feature (477)..(477): "n" may be a, t, c, g, other or unknown
  misc_feature (523)..(523): "n" may be a, t, c, g, other or unknown
  misc_feature (540)..(540): "n" may be a, t, c, g, other or unknown
aacatcagaattcacatttatttcaaaaactcggcatggactctcagttcaggctgctgtaacagaaagccgtagcctgaaaggcttaaacaacaaacatttatttcttacagttctggaagctgggaagtctcaaggtgccaacagtttcatttcctggtgagggctctcttccgggcctgcagacggctgtcttctcactgtgtcctcacatggtggagagagagatcatctctctggtgtctctccttataaagcactaatcccattcatcagggctccaccctcataacctaatcacctctccaagaccccacccccaataccatccctttggggattagggcttcaacgtgaattgggagcatatgaacattcaccccttagctgactccacccatgtcaactagataggacacacngtgaagtagtgaccacatcttacacgtttttagccactgctgatgtccgacangnctgggtttgggaccagtgtgtaccagcaagcatggctgtggggcanctgtacctctgaggaanaaatggtcc

SEQ ID NO: 7523 - DNA, 556 bp, Homo sapiens
  misc_feature (482)..(482): "n" may be a, t, c, g, other or unknown
  misc_feature (498)..(498): "n" may be a, t, c, g, other or unknown
  misc_feature (513)..(513): "n" may be a, t, c, g, other or unknown
  misc_feature (517)..(517): "n" may be a, t, c, g, other or unknown
gaatcgaaagtttcctttattaagttattttaccaagtgagcttgtatcaaggctgagctttcagcgcagtatttatgagctgcatttctttcaaaacattctatcaaactgacatttccttaaatcagactgaccttccacaatatggaataaatcaggtggtttaactctactgactaaagagtgttttccccaaccctgagccaggcggctttgtccgtgtcgctcagctgccggctcactgaagggtggtcatggaagagcaggccgccgtcgggcggtgactgattacaatcatttgttgtgatgcatcgcaaattaaagggacaagcccagccaagctgctccgctcaaagagtgcgcgtcccgctctgcaattactgatgtgcacaaaggacccagggaccacttaaaacaaggggaggactgagtccacgcagggatgaaccacaggccaagtccccacgtgcttgacagtggncccggaacccacctgnttcagacacctgttncgangggaatctttccatccacctggccgttggggttaaaacc

SEQ ID NO: 7524 - DNA, 510 bp, Homo sapiens
  misc_feature (424)..(424): "n" may be a, t, c, g, other or unknown
  misc_feature (429)..(429): "n" may be a, t, c, g, other or unknown
  misc_feature (438)..(438): "n" may be a, t, c, g, other or unknown
  misc_feature (472)..(472): "n" may be a, t, c, g, other or unknown
  misc_feature (494)..(494): "n" may be a, t, c, g, other or unknown
  misc_feature (508)..(508): "n" may be a, t, c, g, other or unknown
  misc_feature (510)..(510): "n" may be a, t, c, g, other or unknown
aagggccaagggtaaatgtaatatttatcattagcaccacatcccatggtcagccccacctgaataaacggcatattgggatttttccacaaactatgagcctaatgaaaaaggaaatggataagggaaacaagttcccagcctatgtcacatgagtttctgcactatgtgttatgtggtaaggtatgcattccctcaggacttcccaaatccattacatgctagggttttctctctggtatgcattctggtgtgatgtaccctaagagctgccttacggacaaaagttttcccacattcatcacattcatagggtttctcccctgtgtgaattctctggtgtactctgagagttgaattttgggcaaaagcttttccgcattcattacactcatagggtttctcccctgtgtgaatctctggngtgcnctaaggggngattcttgggaaaacgttttccacaatcattacnattcataggatttctcccctgngggaaatctttgangn

SEQ ID NO: 7525 - DNA, 549 bp, Homo sapiens
  misc_feature (474)..(474): "n" may be a, t, c, g, other or unknown
  misc_feature (480)..(480): "n" may be a, t, c, g, other or unknown
  misc_feature (498)..(498): "n" may be a, t, c, g, other or unknown
  misc_feature (521)..(521): "n" may be a, t, c, g, other or unknown
  misc_feature (523)..(523): "n" may be a, t, c, g, other or unknown
  misc_feature (546)..(546): "n" may be a, t, c, g, other or unknown
atttttacatcaagtgtgctttatttcctccacaggtattctgttaaataaagcaccatttatatactgccaggccacagctaaagaggattctttacagaatcaaatttcttgtggttgttccgtatacaagtaaacttaattttgataataagaaccacagcgatcggaggcaatctgcctctataaggtacaaaactggcacagaggacaccatatcatacacagtaaaaatgctgtaagtttaaattacattgtacagggctaggcaaccctgttcttcccagacagccatattaaatgaaagccactaaagtgaactcttaattacataaaacatatccattatctgattgccctttaggaagtatactgaagatgcaagtttttttcatctggagttctgcctgaccaagaattaagcctataaatctatcttgccattcaagcagagagcactggacaactgaagcncaaaancaaataagcaaacttatncaacagcatgggggttgggggtnanggacttaaaagtgacatgctccncta

SEQ ID NO: 7526 - DNA, 557 bp, Homo sapiens
  misc_feature (510)..(510): "n" may be a, t, c, g, other or unknown
  misc_feature (545)..(545): "n" may be a, t, c, g, other or unknown
  misc_feature (550)..(550): "n" may be a, t, c, g, other or unknown
gcaggtgagaaatggtctggttttattgagaagctgttggtcatttgatggaaagacacatacggtacaaaattacaggtggtttagttcattacatgatacaaatcattagagtctttacaagtcattagagtctttggattttttaaactcccatttactgtgtaccaaatcaatataatcacagaatcaaagtcacttctttatatgtgaactcttcgcatttacacgaatccacacatagagaagctgttccaagaccccccaacaccattagtgtctgcagcccaccaggaaggcaccatggactttgtggagagaaagatgctttgggggttcaatgggtcagtatcttgggcaggaagcacagggtgactcccgtcttgtgtgcgtgcgcacagccaccaacacacactctcaggactttcccgtttcacatacagggaacttttaaggcaagaggagaaaatgctaggaagtaaccgggggatcagaactcctccacctttnaggttccaccagtcacatttcccagttccgtcttntggtngaacctg

SEQ ID NO: 7527 - DNA, 567 bp, Homo sapiens
  misc_feature (546)..(546): "n" may be a, t, c, g, other or unknown
  misc_feature (554)..(554): "n" may be a, t, c, g, other or unknown
aaaaatagagacggggtcttggcatgttgccgaggctggtctcagactcctgggctcaagcgatcctcccacctcggcctcccaaagtgctgggattacaggcgtgagcccccgcgcccggcccagcacccggttctcgaccacagccgcacctcggagctctgagcatttcctcctctgcaagactgaaatacttctattcagtcttgaatagaacagttaagagtagcatgcaggtcacagggctctcccaggagggaaggaggtcgcagtccaaaagaaggggaggtggtcactgctgtccgcctcccacaggggcttggagagaagtccaaaggctcaagagagtagatggctatggaacacaggccctgggcgtactgtcgcccgggcagccacagtgggccaccaggagcgggaccggcgcgccctctagtggcggaagcaacccctgcagccaagggtcccgcatcctggaagcaactgaggcacagagagactgcgacgcccccccaggcccacctggttccgaagcgatagaagccnggatttgnatttgcccgtctg

SEQ ID NO: 7528 - DNA, 563 bp, Homo sapiens
ctgaaaaaaatttattgatggatctgagaattttttcacacatgaatcatttctccttccaatggttattgatactgatagaagttccccgctgagactccctggacccatggtttgtgcctgctgggcatcccactatgctgattcctactctaaaagacacttacagcagaaagcattcacccatgaccattatgaaggaaatattctgtccctcactcaccctctggaagctaatatggagcagcagtcactctatccagagccacatgttcacagttctctagcaagcaggtcacaccccgtgggtcccctattccccgtgacccttgttgatccatcctcttcctgctcagttgctcccctgctcacctggactgcgggaggcatgggtgcgcccactgaggccatgctgaggagctgggatggaatgcaggacagggagagaggggagactgagctgagagggagcactggatcctgggaggtgtggatgcctgattacagtccaaagacattggcagcaacaaaggacccacaatggctggaaacattacgttcct

SEQ ID NO: 7529 - DNA, 566 bp, Homo sapiens
  misc_feature (383)..(383): "n" may be a, t, c, g, other or unknown
  misc_feature (516)..(516): "n" may be a, t, c, g, other or unknown
  misc_feature (544)..(544): "n" may be a, t, c, g, other or unknown
catcatgggaatattttattgggtataagtgttttaggtaattgataactgatttttctactgtttttaagtgattacttcaaatgtgatttgaagcattgtttggcctgaagctttaagaccagtttcttaagcttttccctgagtttcagcagcttacggtttcagtgaataagcagagcgcctggttttgaaatgtctgttgtttgtttgaaaatctgaatgtgtctttcaaaggctgctgtgatttctttggataaaatcagatttcgtatcccttagagagcttccactcctgcttcacctttccaaaaactagacctaaggtagaagccacctcgacagctcaaagccagagttagaacagtcatactgaatagatncaatagtttatctggtgcgtatttggagaaaggcatgacaatcaatacgaggcagcgcagctcggagtcacaggcccgactcggtttgaggctccgcggaccataattagctatcacatcaaacaggttctgnagcccctcttggcttttttcataaaccnggaccataaccggccctccttt

SEQ ID NO: 7530 - DNA, 559 bp, Homo sapiens; identical to SEQ ID NO: 5807
  misc_feature (1)..(559): "n" may be a, t, c, g, other or unknown

SEQ ID NO: 7531 - DNA, 569 bp, Homo sapiens
  misc_feature (76)..(76): "n" may be a, t, c, g, other or unknown
  misc_feature (174)..(174): "n" may be a, t, c, g, other or unknown
  misc_feature (234)..(234): "n" may be a, t, c, g, other or unknown
  misc_feature (295)..(295): "n" may be a, t, c, g, other or unknown
  misc_feature (448)..(448): "n" may be a, t, c, g, other or unknown
  misc_feature (450)..(450): "n" may be a, t, c, g, other or unknown
  misc_feature (469)..(469): "n" may be a, t, c, g, other or unknown
  misc_feature (514)..(514): "n" may be a, t, c, g, other or unknown
  misc_feature (547)..(547): "n" may be a, t, c, g, other or unknown
  misc_feature (565)..(565): "n" may be a, t, c, g, other or unknown
cactcagaccaacagggagccaggccctgcaggggctttattttgacaccactttgtttcaatacaaacagtccanaaagaaagtcaagtccctctgggggaggggcaaggggaagagtggtctgtgttgcttgggagcccaacctacaacccaaaggtgggggctgggctganactgccggtgcggcaggggaagatggcaccaagaatgacagtgcttggctcagctgccanagggtgaggcccacagctctcactggcgggtgctatccaggccaagcccagaatgatgcanaggaaggagctcagccccaggagcctgcctctgcctctcacatcctctgcttccctggccagcatcaagctcacagcatccagagtcgaatcacagcagacaagacccttcatggccaccaacccggggaagaagggataaagaatgtcccananggtcctggattcacagcanatggtccaaaggacccttgaaacacccttgaacaattttccaagngcttactggaaaaaggggtggtgaaaacggganaacccaagggtttccggnttaa

SEQ ID NO: 7532 - DNA, 573 bp, Homo sapiens
  misc_feature (414)..(414): "n" may be a, t, c, g, other or unknown
agagacataggttctactttatttacatctttggtcaaacagtgggcattccaactcatgtacaaaaagttggcttttatccattcctaagtttggaatgaaaataattccttgaatatcaactaatagcaaaatgtgtaaatacacggagtaaaatacaattctccttgtacaagtgacatgaagtctacattaccagttcggtattttccatttttgaaaggagaactgatagaagaggctgggatgattggaagtggccacaggaaatctttgtggagtctcttcagggctattacaaagttgtctacccgggcggctcgggtaccgttccttgcatagccaactaattagttcaaagcccagctgggctgcaaagcagccaaggtcctttaacctcacatcttctaagangcgccgagcatgtctccagagcatcatgtcaatatacatggtctcagcacagtcactggcttttgctccatctttttccaaagggaccagatggcatacttagggtttctggaaaccgaattactggcaggacattttagctgactgggataactgagc

SEQ ID NO: 7533 - DNA, 499 bp, Homo sapiens
  misc_feature (422)..(422): "n" may be a, t, c, g, other or unknown
  misc_feature (449)..(449): "n" may be a, t, c, g, other or unknown
  misc_feature (459)..(459): "n" may be a, t, c, g, other or unknown
  misc_feature (463)..(463): "n" may be a, t, c, g, other or unknown
  misc_feature (477)..(477): "n" may be a, t, c, g, other or unknown
  misc_feature (485)..(485): "n" may be a, t, c, g, other or unknown
  misc_feature (489)..(489): "n" may be a, t, c, g, other or unknown
atgtttaagctgtatatttactcatcgaaacactcggtgaaatcagggtaaaatcaactaaaggaaaaatatttgtttcattcatttgaacttaaaccaactaaagtagtactcatgtcattacgatgcagcaaatacaagacctctttctacaaagattagcacaaccaacaaattaggggatatagcaaaacagagccaaaaacggtaagaaatcaattaagtatgttacagcttaaccctttacctcaatagttttaaaaaaataagcaaagcctcccaatcccaaacaatacgaatacatcttcatcaccaattcgtacttgtatttcttattcttgaggttagattctaaaccctaaagatatccaaactagtattagatctacttatctatagccagagacggcttctatcaatgntgccttagcagccaagggtattaaaangcttttctangcanggcgccggtggctnacgcctgnaatnccaactggta

SEQ ID NO: 7534 - DNA, 518 bp, Homo sapiens
  misc_feature (245)..(245): "n" may be a, t, c, g, other or unknown
  misc_feature (440)..(440): "n" may be a, t, c, g, other or unknown
  misc_feature (453)..(453): "n" may be a, t, c, g, other or unknown
  misc_feature (463)..(463): "n" may be a, t, c, g, other or unknown
  misc_feature (478)..(478): "n" may be a, t, c, g, other or unknown
  misc_feature (490)..(490): "n" may be a, t, c, g, other or unknown
  misc_feature (505)..(505): "n" may be a, t, c, g, other or unknown
  misc_feature (516)..(516): "n" may be a, t, c, g, other or unknown
cgaatgcgcagtgatgctttaatccccctgtttgcaaacgagctctgtggaagctcagcaggaaggatggaaagatggggaggaagaccctggcgggtggaagtgtggccagggacacaaggctgcccttatgggactgaaagagaaagctgctgggctctgtgtgactggaaaccagggaaggagacctggctgaggcaggaactgggtttgccagcagtgcggaggggcagcgggtggctcanaagtgggagcaggtacacagaaggagctcagggcatgcctggggcatctccaaagctctgctgagagtgaaggccaggagcctgttttccttccccagaagtgtgctcatgggaaatggggcagggggcaagctgcttggggatggaaagtaagcttacctttgatattaaactcattctttgacttgcttgcangccaaaaagcccnttttggagcnttaaccttttagccnttggaagggttnaacttgggcttccanaaacccccaancc

SEQ ID NO: 7535 - DNA, 536 bp, Homo sapiens
  misc_feature (370)..(370): "n" may be a, t, c, g, other or unknown
  misc_feature (392)..(392): "n" may be a, t, c, g, other or unknown
  misc_feature (489)..(489): "n" may be a, t, c, g, other or unknown
  misc_feature (526)..(526): "n" may be a, t, c, g, other or unknown
aaatgacccaagatataattctgattgtggtctggatcataaacccgcatcacattttaaatgtctattgtcttggagacaataagctgttttatgggggaatgggtgggtggaaaaatgggagcagggcttctgaagctgactaatacctgaagaatacggcaacgtgagaaggcactgacccggctgctttggtaaatggaagaaaatcatctcagggttgctaggaacatgggtaagaccagactgtagaaagatccttcaaaacaaaacagtttgccattcctttaacaattactaacgtcaagaacttggaattgtgccacggaagacagagcttaagatggggtggagcccttacctccactgntcccctgggcctaaagcctggnttccttatggggtgttggggccacacaaacaagtctctggtttcaacacagtgacagtggggaatgggtcatgtcccaaatgattttggaacaaggncagggtcctatgaccttgctggcatgaatggtgaagnccataaggga

SEQ ID NO: 7536 - DNA, 531 bp, Homo sapiens
  misc_feature (21)..(21): "n" may be a, t, c, g, other or unknown
  misc_feature (50)..(50): "n" may be a, t, c, g, other or unknown
  misc_feature (124)..(124): "n" may be a, t, c, g, other or unknown
  misc_feature (149)..(149): "n" may be a, t, c, g, other or unknown
  misc_feature (279)..(279): "n" may be a, t, c, g, other or unknown
  misc_feature (437)..(437): "n" may be a, t, c, g, other or unknown
  misc_feature (472)..(472): "n" may be a, t, c, g, other or unknown
  misc_feature (474)..(474): "n" may be a, t, c, g, other or unknown
  misc_feature (503)..(503): "n" may be a, t, c, g, other or unknown
  misc_feature (507)..(508): "n" may be a, t, c, g, other or unknown
cttttggctattatgaatagngctatgaatatgcatacataagcttttgngtggatgtatgttttcattctctcacatatgtatacctagaagtgggattgctgggtcatagggtaactcaagngtttaactttgtgagggcttgccanactgctgtaacatttcacagtcccaccagtggcgttttgagaattctaatttctctctttgccagcacttgttattatgcctttttgactctagtgctatcctggtagatgtgaaattatgtctcattgnggttctgatttgtatttccctaatgactaattccctaagcatcttttcatatgcttattggccattttatatctttttttgagaaatgtgtattcagacctaaaaactgttttaaaaagcaatgcattttaaattaaatgtggagataacctatgttnattgctggatatttacatctctttccaactcaaangngaccatggtgactacatcctggcctgganagcnnatgaaagctcctgggtaaaaggc

SEQ ID NO: 7537 - DNA, 536 bp, Homo sapiens
  misc_feature (462)..(462): "n" may be a, t, c, g, other or unknown
  misc_feature (467)..(467): "n" may be a, t, c, g, other or unknown
  misc_feature (473)..(473): "n" may be a, t, c, g, other or unknown
  misc_feature (489)..(489): "n" may be a, t, c, g, other or unknown
  misc_feature (495)..(495): "n" may be a, t, c, g, other or unknown
  misc_feature (531)..(531): "n" may be a, t, c, g, other or unknown
  misc_feature (535)..(535): "n" may be a, t, c, g, other or unknown
gcttttcaaaatgaatgctttattttgaattttaaaaatacatacatcttacactgtaatcaaaacaaagcttaagaaagtcaattcccgcttcctttagccctgacttacactgggtacccgtttctgtggccgccgggggtgacgggcctttgcaggggctcatccccgctccactgcacattagccagccccttccgccttgtcttccccgtgttggtcatgatccccaggtactctgtggtcagaagcttctctcctgagagttctccaagctggggctggatcagttcgtctttgtccagatcggcttccatgatgtcatggtcctcttcatcatcttcatcttcatcatcatcagattcaagaacaccatctggtagctcttcggaatttagctgcttgatgatgaattctatctggcggatcatttcagcattggcttcttttggatgaaagcancgtangaaggncttccattcccattgntcttgntttcctaccgaatggatgggaccagaaaggatctgnccana

SEQ ID NO: 7538 - DNA, 529 bp, Homo sapiens
  misc_feature (454)..(454): "n" may be a, t, c, g, other or unknown
  misc_feature (459)..(459): "n" may be a, t, c, g, other or unknown
  misc_feature (482)..(482): "n" may be a, t, c, g, other or unknown
  misc_feature (516)..(516): "n" may be a, t, c, g, other or unknown
ggagacagggtcactctctgttgcccaggttagagtgcagtggcgcgatcacagctcactgtagccttgaactcctgggctcaagcaattcttctgcctcagcttcacaagcatgtaccaccatgcctggctaatttttaaaattttttctagagacagcgtttcactatgttgcacaggctagtcttgaactcctgggctcaagtgatccttcagccttggcctcctaaagcactgggactacaggcatgagcactatgcctgccccctactgccccttttttaaagtacctgggagaacaaagtttaaatattctatttttgtagcacctaattaacatacaatttaagacactttcaaaattttacattattgaaaataagtaggttgaagacttttacttacgatcactttgctggtatgctgcatggttttgaaataataaaactttantttgnaaaccaacactcacttaaaactnttactaattatatgaatcaaactggctcttggtnaaaatcccccggg

SEQ ID NO: 7539 - DNA, 520 bp, Homo sapiens
  misc_feature (176)..(176): "n" may be a, t, c, g, other or unknown
  misc_feature (454)..(454): "n" may be a, t, c, g, other or unknown
  misc_feature (456)..(456): "n" may be a, t, c, g, other or unknown
  misc_feature (459)..(459): "n" may be a, t, c, g, other or unknown
  misc_feature (467)..(467): "n" may be a, t, c, g, other or unknown
  misc_feature (497)..(497): "n" may be a, t, c, g, other or unknown
  misc_feature (509)..(509): "n" may be a, t, c, g, other or unknown
  misc_feature (514)..(514): "n" may be a, t, c, g, other or unknown
ccagtccccaaagaaaaccacattttatttctccatcatccactttcaacatacatccatatgtgcacatatttttacatggctggaataatagtaaatcttctatttgatgcccctttttgccatattataaacattttcaacatggcaataaaacctttataatggttcacagnggctgaattagaagcatcctaaatgaacaaccatggaggtagtggtggggtgataacataaacataacaactcagtatttttgcttcaacaactaaagcaacaaaccacatctgttagaagcagccctttccatcttagcacaagcttgtttcagtctttttttttgaaatggagtctcgctctgtcacccaggctggagtgcagtggtgcgatcttagctcactgcaacctccaccttccaggttcaaggcaattctcctgcctcagctttccaagnanctnggattacnggccccacttctatgcccagataatttccnggattttggganaaaanggggtt

SEQ ID NO: 7540 - DNA, 528 bp, Homo sapiens
  misc_feature (456)..(456): "n" may be a, t, c, g, other or unknown
  misc_feature (466)..(466): "n" may be a, t, c, g, other or unknown
  misc_feature (476)..(476): "n" may be a, t, c, g, other or unknown
  misc_feature (491)..(491): "n" may be a, t, c, g, other or unknown
  misc_feature (524)..(524): "n" may be a, t, c, g, other or unknown
acataagttttacaagataatacatttttacagtgacctgatgtggatacaactttgcaacttggcaaaaagcaaatcttaacttacattataattaatttgctgcattttacacatctctgattctcaattttggcaagtacaacaggttaagggttctatttagtgtccccttctgatgaatatgatgatcttgaacccattcttcctcctcaagcacggtcatcctcctctgatggcaacagcagaacctctgggaaaggaacctttcggtatccagaactcccaggtggcagcccagtgtgggatttggagcatgacaacaaaggcattttctcaacatttactaaaggagagtggggtgttctatacgctactgatggggactgtcatgaacacatttaaattgaattacaacaacattttagataggaaatatagaatcttataagaacntaatctaaantattacccanttttaatagcaaagnttaaccataaagctacttaagtgttggaattanaaaa

SEQ ID NO: 7541 - DNA, 528 bp, Homo sapiens
  misc_feature (422)..(422): "n" may be a, t, c, g, other or unknown
  misc_feature (458)..(458): "n" may be a, t, c, g, other or unknown
  misc_feature (479)..(479): "n" may be a, t, c, g, other or unknown
  misc_feature (508)..(508): "n" may be a, t, c, g, other or unknown
  misc_feature (513)..(513): "n" may be a, t, c, g, other or unknown
  misc_feature (522)..(523): "n" may be a, t, c, g, other or unknown
  misc_feature (528)..(528): "n" may be a, t, c, g, other or unknown
gggcttggggggtttattaagtgatgctttagtctcagtctctgccagcaactgggagtggggtgactccactcaccccaggatttcccagacttgctattttagaggagagaggcaggaagccaactatcctctaagccacagcttgggaagctaggctagtactggggtgggggcagcagagctgagaccctccaccccgagcccctagcctgtgctatcctcccagcctgagggggaggagctgaggcaatcctggctgcagcctcccacacacagccctgctcttggtgcgccattcactgccctgagctattcatgatctctgctcccagatattcacctcaacactccaaaagccagccccttcaggtcttcagtcctgcggaaggcaaaaggagggacgggggcctctgactgancaacttcaaggggcctctctttctgctgcccactgnatgccggcccttggctttaanccttccttaaataggaaaggggggttggnggccntaaactggnnccccn

SEQ ID NO: 7542 - DNA, 563 bp, Homo sapiens
  misc_feature (408)..(408): "n" may be a, t, c, g, other or unknown
  misc_feature (500)..(500): "n" may be a, t, c, g, other or unknown
  misc_feature (525)..(525): "n" may be a, t, c, g, other or unknown
  misc_feature (545)..(545): "n" may be a, t, c, g, other or unknown
  misc_feature (551)..(551): "n" may be a, t, c, g, other or unknown
  misc_feature (562)..(562): "n" may be a, t, c, g, other or unknown
ctcaactctttttattaagttagaaaactgataaaagcaacacaacttttggggaaagcaccatggcacgtcctttgtgctacgtgataagtgtgctttatctcaatgaagcaaccccacgggtccaggcaccctccctgcagtccccgcggccaggctcctgagtgtgccagcagagccgtcccctgggaccacagccaagtgccttcgggcagctggcctgacacaggcggggtctgctgggtctacagggtccaaggagccccatgcagccagtgccccatggcgggcgtgtcagtgggcaaaccctgcccaaaggtcccacccccaagaggcctccaggacccgcaccaaggcatgggggacactcgtggctgcttaagtaactggtatgtgcacagccccctncggggccctaatcttgagccagccaagcagtgttcacactgcaagtgcctgggaagccccaagtttggacccctggccaatccttgtcaggnaccaaaacccttccttttaaaaggnggctttggaatgaaccaaangctttngatggccttgnc

SEQ ID NO: 7543 - DNA, 561 bp, Homo sapiens
  misc_feature (442)..(442): "n" may be a, t, c, g, other or unknown
  misc_feature (454)..(454): "n" may be a, t, c, g, other or unknown
  misc_feature (510)..(510): "n" may be a, t, c, g, other or unknown
  misc_feature (517)..(517): "n" may be a, t, c, g, other or unknown
  misc_feature (532)..(533): "n" may be a, t, c, g, other or unknown
  misc_feature (545)..(545): "n" may be a, t, c, g, other or unknown
  misc_feature (550)..(550): "n" may be a, t, c, g, other or unknown
  misc_feature (556)..(556): "n" may be a, t, c, g, other or unknown
aggtacacacagtaaagtttattttggtgcatggtatacttcactccattaaaaataaattaatcagcaaattcctgcctggctcagctctggtttatgtaaatagtgcccagctgtaatgagttacaaggtgttattatctcacacacacacaggaggcttcactctagagctccgctcgcaacaaaagcatcttaaataaactgagagaagcggtttgatttgtaatgttttcacagaagtgggatatacctcacccatatagagtttctttatatgactcattttatagcaagttaaatgaaggaagtttgatgggggagggaggggcaatatggttccccaccccctttcttcactttaagaaaatcccccaagagatgacccgcactgagggaggaggggctggtcctcaggtgctcagaccaaggtggctctgcancacgtgcttcanaagttgggaagggggaccaaagctgggcacaggtctggggctggtacactaacccngaagaanggtctcttctccccnnatctcatgaaanggganggccanaccgg

SEQ ID NO: 7544 - DNA, 557 bp, Homo sapiens
  misc_feature (464)..(464): "n" may be a, t, c, g, other or unknown
  misc_feature (483)..(483): "n" may be a, t, c, g, other or unknown
  misc_feature (497)..(497): "n" may be a, t, c, g, other or unknown
  misc_feature (513)..(513): "n" may be a, t, c, g, other or unknown
  misc_feature (537)..(537): "n" may be a, t, c, g, other or unknown
  misc_feature (542)..(542): "n" may be a, t, c, g, other or unknown
accaaaatgccttttatttacatacgagaaaatctcaccgtgtgtccagctggccccgtcacggccgctgaaggcagcactgctgggcaaggagaaacaaggccacacctgcaaactgggctgcagggtgaggtggctccctccgcacaggccccaggacacccaccatggcacaggccaggctgctgcccccacacggcctccacgaggtcacgggtccatctccacaaccccaaggcagtaagcagtgtgcctcgctttcgccaagctgggccaatgaagaggccccgcccccaccctcaggccccgccctctccccttggaaaacaggtggttttttcctaacacaggaaaacagaaaatgagcacgctttctatggctgccaaagtacaaggagaggctctgccctgggagccactgcatggatggtgggcaaggtccgggagccagcttcaaggagcangaagcagggggccatgacngcaggacagcccanccctaacccccggaanaaaaaatgcctggacattcaagtnccggngctttttccggttaa

SEQ ID NO: 7545 - DNA, 570 bp, Homo sapiens
  misc_feature (422)..(422): "n" may be a, t, c, g, other or unknown
  misc_feature (479)..(479): "n" may be a, t, c, g, other or unknown
  misc_feature (489)..(489): "n" may be a, t, c, g, other or unknown
  misc_feature (500)..(500): "n" may be a, t, c, g, other or unknown
  misc_feature (512)..(512): "n" may be a, t, c, g, other or unknown
  misc_feature (515)..(515): "n" may be a, t, c, g, other or unknown
  misc_feature (568)..(568): "n" may be a, t, c, g, other or unknown
ggaaaccttgaaacaatttattgaattgctttatacaagattaacaatctccacaccacccctaacaccaacatagtcgctgcacaaaagccacagcccctctcacacctaagaaacggtcacgcccggtaagtgctcagagactttcgctgcgccagggaaacccctgcagcccccagaccccgaggctgctctgccccaccctctgctgcggcctcgcctgtaggtctgccttgccatggctgttcagtcattcgctctttcattaccacaaataaagcataaacaaggaaaagaaatctcaaactccccatcaaagaaacgtttccctgaggcaagaggcatcactagattcctaaaaatgagggtattctgctccagctgcacgcgcaatggtacatggggaggagggagcaccaaangggaaaggaaggagggcctgggaccccgggtggtttatgggcagaaaagccttgganaagtccctgnttaagcctcantggccgggcttntgnttggcttttaacttaacaatccaaatctcttctttggctcttttgcaataccnaa

SEQ ID NO: 7546 - DNA, 545 bp, Homo sapiens
  misc_feature (448)..(448): "n" may be a, t, c, g, other or unknown
  misc_feature (508)..(508): "n" may be a, t, c, g, other or unknown
  misc_feature (512)..(512): "n" may be a, t, c, g, other or unknown
  misc_feature (521)..(521): "n" may be a, t, c, g, other or unknown
  misc_feature (526)..(526): "n" may be a, t, c, g, other or unknown
gaagagcagaagtatttattcatcattaattcaacactgatttattgaacactttagctaggtggtgttcaaggtccagaggcatgggggtaaccccaatggacaaaggttcctgctctcatggaacttgcatcctgaaggggagaagatgatgataagaactcaacaagctctaggagagcaaggatttctgtctcttctgttaactttggtattcccagcatctactagctgttcaataaatagttgttgaattaaacaaaaaaggtaacttcagctagtgataagtgctataaacaatacagtaataagtagagagcattggaggaagagggcagatatgttattacagatcaaggagttagaaagggcttctctaaagagatgccattagaacttcaacttaataactaaagtcagccctgcaaagatctgaataaatactttncagaaagagaaaccaccaaggctcttgctgagcaggaatgggttgcattcaaccaatggnctgnctggacaancccanggcccataaagggtcaggt

SEQ ID NO: 7547 - DNA, 548 bp, Homo sapiens
  misc_feature (528)..(528): "n" may be a, t, c, g, other or unknown
  misc_feature (537)..(537): "n" may be a, t, c, g, other or unknown
  misc_feature (548)..(548): "n" may be a, t, c, g, other or unknown
agaaacagtctcactcggtcacccaggctggaggccatgtcacgatcacagcttactgtaacctcaaactcctagactcaagcaatcctcctgcctcagcctcccaagtagctaggactacaagcatgtgccaccacacttgtttcatttttaaattttttgtagcaatgggggtctcgctatgttgcccaggctggtcctgaactcctggcctcaaggaggcactagattgaatgacaacagctacagcatttcttactgaacttaaccctgtgtgacccttgaaataataaaacccactgatcaaaatagatgctataatctttaccacaaatgaataattaaccctgtgctcaaactgctacaaaaatatgagattcaaatgttggagccaatgaagtttgtataaaggagagtttctgccagtgggatgtggcagtgccacccttcttatatcttggctgtcaagtcttttggcttggtcccgcaacttcattggtgccaatgctgaaagatgaactttgtcanggccattgnttaacccaaan

SEQ ID NO: 7548 - DNA, 549 bp, Homo sapiens
  misc_feature (460)..(460): "n" may be a, t, c, g, other or unknown
  misc_feature (483)..(483): "n" may be a, t, c, g, other or unknown
  misc_feature (512)..(512): "n" may be a, t, c, g, other or unknown
  misc_feature (546)..(547): "n" may be a, t, c, g, other or unknown
aattaattagaaagtaggctgggcacggtggctcatgcctataatcccagcacttggggaggccgaggatctcctctctggtggatcacttgagggcaggagttaagagaccatcctggccaacatgatgaaaccctgtctctactaaaaatacaaaaagtaggagaatcacttgaacctaggaagcagaggttgcagtgggccaagatcacaccactatactctagcctgggcgacagaggtggggaaaaaagtaggacccctgtcctatattcaggtttttctcacatatatgaacccatctaaattctacgttgttaaaggtagcttaggttaattagtctatacttatttaagaccaatatggggtgagatggatttttttttaaaaatcctacagtaaggctttctactttccttctaatgaggaaaaaggtgacaaaaattcaagtgtcaatgncccctttctgggaaaagggttanaaaaaccattgcttacctttgactttacnagttcctttgaagttaccaagcctttaaatccgnngg

SEQ ID NO: 7549 - DNA, 553 bp, Homo sapiens
  misc_feature (509)..(509): "n" may be a, t, c, g, other or unknown
ctttttttgaagaaaaaatgcttttattaatcacaacatgaaattaacatgacatcgtattagaattaaaccaggataaatactgctgttataaaatttacatttctcacatccattccagaggaaaatcttacatattagggctcatcttaatgttatggactgatttcagtaaaactttttaaatagtaaatagcaattaacgtattctcaaactgtgctaagtagttagaaaggcaactataaaatctataatgataacacgtggcaggattagaactgttctgttaaacattaagaaccacatctctgttttagatgttacctcagtgcacctttttcactggtaaggcaactgcttgctgtgggtgccacaatgattaccaagtttcttcttaagtaaaagacacttgtttgatcaagactcaagtgagttttctttcccaatttggtcttttgaacagaaggaatccctgggccttgatatatataaggagcaatatgaaatncactgtataactctaaatcccaaggccatgaatattcatttctt

SEQ ID NO: 7550 - DNA, 560 bp, Homo sapiens
  misc_feature (483)..(483): "n" may be a, t, c, g, other or unknown
  misc_feature (489)..(489): "n" may be a, t, c, g, other or unknown
  misc_feature (505)..(505): "n" may be a, t, c, g, other or unknown
  misc_feature (521)..(521): "n" may be a, t, c, g, other or unknown
  misc_feature (533)..(533): "n" may be a, t, c, g, other or unknown
  misc_feature (545)..(545): "n" may be a, t, c, g, other or unknown
  misc_feature (560)..(560): "n" may be a, t, c, g, other or unknown
cctgctgatacttcttttatttctgttgtaaaacagagtaggggttaaataaagggtattgggtttgtcagctccagcctcttgggactctttttcctggagagagtggagagaacagtgggaggcaaagacacatagttggggaagggttcttttaatatgcagatgcttcagggagaaccaaactatttcactggtaatctcccgtcccactggaactggtgcttggatcggaagggaagtgagatcagtcaattagttaccaacactgccatcagcattgccagagaggtggagggcagacatcatggaatcagacagctccctggggattttatctgcacatttctgtaaattcttactcttcagggaggatgctagagcctgccctgttgtaagggggtccatctccatgaatcctcttgcaatactgggcaacagtccactgggcacacattccaccttactggttttttttaaggnggtggnctacattgagtttaanccacccattgatgacnattcggattggngcaataaccagnggaactccatttttn

SEQ ID NO: 7551 - DNA, 549 bp, Homo sapiens
  misc_feature (402)..(402): "n" may be a, t, c, g, other or unknown
  misc_feature (492)..(492): "n" may be a, t, c, g, other or unknown
  misc_feature (497)..(497): "n" may be a, t, c, g, other or unknown
  misc_feature (506)..(506): "n" may be a, t, c, g, other or unknown
  misc_feature (509)..(509): "n" may be a, t, c, g, other or unknown
  misc_feature (511)..(511): "n" may be a, t, c, g, other or unknown
  misc_feature (543)..(543): "n" may be a, t, c, g, other or unknown
atgagcaccctctaaggaagcagtctttatttgcatttttagagtggacacatatatgaaaaacactgcaacaggttgacacaatgctcagtccctttttaagtgaattcctggggagaaagtcaaggaccttagggagcagagcagtggaatgcaaacacagaaattacctatgagtcacttttgtgagccaatgacacggcctcactgcagccattccaagaagtatctttgctcacggtaaatgcaaagtaaacaaaataccacactgcatatttgaaacaaacaaatgtgacgttgcctatactggcctcatgtgcagaaggaattttggtcagacaatgacaaaaaaaaaaaaacaaaacagattgtgaaatggaattaaaagcacaattctttggnatctgggaacgtttcactggcaacactactgtatgatacagacgttcctggaacagtagttatggttctcttcctatccccaaagaagcnccatngaagaaatnggncncaaatggaaggaagggggttgttaccaggttnttcagg

SEQ ID NO: 7552 - DNA, 550 bp, Homo sapiens
  misc_feature (492)..(492): "n" may be a, t, c, g, other or unknown
  misc_feature (496)..(496): "n" may be a, t, c, g, other or unknown
  misc_feature (543)..(543): "n" may be a, t, c, g, other or unknown
  misc_feature (545)..(545): "n" may be a, t, c, g, other or unknown
aagagaagtaaaaaaatttattgcagtattcgctccaccagattacctggggatcccttttcttgtattgttttcagggtgacctaatacatcaaaatctacatttacaaaaactccttctgcagataggtcatagatactgcatgcttttttttttttcaacagaataaattatatatccaggagattctgccattttacagcctggaaaaaacaatgcttccctggaaactgggctaagctaaagaaagccatccgatgctaggttaaactccaagaacactttattaagaacattaacagactaatttccaacattcacttgtttattttttttaaacagaaagtttttttccaagatataaacaatttttgttaaactataatacaatgggagtaaaaatgaactgagaatctgtttctgctgcacaacagcgaagggagctcccacaaaaatgtttgcccaacatttccttcttttggtcctgcatnccangttcacttactcttcataaactggatttttttggccaaaaggttggnanttcaa

SEQ ID NO: 7553 - DNA, 551 bp, Homo sapiens
  misc_feature (481)..(481): "n" may be a, t, c, g, other or unknown
  misc_feature (521)..(521): "n" may be a, t, c, g, other or unknown
  misc_feature (534)..(534): "n" may be a, t, c, g, other or unknown
  misc_feature (545)..(545): "n" may be a, t, c, g, other or unknown
agccgaattaagttcttttaatagattgcatatatagatgtttagccatactcttagatcaactctttaagagcagaactttatatccaatttacatgctctagataccaccttttttattttttacagtaaggtctggtattcaaatacccacttgtacactgacagctttaagaaaaacaggacacagagggagttgtcatttttagcagcaatgaaataccactaacccctttttacataccgaattcaagtcactatcagaggtgagtgcaccacaaagtcaccaggtacaaaattgctagttcatttttaaattaataacttgaaattacccctgccccccaccccattacatctttttataaacagcaaacattttgctattttatacataggctagcaggcttgtttcaatatgaaagtgctaattcatttacagatttttataatcaggtatgtaggggctacaataaaatgnccaataatctacatagggaccatggtggaaaatggtgaanaccgggataaggnttttagatggncctttt

SEQ ID NO: 7554 - DNA, 556 bp, Homo sapiens
  misc_feature (455)..(455): "n" may be a, t, c, g, other or unknown
  misc_feature (463)..(463): "n" may be a, t, c, g, other or unknown
  misc_feature (489)..(489): "n" may be a, t, c, g, other or unknown
  misc_feature (498)..(498): "n" may be a, t, c, g, other or unknown
  misc_feature (502)..(502): "n" may be a, t, c, g, other or unknown
  misc_feature (529)..(529): "n" may be a, t, c, g, other or unknown
  misc_feature (552)..(552): "n" may be a, t, c, g, other or unknown
gcatgtgcaaaacaccagacacatacagaaacaattaggattctatgagggcagagaatttgtttctctaaatggggctgttcaatgtttcacagagcacaaggacaagaaattcaatatttttgagcagaaggaagaactcatttgtttttataattccttaactagtttcaagcatattgcatgtactatgtgccagccactgtctgcttgctttatattccctatctcatttcatcctcacaccaagcctaagaggtcggtaccattatccccatttaccaaatgaggaaactgaggatgcccagggccacacagtaggggcccttagtattctgtttcttaagagctgctcctttttcccctctgaaaagagataatgtgggtacagtggggaaggatactagactaggaatctggattctaatctcaagctctaccacaaatcaattatnccaatggngcgactcttcatatgccggatcctgnccttaaggngggnatgggggactcagaacctggattcagnaaacacctggaagctgggacttntttt

SEQ ID NO: 7555 - DNA, 538 bp, Homo sapiens
  misc_feature (126)..(126): "n" may be a, t, c, g, other or unknown
  misc_feature (223)..(223): "n" may be a, t, c, g, other or unknown
  misc_feature (257)..(257): "n" may be a, t, c, g, other or unknown
  misc_feature (309)..(309): "n" may be a, t, c, g, other or unknown
  misc_feature (333)..(333): "n" may be a, t, c, g, other or unknown
  misc_feature (340)..(340): "n" may be a, t, c, g, other or unknown
  misc_feature (478)..(478): "n" may be a, t, c, g, other or unknown
  misc_feature (492)..(492): "n" may be a, t, c, g, other or unknown
  misc_feature (504)..(504): "n" may be a, t, c, g, other or unknown
  misc_feature (520)..(520): "n" may be a, t, c, g, other or unknown
  misc_feature (525)..(525): "n" may be a, t, c, g, other or unknown
  misc_feature (529)..(529): "n" may be a, t, c, g, other or unknown
  misc_feature (531)..(531): "n" may be a, t, c, g, other or unknown
gtttttgactttggtttatttaaaaaacaagccaaaaaaaaaaaaaaaaaaccccaactttatatacaaagtcaaactgaaaccacggattatggaaagaggcaagaattatgggtaacagggganaaggctgggccagagccaataccacattctgaacacaggagccacgggaaagaggtgctggtttcttctggcaagaccggggtgactggaacgcagngttctactggcaaacccagcccaacactgagctntttctagcatggactccattcccgtgatggccaagggagacccttcccccanaagcctgtgtccggaacctagcanagcctgngccatccggaggagggggctgcttagccccagccaggctccatgtcttgctcttcaattccgttcactgacatcagaccttgtcccacactcgaaaagcctttttctcccctggcttattctaaactggaaaaggacnggagaaagtcagcncaagacttaaanggccccaggagaaatncccanggtnanggcaaaa

SEQ ID NO: 7556 - DNA, 545 bp, Homo sapiens
  misc_feature (103)..(103): "n" may be a, t, c, g, other or unknown
  misc_feature (163)..(163): "n" may be a, t, c, g, other or unknown
  misc_feature (166)..(166): "n" may be a, t, c, g, other or unknown
  misc_feature (240)..(240): "n" may be a, t, c, g, other or unknown
  misc_feature (251)..(251): "n" may be a, t, c, g, other or unknown
  misc_feature (342)..(342): "n" may be a, t, c, g, other or unknown
  misc_feature (443)..(443): "n" may be a, t, c, g, other or unknown
  misc_feature (520)..(520): "n" may be a, t, c, g, other or unknown
  misc_feature (540)..(540): "n" may be a, t, c, g, other or unknown
cacgatagaaccgagataaacctttttatttatttatgcttctccattttgtttaaaacaacaacaacaaccaccttaatgtaactgacagcccttccccctnaccctgcctcgggctgggggtagttaatggggaaatggcccccagggtggggctgaccanaanagcccctcaaggagctcatggagcccaaatcccctgccctggggaggggacctgtagtgtgtgacgggagcctntcccgagcctntgcttgtaccatcaaagatgcccttggccaacaagggtcaggaagcatgggggagggatttcggcctcctctgtccctacccagcccaatntcacgagcagggctggggggtttaaaaagggtggagcgggtggggttggctcacacgaaggagtactggttgttaatggccctggggtggcccccttcctntccataccccctaatggtgactgctgaactgcaccattgggggcacccccgggttcccaccagacccaggcctgggnctttgaacctgggctttggnctttc

SEQ ID NO: 7557 - DNA, 550 bp, Homo sapiens
  misc_feature (470)..(470): "n" may be a, t, c, g, other or unknown
  misc_feature (484)..(484): "n" may be a, t, c, g, other or unknown
  misc_feature (502)..(502): "n" may be a, t, c, g, other or unknown
  misc_feature (518)..(518): "n" may be a, t, c, g, other or unknown
  misc_feature (522)..(522): "n" may be a, t, c, g, other or unknown
  misc_feature (529)..(529): "n" may be a, t, c, g, other or unknown
  misc_feature (546)..(546): "n" may be a, t, c, g, other or unknown
aatctacattattaacttccttttggtatattacagtgatattttctgtacatggcccagaactaagttccctatgtacatagagatgtgggggaaaagcattgaccttggaagtcgccgccttatgccctgaaagacaaggttcctttcttcattcaggagtttctcaccacatcgccattgtgaagtagcaacattctgtaaacctggaggggctaggtaaaggtctggagataggagagtgggtcaatttccttctgtctccttccacagacaaagcccgtcagcagctgctgtttttgaattcaccattctccgtgatggaaagcttggtggggttggtgggggagatgccattgcggacctgcatgctgtaccgctccttcacttgggtcagcgcgctcatcagtctggtgttggctgaatccagggacacgatcccggttttcctggttgaataatctcatctncatttatgacctgngcatcaattattttctgntttgcatcaatactgnttgnattttancatgaacctttttaagntcct

SEQ ID NO: 7558 - DNA, 561 bp, Homo sapiens
  misc_feature (525)..(525): "n" may be a, t, c, g, other or unknown
  misc_feature (559)..(559): "n" may be a, t, c, g, other or unknown
  misc_feature (561)..(561): "n" may be a, t, c, g, other or unknown
aaaaggcgggtccaggtggccagagcattggaggcttcctggcggcccagagctcttgggctccacccagtttattggtttacaagctctttgttcttatggctgattggagggggaggaagcgatcaggaaaaggattaatcagtaaaggagaactcgtgagtcattccataagatgtaaagcactggccgtttctgtgaatttccttgaacaaaggcgtgtgtctaaactacttaagatctttaacttaactgaaacgggtggctgcgggtttcaggaggagccaagatgtttgattatgctccactgcttcaagggagtgtgatctccctgagcaacccatggaatgctgctgaagagttatgctctcggggcataaagacatgaaggcaataaggagacttttctcctcagaggccgccatggcttcccatgggtgtctcacacaggggagaccaacttaactagcaccccagaaactcacattagggtttacaatagtaagggtatctttaggagccacnttggggagggtcaaactttttggagcccaaactntn

SEQ ID NO: 7559 - DNA, 567 bp, Homo sapiens
  misc_feature (486)..(486): "n" may be a, t, c, g, other or unknown
  misc_feature (504)..(504): "n" may be a, t, c, g, other or unknown
  misc_feature (513)..(513): "n" may be a, t, c, g, other or unknown
  misc_feature (527)..(527): "n" may be a, t, c, g, other or unknown
  misc_feature (534)..(534): "n" may be a, t, c, g, other or unknown
  misc_feature (536)..(536): "n" may be a, t, c, g, other or unknown
  misc_feature (544)..(544): "n" may be a, t, c, g, other or unknown
catgttataggtcattttaatgaacacatgcacacacactttagttttcaaagaccaaagtttaaagaaaatactttttagtcaagtacagatccccaaaggtttatttaaagccaatttttatttaagtagtcttcatttttgaagcattttcccctagtactctaatttcaaaatcagtatctctcaaatgctgatgccactgggaaaaatttccaaattggtaatggaaacatatgctatgtgcatctgctcaaactagcaacaacatgatgtcaaataaaaatggatggcattaaaaaaaaaatccaaaaacctataatggcaactcaaagcagcaataataagaagaagagattaaaatctctagttaaaaacaatcaagacttgcagattaaatctgaactttactccttctgttagtacaaatcagaaacttcttgctactcaaattcaaacagggtgcaatgaatggggtactttcgnattccagaactacctttncttacctgntcctacattctggntttcttntnaaaaattncccctcctttgggggaatcccct

SEQ ID NO: 7560 - DNA, 542 bp, Homo sapiens
  misc_feature (3)..(3): "n" may be a, t, c, g, other or unknown
  misc_feature (21)..(21): "n" may be a, t, c, g, other or unknown
  misc_feature (23)..(23): "n" may be a, t, c, g, other or unknown
  misc_feature (28)..(28): "n" may be a, t, c, g, other or unknown
  misc_feature (57)..(57): "n" may be a, t, c, g, other or unknown
  misc_feature (160)..(160): "n" may be a, t, c, g, other or unknown
  misc_feature (180)..(180): "n" may be a, t, c, g, other or unknown
  misc_feature (234)..(234): "n" may be a, t, c, g, other or unknown
  misc_feature (332)..(332): "n" may be a, t, c, g, other or unknown
  misc_feature (355)..(355): "n" may be a, t, c, g, other or unknown
  misc_feature (365)..(365): "n" may be a, t, c, g, other or unknown
  misc_feature (383)..(383): "n" may be a, t, c, g, other or unknown
  misc_feature (434)..(434): "n" may be a, t, c, g, other or unknown
  misc_feature (438)..(438): "n" may be a, t, c, g, other or unknown
  misc_feature (456)..(456): "n" may be a, t, c, g, other or unknown
  misc_feature (458)..(458): "n" may be a, t, c, g, other or unknown
  misc_feature (491)..(491): "n" may be a, t, c, g, other or unknown
  misc_feature (532)..(532): "n" may be a, t, c, g, other or unknown
canaatgcctttattttcagnancatanaatttaaatacagagtcaaaagatgattnataaaatataaaacattttctgcttggccgtatttgaagacaagctgaatacatatctatgttctgaataagtccactatggatatatataggaagagatatncatatatccatccacagatncacacacacatatatatttctgcatgtatatatacataattctttctatagttncaggaaatacttcttctataattctgattttgactcccatcctccaccatttactcatccactcattacctaaatcttggctttctttcctatattgnaaataatccatccaaacttctanccagtactgncaggagggttcttgctcnagtgagctgttaatactattttccactgacaacttctgcacatcggggacncagngtatctgaagactccgcngnatacttccaacaacgggggcatttttctttcgnaaacggcatggcaattactttataggaagacttttcgaaantccccccctt

SEQ ID NO: 7561 - DNA, 565 bp, Homo sapiens
  misc_feature (531)..(531): "n" may be a, t, c, g, other or unknown
  misc_feature (540)..(540): "n" may be a, t, c, g, other or unknown
  misc_feature (552)..(552): "n" may be a, t, c, g, other or unknown
agatttaaaacagcatacatttattatctgaaagtttctgtgggtcaggagtccaaacgtgatttagctgggtcctctgctcagagtttcacaaagctgcaagcaaggcgttggctggggctgggcttttatctgaggttcagatgcttcttccaagatcacatggttgttcacaaaacttatttccttgcagccgtagagctcatggcagcttgcttatttaaggctaataggagagagagtctctgactggttcactctcttttaaaagactagtctgattaggtcaggcccacccaggggatctctttgattaactcaaagtcagctgattagaaaccttatgtatatctgcaacttctcttcacttttgttatataacataacataatatgggagagatgatcccatcacttttgccatattctgttggttagaagcaggttacatgtcccacccactctcaatgggggagaggattataccaaggcatggattattgagaatcctctagaaatctgctatcataangggaatatntatctatggagnggaaaaaaattaa

SEQ ID NO: 7562 - DNA, 444 bp, Homo sapiens
  misc_feature (44)..(44): "n" may be a, t, c, g, other or unknown
  misc_feature (85)..(85): "n" may be a, t, c, g, other or unknown
  misc_feature (108)..(108): "n" may be a, t, c, g, other or unknown
  misc_feature (135)..(135): "n" may be a, t, c, g, other or unknown
  misc_feature (249)..(249): "n" may be a, t, c, g, other or unknown
  misc_feature (265)..(265): "n" may be a, t, c, g, other or unknown
  misc_feature (417)..(417): "n" may be a, t, c, g, other or unknown
  misc_feature (420)..(420): "n" may be a, t, c, g, other or unknown
  misc_feature (424)..(424): "n" may be a, t, c, g, other or unknown
  misc_feature (428)..(428): "n" may be a, t, c, g, other or unknown
  misc_feature (431)..(431): "n" may be a, t, c, g, other or unknown
  misc_feature (433)..(433): "n" may be a, t, c, g, other or unknown
  misc_feature (444)..(444): "n" may be a, t, c, g, other or unknown
gtatggacataaaatgtttaattggagaaatgacttgttcaggngttttaatagctcacaacaaaacaagatcccagttacaagngtttaaaaaaagaaaatgattgngggagcctctacatataactagtttgnatgttattcccagggcactgttgaatatattggaaaaaaagatgattgaagcatttactaaaatttttgttatttaaaagaccaaatccctatggatttgggagattgtttcancagagaagtggctcanaaagacagtaacaaaggctatgactaaatggatacagttctggaaagagaacaaactgcagagtaccacagggataatgttaggccttcttacaaatgatttgcaagaaggaactcgggaacatttccaaacccactggttgcattcaactntgnttgntgancgngncaaattgaaan

SEQ ID NO: 7563 - DNA, 498 bp, Homo sapiens
  misc_feature (52)..(52): "n" may be a, t, c, g, other or unknown
  misc_feature (231)..(231): "n" may be a, t, c, g, other or unknown
  misc_feature (311)..(311): "n" may be a, t, c, g, other or unknown
  misc_feature (353)..(354): "n" may be a, t, c, g, other or unknown
  misc_feature (405)..(405): "n" may be a, t, c, g, other or unknown
  misc_feature (409)..(409): "n" may be a, t, c, g, other or unknown
  misc_feature (444)..(444): "n" may be a, t, c, g, other or unknown
  misc_feature (453)..(453): "n" may be a, t, c, g, other or unknown
  misc_feature (466)..(467): "n" may be a, t, c, g, other or unknown
  misc_feature (487)..(487): "n" may be a, t, c, g, other or unknown
atcttattttttgagacagagtctcactctgtcacccaggctgaagtgcagnggtgcgatctcggctcaccgcaagttccgcctcccgggttcatgccattctcctgcctcagccccccgagtaactgggaccacaggcgcccgccaccacgcccagctaattttttgtatttttagtagagacggggtttcaccgtgttggccaggatggtctcgatctcctgacctcgngatccacccgcctcggcctcccaaagtgctgggattacaggcgtaagccaccgtgcccggcattattttattttttgtanagacagggtttcaccatgttgcccaggttgtttcacattggnntaatccaggctggttatgaactcctgggctcaagcaatccacacgccttgncctnccaaagtgctggggattataggctgggtcactacncccagcctntatatcatggacnnctttcatggggaagaaaggngactggaacga

SEQ ID NO: 7564 - DNA, 547 bp, Homo sapiens
  misc_feature (198)..(198): "n" may be a, t, c, g, other or unknown
  misc_feature (266)..(266): "n" may be a, t, c, g, other or unknown
  misc_feature (269)..(269): "n" may be a, t, c, g, other or unknown
  misc_feature (271)..(271): "n" may be a, t, c, g, other or unknown
  misc_feature (354)..(354): "n" may be a, t, c, g, other or unknown
  misc_feature (463)..(463): "n" may be a, t, c, g, other or unknown
  misc_feature (496)..(496): "n" may be a, t, c, g, other or unknown
  misc_feature (506)..(506): "n" may be a, t, c, g, other or unknown
  misc_feature (519)..(519): "n" may be a, t, c, g, other or unknown
  misc_feature (523)..(523): "n" may be a, t, c, g, other or unknown
  misc_feature (534)..(535): "n" may be a, t, c, g, other or unknown
accaatgcagcatttattttaaaattaaattaaattaaaaaaaaaaagattgcatcaccaggtagttttctcgattaaggaggcagcctgaccagggtgggccgtggccgggcggcagcagcatcacactgggccatttaaggcagctccttctggcggggcatctgtcttcccgtcctttgtcactgtccccagggnggccaccatggctggggctgctgtgactgccatgatgggccctagggggaccgccacggccagtgcanaananactgctggggtgggtatggcggggccagccttgctcagtgctgtggtgatggccacagtagcctcggggggcacagccacggntggggcagcagtcacttcctttggcgcggggcaggcagggcttaacagcccggctgtcaacacacccgaccctgccgaccggcttctctgtcctggccactgtgggcanacggggggccttccggccgggaaccctggttancggattcatnggacttgcttgcntttnggcgcatcctnnttggggaacccc

SEQ ID NO: 7565 - DNA, 567 bp, Homo sapiens
  misc_feature (415)..(415): "n" may be a, t, c, g, other or unknown
  misc_feature (434)..(434): "n" may be a, t, c, g, other or unknown
  misc_feature (523)..(523): "n" may be a, t, c, g, other or unknown
ggggagtccatgccctggctttattcatattgagatttcttgactcttggaacatagctgttgttcacatgaaaagaaagcattaaggtgagccaaagaagatttaagatttgacatttcaaatacatagcaaatttatgaaaagaagaatattcagggataatgcaatttcaattgactaaaaagaatcaatgagaggtcaagaaggatccatctccatctgccacatttgagctgataatcaatgtgtcacatattaattgaatatccatccacacatgtacaacacactgaatcagttataaaagataggaagtaaaatgtgtaacgatataaaggcatgtgaagtttaaggcatcaaatactgcattggctagggtgttgctggatctctatccagcagactccaactgtncaatgcttaatcacagtangacttacttggcaattcacatgaccagtccaaactggcccatgaaggccggcaattccctgggggccgatcgggaatttggattgaaanagggctgccatggttccacataaggcttttaatggggggttggt

SEQ ID NO: 7566 - DNA, 557 bp, Homo sapiens
  misc_feature (361)..(361): "n" may be a, t, c, g, other or unknown
  misc_feature (447)..(447): "n" may be a, t, c, g, other or unknown
  misc_feature (508)..(508): "n" may be a, t, c, g, other or unknown
  misc_feature (514)..(514): "n" may be a, t, c, g, other or unknown
  misc_feature (544)..(544): "n" may be a, t, c, g, other or unknown
  misc_feature (556)..(556): "n" may be a, t, c, g, other or unknown
aaatagagacagggtcttgctctgtcacccaggctggaatgcagtgatacaatcacagctcactgtaaactcaaactcctgggctcatatgatcctcccatctcagcctcctgagtagcaaggaccacaggtatgtatcaccacacttggcttgttatacgcacgtgtgcgcgcacacacacacagacgtgtatatatatatattttgagacagggtctcctgttgcccaggctggagtgcagtggctcaatctcggctcactgcaacctccgcctcccaagttcaagtgattctcctgcttcagcctcctgagtagctgggaccacaggcatgcaccatcacgcccggccaattttttgnagtttcggtagagatggggggtctcactgtgttggccagcctggtcttgaactcctgacctcaagtgatgtgcctgcctcagtctnccaaagtggggggattacaggcgtaggctaccacacccagcctatgggcttactatattgnccaagntgggctcaaaaattctggccttaacaaatnttctggcttaanc

SEQ ID NO: 7567 - DNA, 570 bp, Homo sapiens
  misc_feature (501)..(501): "n" may be a, t, c, g, other or unknown
  misc_feature (518)..(518): "n" may be a, t, c, g, other or unknown
  misc_feature (523)..(523): "n" may be a, t, c, g, other or unknown
  misc_feature (536)..(536): "n" may be a, t, c, g, other or unknown
  misc_feature (557)..(557): "n" may be a, t, c, g, other or unknown
acagaactgtaccatttattatacacacaagtatatcagttccctttgttaacaaaggctggttatagataatatggaatgttacagtaccatcttgcataaaattctagtacgattttgtacttgaaaaagggtgcaaaaacaccagactaataaatctgactgaattgaaatatctcttctttctttttaaaaagtacatcattaacacatacaccacaaactgtacataagctcactttaaatcaccaactggagatatggtagcatgtatactgtagtgttaattatccctcccatcagtttaatttattaaagccttacactgctgttcattcaggagcctttgttgatatgcaagcctgtaatatgaattactgaactcaggtaagtagaatttaaaggaggccaacaacagctgccaagaattatctgcagtaagaaatgtccttctcacagaagactcaattaggagccaacattttttaaactatcttccgntttcaaaaatattgganccggncaaaaatcttcantttggaactctggatgctggnggttgatgaaaac

SEQ ID NO: 7568 - DNA, 570 bp, Homo sapiens
  misc_feature (539)..(539): "n" may be a, t, c, g, other or unknown
  misc_feature (541)..(541): "n" may be a, t, c, g, other or unknown
  misc_feature (553)..(553): "n" may be a, t, c, g, other or unknown
  misc_feature (563)..(563): "n" may be a, t, c, g, other or unknown
gttgttcttattataattattttattattgtttgatcatcttctctcgagacttgacatcaggacagaaacgccagtatatatacaggatatttgaataaggaggcatttaaccatcgaaagtaaataaaccagaaattggataggcgtggtagctcatgcctgtaatcccagcactttgggaggttgaggtgggcagatcactagagtccaggagttcaagaccagcctgggcaacatggcaaagccttgtctccacacacaaaaaaatacaaaaattagctaggtgtggtggtgtgtgcctttagtcccagttatgcagaaggatgaggcgggaggattgataaactaccccacgtggtagtttaacctgttgcctatactttggaaacaaagagaaaaatgcatccaagtttggcaaaggaaagcagcaatcatctatctgtcttgtgcccaccatcaagagagttcttgagaccaaagtttccaaatggagacttaactctggcactgcagaaaagttaccaagaatctgaaggncngactgatggtanactttattcngaaacaa

SEQ ID NO: 7569 - DNA, 574 bp, Homo sapiens
  misc_feature (468)..(468): "n" may be a, t, c, g, other or unknown
  misc_feature (472)..(472): "n" may be a, t, c, g, other or unknown
  misc_feature (483)..(483): "n" may be a, t, c, g, other or unknown
  misc_feature (511)..(511): "n" may be a, t, c, g, other or unknown
  misc_feature (574)..(574): "n" may be a, t, c, g, other or unknown
cattttgcaaatttaatgtaactctgataccaaaatatgacagcacacagaaagcaaacaataaagcaggaacagcaaacagatttttccatcacatgacaccctcagctgattggccataactgccttgactgctgtgtggacaaagattccaaggatgtactttggctccatgggaaggactactgcaatttattagcggtatctgtaaacatggggaataaatctcagccctggcttcagcctcagccacagccacagctgcagcttggacttccatctccactgcctcgcggtactgcacagcccagtccttggggtctttcttctgcaccctgcatgcaaacttgaggactttcatcttgctagtctcgtggtaggagcgcaagccccagaagaactcatattcaggtggtctgctgttagggaccctcttgtactccaggtacttctgcttcacaaactcgnctgngatgaagcttnctcactttcccaaaaaggtgaatgcctnaccccagggcgcaaccccaacttggcaagaacttccaaatgacagcttaattggccttggtgn

SEQ ID NO: 7570 - DNA, 558 bp, Homo sapiens
  misc_feature (524)..(524): "n" may be a, t, c, g, other or unknown
  misc_feature (526)..(526): "n" may be a, t, c, g, other or unknown
gttttgagatggagtcttgctctgtcaccgaggctggagtgcagtggcgcgatctcgactcactgcaacctctgcctcccagggttcaagcaattctcctgcctcagcctcccaagtagctgggactacaggcatgcgcaccactgcacccagttaatttttgtatttttagtagagatggggtttcaccatgttggtcaggctggacaaggctttttttctttggagaaatcactcacgatcgtatgaatttgcttccaaaacatccaaatttaatgtactaatgcaaggactggtaagacttaagattcacataacgtccctcatagttaagtctcttgcttcctactattagtggaatcaatcagcatcaggtacttcaaagaaagtcaaatcctaagcctgcccaggcccaaagacaaagccagccaggacctgaccacctgtatcctcttggtggcaatctgctgaagccagatgagttctgctttttaattccaatcctattctggcactggaactangnctggcaaccctcttaatcattaacatatcaaa

SEQ ID NO: 7571 - DNA, 561 bp, Homo sapiens
  misc_feature (88)..(88): "n" may be a, t, c, g, other or unknown
  misc_feature (423)..(423): "n" may be a, t, c, g, other or unknown
  misc_feature (491)..(491): "n" may be a, t, c, g, other or unknown
  misc_feature (504)..(504): "n" may be a, t, c, g, other or unknown
  misc_feature (508)..(508): "n" may be a, t, c, g, other or unknown
  misc_feature (522)..(522): "n" may be a, t, c, g, other or unknown
  misc_feature (561)..(561): "n" may be a, t, c, g, other or unknown
gggacaaaagcatgttgaaatgtattagaatcagaacctgtacaaaaaaaaaaaaattaaaatataacctgaaactgttcaagttcanaagtctagttaagtctttttctcttgccaggagaatgccatcatcagagggctctgggtcatcagccaaggaggggtgaaaagacagaagcagcaacaggtccttcagcagacagaggggcatcgatgccaccatccctacccaggtgcagccaggaggagttaaagatcttgggagagcaagcattagccggcagttccagtgggcagctggggcctacacaccgaaaacaaggctgagtagtcagaggcagcaggaagagtggccaggagagaacgccaagccggaaggaaccatttctgccacccagcagacccacagcaccctctgtctgngctcagataccagaggttagtcaacccagcgctctcaactaattggagatcggagctgggcttaagangctgaaaacccgngggnttagtaaacacagnccagcatacgtccttcacgggctgaactggacttgccan

SEQ ID NO: 7572 - DNA, 565 bp, Homo sapiens
  misc_feature (1)..(565): "n" may be a, t, c, g, other or unknown
nnnnnnnnnnnnnnnnnnnnnnnnnnnnnnnnnnnnnnnnnnnnnnnnnnnnnnnnnnnnnnnnnnnnnnnnnnnnnnnnnnnnnnnnnnnnnnnnnnnnnnnnnnnnnnnnnnnnnnnnnnnnnnnnnnnnnnnnnnnnnnnnnnnnnnnnnnnnnnnnnnnnnnnnnnnnnnnnnnnnnnnnnnnnnnnnnnnnnnnnnnnnnnnnnnnnnnnnnnnnnnnnnnnnnnnnnnnnnnnnnnnnnnnnnnnnnnnnnnnnnnnnnnnnnnnnnnnnnnnnnnnnnnnnnnnnnnnnnnnnnnnnnnnnnnnnnnnnnnnnnnnnnnnnnnnnnnnnnnnnnnnnnnnnnnnnnnnnnnnnnnnnnnnnnnnnnnnnnnnnnnnnnnnnnnnnnnnnnnnnnnnnnnnnnnnnnnnnnnnnnnnnnnnnnnnnnnnnnnnnnnnnnnnnnnnnnnnnnnnnnnnnnnnnnnnnnnnnnnnnnnnnnnnnnnnnnnnnnnnnnnnnnnnnnnnnnnnnnnnnnnnnnnnnnnnnnnnnnnnnnnnnnnnnnnnnnnnnnnnnnnnnn

SEQ ID NO: 7573 - DNA, 561 bp, Homo sapiens
  misc_feature (387)..(387): "n" may be a, t, c, g, other or unknown
  misc_feature (453)..(453): "n" may be a, t, c, g, other or unknown
  misc_feature (471)..(471): "n" may be a, t, c, g, other or unknown
  misc_feature (493)..(493): "n" may be a, t, c, g, other or unknown
  misc_feature (547)..(547): "n" may be a, t, c, g, other or unknown
  misc_feature (549)..(549): "n" may be a, t, c, g, other or unknown
  misc_feature (559)..(559): "n" may be a, t, c, g, other or unknown
  misc_feature (561)..(561): "n" may be a, t, c, g, other or unknown
cattttgacaagttcaatcagaaaattagatgttccaaaatacataggtacctaatataatttcaagaaatataaaagcaatacccagagattcgagtgagacacagacaaacccataatctttgtcagaaatggaatttcacctgtcactcgctgatttaaccttcacttcttccctgacccacacccagaaccaggcaccctccagagctggcccatctcccctccagcccctgcctccctgcccggcaacaccccgggagctccagcgagtctctggccgctccaagcgctctgagggcaccagcctgtcccactctggccatttcaatgccgctcggacagagcctggtggggttcgtaagccagtgcatacccccaccctgnacgtgctcttcccgggtcggcgccaagctggtctggacccgaatcctcgcgctgacgcttcctggngtcccacggtgctggacncaagaattgaggtggggtgggntaccctgaggcccaagccttccaaaactggtaaaacggccggaggcatggttgntnggggtggcanan

SEQ ID NO: 7574 - DNA, 568 bp, Homo sapiens
  misc_feature (439)..(439): "n" may be a, t, c, g, other or unknown
  misc_feature (511)..(511): "n" may be a, t, c, g, other or unknown
  misc_feature (543)..(543): "n" may be a, t, c, g, other or unknown
  misc_feature (564)..(564): "n" may be a, t, c, g, other or unknown
gaggtccagagatgcctgctttatttcctacggggtgatcgcatttcaggctggtaacatcacataacaagtctaatcgccaactagttgtacgcctctgaactacaagtcaacaatccaattcagcaaggaacaacagtgtcaacagctcattagcgggtggggaccggattttccaaatcaatggtcttggctggcagagtgctgagtggggcctgagtgaatgaggctaaaacgcttggccgaagccgtccatccccaatcctgagaacagagttgtctgtttctctttcgggggtcaggtcagcccaagtaagaggccaacaacctacctgggccgatacaaggcgacacaaggcccacccgtggctgacgcgccctccaccctcactccatcccggggcacagctccttccgctggtgcttaggaaaaggcgangctttggtaattctcatctttgtagttctgctttgaaaagaaaagggggccggcaccggcggttacgcctgnaatcccaacacttttggaaggcccaaggcggntggatcacctgaggtcagganttca

SEQ ID NO: 7575 - DNA, 574 bp, Homo sapiens
  misc_feature (320)..(320): "n" may be a, t, c, g, other or unknown
  misc_feature (443)..(443): "n" may be a, t, c, g, other or unknown
  misc_feature (461)..(461): "n" may be a, t, c, g, other or unknown
  misc_feature (468)..(468): "n" may be a, t, c, g, other or unknown
  misc_feature (502)..(502): "n" may be a, t, c, g, other or unknown
  misc_feature (525)..(525): "n" may be a, t, c, g, other or unknown
  misc_feature (532)..(532): "n" may be a, t, c, g, other or unknown
  misc_feature (574)..(574): "n" may be a, t, c, g, other or unknown
gtcagcaaattccccataaagcttagttatgtccatcagctcagaatccagctgagaaactgcatcctgtacagaagaatgatgggaatactgcctttgtagtgtctcctgtatctgaagttggatcctagcaacctccattttttcttctaattcatgaagaaattcaccatcggcagctattgatgaaatggcagtggaacttttggcactaagaatggctcgagcaatgtactctagtcgctgctgaagtgaaatttctgtgctatgcatgtcagccagtctggacagtacacgagcagcattactgaaacttctgntcttctcgtaataccgccagagtaaatccatataacgaactctggtttgatcaactttggccattcggactagatgtggcttcagaaatggagaaacaacctgtagcagcttatctgcaaggncgacttggattagcccantattaanggcaatactaaagagctcatccttggatcgctgngacaattaagcattggtcaaaangaggccngctcttcatactcacctattggtcaatgccacctgggggccn

SEQ ID NO: 7576 - DNA, 583 bp, Homo sapiens
  misc_feature (481)..(481): "n" may be a, t, c, g, other or unknown
  misc_feature (501)..(501): "n" may be a, t, c, g, other or unknown
accattttagttatagtttatttcataccctaaggcaattttatcccaaagggtcacctggtgaagtcaagtgctgttgagataaaggctgtggaggctgctggagcactgattccagccagtaggcttcctggtcccctcaaggcacctctactctcagtgctctcagagcccacatgggatgtccctcacacctggcctggaagccagagggcaggaagccagcctcagcctcagctccaaatacgcagacaagccctccccgctgcagccacaccaaatggcaattaagtcaaaagctgggtagcagagggtttctgggccagagtgcatggtgtctctggatctacttcccttggtcatgtgtactggggggtagggaggcacagacacccaggcccctgcctcaggtccagcaaagctgaaaggatgagaacagaggaaaccaagaagcaggcaagaggcctgggacccagggcanggtcaacccttctgggctgnttacctggcacttgcataaagggatgtgtaacttaacattcaggatttctttttccaaatgagacaggcattgcagtaatgt

SEQ ID NO: 7577 - DNA, 584 bp, Homo sapiens
  misc_feature (549)..(549): "n" may be a, t, c, g, other or unknown
  misc_feature (568)..(568): "n" may be a, t, c, g, other or unknown
catcaacagaattccagtttattacctatatatacgtagcacagtcataggatactgtgctcatacataaaaatgcaaaaactgtcaaatgtgctatcctcccatgtatacaaaaaactattagcatcatgaggaagaaactttttaagtcaatacagattataatgaacacctgccattcataaaaatgtaacatacattctattatactatgctgatgagggaagggaagctaagtgagtaaatcagttgagacgacttaagaaaaattcaggaaatcataatttaaaaagatcagcatattttgtatacctttaagtagattagagtgtgttgagtgtagagtctgatccacaaagtctgagcaaaaaaaactggtgcttctaatggaatgttttttgtttttttaagaatcaaaagacatataaatgaattcaagcctaacaaagtagcttcaacccaaagtggcaccatttggtttttatttttcctttttaggaaagtatctctgatgactaaattaggtttcctaagcaaatactggcttgnccaggcatagaagcccagncctttggttaatattc

SEQ ID NO: 7578 - DNA, 595 bp, Homo sapiens
  misc_feature (521)..(521): "n" may be a, t, c, g, other or unknown
  misc_feature (558)..(558): "n" may be a, t, c, g, other or unknown
  misc_feature (563)..(563): "n" may be a, t, c, g, other or unknown
  misc_feature (579)..(579): "n" may be a, t, c, g, other or unknown
  misc_feature (581)..(581): "n" may be a, t, c, g, other or unknown
  misc_feature (589)..(589): "n" may be a, t, c, g, other or unknown
  misc_feature (592)..(592): "n" may be a, t, c, g, other or unknown
acactttctagctcaggtgtataccgtttggtgcctttgaggccctgggcaaggccgagccctggggtggagcaatgtgcttctgatgtgactcagggctcaggggactcctcaccgcagctagcccatcacagctagcccctgaagtctgccttcagggaggcgcagacaactcacgccagccagcccagggcaggggcaatatccgtgccagcaagtctcggctgagagagccttttggcagaaaaagccatgtttatttcccttgtttccccctagaaatcccagtcatcacctagacccctgatgggttgagctgcagaaaaccctggcccaggtgaccccaaaaaccactggccttccctgagggaacttgaaaggggggcatttgaaatggaggggaaggagaactaacccttgaaatgtagacaggctactgaggatggaagcctggggctggtgctgagggtatataatgcagcactatggttaaaagcactgactcggaatgtctgagctgncattctgctctctttctggggatctgagctgtgtgancttangcacgcatcaagcctntntgatcctnaancta

SEQ ID NO: 7579 - DNA, 551 bp, Homo sapiens
  misc_feature (51)..(51): "n" may be a, t, c, g, other or unknown
  misc_feature (181)..(181): "n" may be a, t, c, g, other or unknown
  misc_feature (392)..(392): "n" may be a, t, c, g, other or unknown
  misc_feature (399)..(399): "n" may be a, t, c, g, other or unknown
  misc_feature (457)..(457): "n" may be a, t, c, g, other or unknown
  misc_feature (477)..(477): "n" may be a, t, c, g, other or unknown
  misc_feature (484)..(484): "n" may be a, t, c, g, other or unknown
  misc_feature (512)..(512): "n" may be a, t, c, g, other or unknown
  misc_feature (538)..(538): "n" may be a, t, c, g, other or unknown
  misc_feature (542)..(543): "n" may be a, t, c, g, other or unknown
gcttttcacccacttaacaaatattttttgagcccctgccatgtgaaaggngctgcagttgatacaaagcatgtcatacatcgcccctgcctttaaatagcttatgtccagctgggggcataaggtaggaccactaaataatggttcaagacagccagtgacacttcaatgcgaaggtganatggttagagttacaggcagacagccaacagaagcctgggattttacaggccaaggaatcgaaggaggattggaaatgagagtgcatgtgtgcccaggggggaaaggtgcaaatatctcagggcagggaggcagccagtacaggtggagccaaacgtttcagaaaccacggatgcagggggctttatggggaaaacatgtgctgagggcanagggaanctgcggtgcaaagtggattcacttttggtgggggtgcactcttggggtctgccatggnttaagctgcatgggcactgntttcatnggcattaacccaacactttggttctaancccgggggggcaccttccggaaggangcanncttgaaaa

SEQ ID NO: 7580 - DNA, 570 bp, Homo sapiens
  misc_feature (69)..(69): "n" may be a, t, c, g, other or unknown
  misc_feature (537)..(537): "n" may be a, t, c, g, other or unknown
  misc_feature (540)..(540): "n" may be a, t, c, g, other or unknown
  misc_feature (546)..(546): "n" may be a, t, c, g, other or unknown
  misc_feature (563)..(563): "n" may be a, t, c, g, other or unknown
  misc_feature (568)..(568): "n" may be a, t, c, g, other or unknown
  misc_feature (570)..(570): "n" may be a, t, c, g, other or unknown
gagacaagatcttgctctatcatccagcctggaatacagagtcatgaacataagctcactgcagcctanacctcctgggctcaagtgatcctctcacctcagcctactgaggagctggaaccacagaggcaccagacccagctaactttgtgtagaaacagggttttgccatgttgcccaggctgttctcaaactcctgggctacaatctacctgccttggcttcccaaagtgctggccacggcccccagcctaacattttgaaaattattattattattattttcttgctctgtcacccaggctggagtgcagtggtgcaatctcagctctcagctcacctccgtctgctcggttcaattgattctcctgcctcagcctcctgagtagctgagattacaggcatgcgccaccatgcctggctaatttttgtagaaaattattatttctatggtacatcattttaacaatgcagggggtatctttgacctaaaaacgaaggtttaaaaaccatttttaaattaagaatgccattagncantcttgngctgacatgaagatacngggcntn

SEQ ID NO: 7581 - DNA, 543 bp, Homo sapiens
  misc_feature (256)..(256): "n" may be a, t, c, g, other or unknown
  misc_feature (277)..(277): "n" may be a, t, c, g, other or unknown
  misc_feature (424)..(424): "n" may be a, t, c, g, other or unknown
  misc_feature (465)..(465): "n" may be a, t, c, g, other or unknown
  misc_feature (470)..(470): "n" may be a, t, c, g, other or unknown
  misc_feature (475)..(475): "n" may be a, t, c, g, other or unknown
  misc_feature (497)..(497): "n" may be a, t, c, g, other or unknown
  misc_feature (507)..(507): "n" may be a, t, c, g, other or unknown
  misc_feature (524)..(524): "n" may be a, t, c, g, other or unknown
  misc_feature (532)..(532): "n" may be a, t, c, g, other or unknown
gtattcacctgaatagtcagggaactttcacctattttatttaggttttctttttctttttttcttttttttttcaaattccaaccagaagctaaatacaattggaaactggtaagcactagttttactccaaaggagtaggatcattcagatttactccaataaaagtatgcaacccttaagcaaagcttttcttcatttaaaaggagaaaaaaaaaaaaaacctatacagtagtctttccttatgttcattgcncaaaatgagttctgcttttanaactttgacactcaatggttaattttacaatttaagattccaactttataaccttttttctactccaaaacacccttgtaaagtttttctttaggatggtgtaaaaaccagcatttctgcacaattcactggaatttttttctttgnaataaaaatctcttctctgtaaaaccaaaaacaaaacaaancaaancaaancaaaacccaaagaaaaggcctntacctatcanggttctgcagctatgcntggattcnggttaaagctg

SEQ ID NO: 7582 - DNA, 575 bp, Homo sapiens
  misc_feature (465)..(465): "n" may be a, t, c, g, other or unknown
  misc_feature (512)..(512): "n" may be a, t, c, g, other or unknown
  misc_feature (531)..(531): "n" may be a, t, c, g, other or unknown
  misc_feature (551)..(551): "n" may be a, t, c, g, other or unknown
  misc_feature (557)..(557): "n" may be a, t, c, g, other or unknown
  misc_feature (574)..(574): "n" may be a, t, c, g, other or unknown
caaagcagaaaaacactttggagcgctggttattcacgtggtgaagacactggacaggcgttatctcagggtagatctttggcaaattcctctccaatgcgtcctggctgtttgccctcgtcagtttctaaaccagcttactatttttctctaccgaacctcccccttggggatcttcacaataaactggcttcagaaactatttctctctagtttcgtgttaatacaagcaacagaacttttaaaaaaataagacggttggacaagtgtgaaagatactaggacaaaaaaaatgcctctgattagccaaattacggttcaagcctcttggtgcttcagtgggagaaggtggggaagagtctgcctggtggcctggcacaaaggtgccacatgaaggggaagcccccagcagtgagaacgcggcccatcccactgaaacaacatgacttgcttgacattcttccntttcatgccttaaagaaccatgcttatgaaaacctaccaatcaattnaaaatgtttgagaccagtncttgaactggtgaaaaccanggtcantttaaaaaaagccgggnc

SEQ ID NO: 7583 - DNA, 575 bp, Homo sapiens
  misc_feature (514)..(514): "n" may be a, t, c, g, other or unknown
  misc_feature (548)..(548): "n" may be a, t, c, g, other or unknown
  misc_feature (556)..(556): "n" may be a, t, c, g, other or unknown
  misc_feature (564)..(564): "n" may be a, t, c, g, other or unknown
agtaaatatatgttttatttgtcaagagtaaatgtcagttttatttagaatattcaagtacaaaaaatgaaaatgtatatatctatgactgttaagaaatgttagaaatcattaaaatgttctgagaataccagtaaggcactgaatgcaaataccacctgaaatatgaattatgtgcatttttatatctttaatattcagatgttcatagttattttcttaaaaagtatttttaataaaatgattcaaccttattatttttaccctggaagacagagtttaaacaagtatgtaatgaaaagttttcctaatgaaagctgtgatacactcatgctcaaaggtactttatccttaggaaaaaatagcttatatatctggatgttttaacttttaaagatattttgtttcaccacagtaatacgtcagccataataaggcataataaagcatgaagtcatcatattaaataatctgacacaaaagcttaagatcatatcaccaattgggtaattgnataaaaaatttttaagtctattaactattaaganggtagagntttagctncataatacatc

SEQ ID NO: 7584 - DNA, 575 bp, Homo sapiens
  misc_feature (1)..(575): "n" may be a, t, c, g, other or unknown
nnnnnnnnnnnnnnnnnnnnnnnnnnnnnnnnnnnnnnnnnnnnnnnnnnnnnnnnnnnnnnnnnnnnnnnnnnnnnnnnnnnnnnnnnnnnnnnnnnnnnnnnnnnnnnnnnnnnnnnnnnnnnnnnnnnnnnnnnnnnnnnnnnnnnnnnnnnnnnnnnnnnnnnnnnnnnnnnnnnnnnnnnnnnnnnnnnnnnnnnnnnnnnnnnnnnnnnnnnnnnnnnnnnnnnnnnnnnnnnnnnnnnnnnnnnnnnnnnnnnnnnnnnnnnnnnnnnnnnnnnnnnnnnnnnnnnnnnnnnnnnnnnnnnnnnnnnnnnnnnnnnnnnnnnnnnnnnnnnnnnnnnnnnnnnnnnnnnnnnnnnnnnnnnnnnnnnnnnnnnnnnnnnnnnnnnnnnnnnnnnnnnnnnnnnnnnnnnnnnnnnnnnnnnnnnnnnnnnnnnnnnnnnnnnnnnnnnnnnnnnnnnnnnnnnnnnnnnnnnnnnnnnnnnnnnnnnnnnnnnnnnnnnnnnnnnnnnnnnnnnnnnnnnnnnnnnnnnnnnnnnnnnnnnnnnnnnnnnnnnnnnnnnnnnnnnnnn

SEQ ID NO: 7585 - DNA, 566 bp, Homo sapiens
  misc_feature (464)..(464): "n" may be a, t, c, g, other or unknown
  misc_feature (469)..(469): "n" may be a, t, c, g, other or unknown
  misc_feature (480)..(480): "n" may be a, t, c, g, other or unknown
  misc_feature (539)..(539): "n" may be a, t, c, g, other or unknown
  misc_feature (550)..(550): "n" may be a, t, c, g, other or unknown
  misc_feature (554)..(554): "n" may be a, t, c, g, other or unknown
aaagtgcaaaaagctctctgctgccctagagagaggatctttggacaggccgttcaatgcaaagtaaaagggggcagctgatggggctcaacaaagggcggtggagcgggagacaccatgctcccctccctccctccctccacacacacgcgcagaatacactcagccacacacacagaggcacgtgcacacccccttccatggctgcaggcagagggctggtgactggcttctaagcaggaccccctgactgccctgaaagttcagtgagccactggggctagacacaggcctgggctcagggggctccgctaaaccagaggcctggaggagcctggctgggaggcaggttggggcttggcccagtcctctgccgctccagcttgggggagataggctgctccctctgaggacgtgcatcctgggaaagccttcttcaggcagaatgaagacccatgggaaanggcantcagtggggangcaaaagaaaaaaggggaacaaggaaatgtgcctggcttaaaatccacttggtacaccnaaatggggggncctngggtaaacagtc

SEQ ID NO: 7586 - DNA, 288 bp, Homo sapiens
  misc_feature (282)..(288): "n" may be a, t, c, g, other or unknown
gtaggtagaatcatttttattggagcatgacctgtttggggcttataactctgcagcccctatgggtagctgggggtgggggaagatagtatcaaaaaacggtgaagagagctgatgaggctgtggggactggctggaagctgctggcagggtggagtgggctggggccccggcagattcagatcgaggtacagcagcgttaataatactcttggagcgttaatactctggggaggggcaggcacttggggggccctagggcatgaaggcacttggggttgnnnnnnn

SEQ ID NO: 7587 - DNA, 565 bp, Homo sapiens
  misc_feature (469)..(469): "n" may be a, t, c, g, other or unknown
  misc_feature (489)..(489): "n" may be a, t, c, g, other or unknown
  misc_feature (500)..(500): "n" may be a, t, c, g, other or unknown
  misc_feature (503)..(503): "n" may be a, t, c, g, other or unknown
  misc_feature (526)..(526): "n" may be a, t, c, g, other or unknown
  misc_feature (565)..(565): "n" may be a, t, c, g, other or unknown
gagccagagtctcgctctgtcacccgggctggagtgcggtggcgcgatctcggctcactgcaacctctgcctcccaggttcaagcgattctcctgcctcagcctcccgagtagctgggactacaggtgcccgctctcacgccaggccaatttttgtatttttactaagacggggttgcaccatgttggccaggctggtcttgaactcctgaccttaggtgatccacccgcctcccaaagtgctgggatcacaggcatgagccaccgcacccagccagaagacagctgcttaaaaaagtaattctaaaagctctgacgttggatcccctctgctgcgttttttgttagtatcaaactgtctttcagagggttaagggagaaaacaaaacccatgatgctccttcacttgctctccgaggcgcaggcgcacagaaacagcggcacggaccacagaaatgcaggacggactnttctggttccacgccacgangctggaacatnaancccagtgcctggggcacacacangcttcaggaaactaacttctttcatcaagttaaaacatn

SEQ ID NO: 7588 - DNA, 501 bp, Homo sapiens
  misc_feature (378)..(378): "n" may be a, t, c, g, other or unknown
  misc_feature (426)..(426): "n" may be a, t, c, g, other or unknown
  misc_feature (439)..(439): "n" may be a, t, c, g, other or unknown
  misc_feature (444)..(444): "n" may be a, t, c, g, other or unknown
  misc_feature (450)..(450): "n" may be a, t, c, g, other or unknown
  misc_feature (465)..(465): "n" may be a, t, c, g, other or unknown
  misc_feature (468)..(468): "n" may be a, t, c, g, other or unknown
  misc_feature (485)..(485): "n" may be a, t, c, g, other or unknown
gtctttataattgaacaatttatttttctttgggtatatacccagtagtagcattgctaggtagaattatatttctgttttcagatctttgaggaatcaccacactgtcaaccacaatgattgaactaatttatactcccaccaacagtgcataagcattgccttttctccacaaccttgccagcatctgttattttttgactttttaataacagccatcagccattctgactagtgtgagatggtatctcattgtggttttgatttgcatttctctaatgattggtggtgttgagcctttttcatgtttgttggctgcatgtatgtcttcttttgaaaagtgtctgttcatatgctttgcccactttttaatggggntggttttggaaatttggttaagtttcttatagatgctgaatattaganctttggtggatgnatagnttgcanaaactggcattctgnaantggctggtcactctggntggaatttctttgctg

SEQ ID NO: 7589 - DNA, 560 bp, Homo sapiens
  misc_feature (487)..(487): "n" may be a, t, c, g, other or unknown
  misc_feature (519)..(519): "n" may be a, t, c, g, other or unknown
  misc_feature (524)..(524): "n" may be a, t, c, g, other or unknown
  misc_feature (526)..(526): "n" may be a, t, c, g, other or unknown
  misc_feature (537)..(537): "n" may be a, t, c, g, other or unknown
  misc_feature (557)..(558): "n" may be a, t, c, g, other or unknown
aaattttgttgctacagttagcagtgggtcagaaaacacttcaaagttcaaaagaaacttgatgtagatttaacttttttcccggtacttcctagttagctcaaggcaatgctattactgaatttcatgtacttgaatttaaaaactctaagtgccaacactgtaaacattttgtatcttctcaactaaaccttgcgggataacaaggaaaagagcaaagataagcagtaataattttgtgtataataaagctgatctatttttcagcttctggtttaaatttaaataagattttaaaacaatttttaaaggtccatgctacaattgtaaaggctatttctatgcacttttaattctggacacaattttcaaaattgcatgatggaggtaagaattttaaaaacccaccggaatgtaaataacagggaaagaacattttcaaatcaaagcatcaaacatacattcagggcagaaatctagaccactnttccaggttttaagccatcatggtttaatatncactntntgaccggaaanggacccgaaatccccatttnntt

SEQ ID NO: 7590 - DNA, 546 bp, Homo sapiens
  misc_feature (471)..(471): "n" may be a, t, c, g, other or unknown
  misc_feature (476)..(476): "n" may be a, t, c, g, other or unknown
  misc_feature (494)..(494): "n" may be a, t, c, g, other or unknown
  misc_feature (499)..(499): "n" may be a, t, c, g, other or unknown
  misc_feature (525)..(526): "n" may be a, t, c, g, other or unknown
  misc_feature (543)..(543): "n" may be a, t, c, g, other or unknown
ctttttgtatgttttaaattaccatattttattgaatataagatgccttctctgtaagatgtacccttattttgtatattgctaagaaagttaacatgttgcccattataacagtaaattctgcacactgagagacttcaaactttcctttcacatcaattctattttctgcaatatcaactgtgccattttcagattttaatgttgatttacattttaaaatatctttccttacttcattcaaataattgaacacttttgtttgtttctcagccagcatcctcttcatctcagtttgccatgtaatcttgggcctgtttatgtagaatctatgctttcttgaattttattcagagtataagcagatggtttctcttgaaatgattcaccagcactccaacaagttctccaattcgactctcatgggttggctgtttgctgaagaggcagacaatggaggtcttggtggcnttcgnatggacctacaggttggnccttncattggagacctcgaccagccaatgnntagagggatagctcacnctg

SEQ ID NO: 7591 - DNA, 551 bp, Homo sapiens
  misc_feature (486)..(486): "n" may be a, t, c, g, other or unknown
  misc_feature (509)..(509): "n" may be a, t, c, g, other or unknown
  misc_feature (511)..(511): "n" may be a, t, c, g, other or unknown
  misc_feature (514)..(514): "n" may be a, t, c, g, other or unknown
  misc_feature (523)..(523): "n" may be a, t, c, g, other or unknown
  misc_feature (532)..(532): "n" may be a, t, c, g, other or unknown
  misc_feature (538)..(538): "n" may be a, t, c, g, other or unknown
cagtggtgtctactttatttaaaaacattttgaagttagagggcctgcccctttttaataaggccgtggccagcactctctgtccccctcgctggtgatttcagtcttacattcataggaaggcccctgcccggggcagggcagccatcggctctttgccccagtaaaagtttctccttagtgagactagaaaaccaaaacaatgaaacccacccacaagggaaaaacaaaacaaaaaacaaacaaaaaaaaaggaaaaggaaaagaaaaaaaagcaaaagtactggaccattctgtgattccgtttaacctcggccacttcaggaacgctgcttctgtcagcttcctcctggcgctgctttaacctaaaggactgaggaaatcagaactcccagaagctttttcaaaaagtcataaaacagaaaacaaaaatcttcttttggctgcaaaattcccaagggggtggttgaatcgcctttttcctangggacaagccggcccgttgactnancanggaatggcntttaagttnatccanttccggcagttca

SEQ ID NO: 7592 - DNA, 585 bp, Homo sapiens
  misc_feature (500)..(500): "n" may be a, t, c, g, other or unknown
  misc_feature (524)..(524): "n" may be a, t, c, g, other or unknown
  misc_feature (535)..(535): "n" may be a, t, c, g, other or unknown
  misc_feature (566)..(566): "n" may be a, t, c, g, other or unknown
  misc_feature (574)..(574): "n" may be a, t, c, g, other or unknown
gcaagttttatggttcatattcaaagttcaatctatgtttcacatttttaagttcagacatatcaaagcctaaaagtacagaaggcttgtgattttttattgctttcatgcaaatataccttctttttccaaaaaatgaagccacatcaattttccacacccaaaagagtgaggacaacagttctatttcctttttactaggatatggtttcttatggaaataatctttaagaaattgcttcttttcttcataagaacggccttcatattttttaggatctaatgctaaaatctgaagagcctcgtccttgacaataggtccctctgttctgctttcattcctttgtcttttaaaaggcacaacactcgtcaccttttctggacccggggctgcatcggcatttaggatgggaggctgctcctccccatgccgctggtcttcggcccctaagtggccatcaggcagctttctcttaacagaaaaactggaatcatgcatnacttcaccactgactaaaagcagntcactggtggngaataaaacccgctgggcctggaaggctganctggtggnccttggaacac

SEQ ID NO: 7593 - DNA, 584 bp, Homo sapiens
  misc_feature (573)..(573): "n" may be a, t, c, g, other or unknown
cttcagaaacaagaactctttatttggttaaaaggagcacagggacatatgaagaccagagagttacaactttctcttgagaagaacaaggcgtaagcattgaagaaactaggagataagacagaaaggagccaccattttctatctcaagcaaaccctcatcaatgaatatgcgatcactgatgggttccaacccattttcacacgatttcgtagttcctttccttcctaaaatgtctgtgtgctgtgcttgtctccacactgatagtgactattcacctggtctcaaccacatgacctctttgtatactaatatagtcagaggctaaatacagctagggaaaccttagactaactttgcaactatctgcctccagtgtcaatcccaaaccccgaacaaccatctttgtttagtgggcaagagagggaccacattgatttcagaaccctcagagagctgcttctcattatataggcaacgtgtgaagacatatgatttaaattgggggatgtcacttcttttggtcaaattgactggattaagggttatgccctattaaccaaggtaccttnttccaaaactg

SEQ ID NO: 7594 - DNA, 585 bp, Homo sapiens
  misc_feature (478)..(478): "n" may be a, t, c, g, other or unknown
  misc_feature (496)..(496): "n" may be a, t, c, g, other or unknown
  misc_feature (508)..(508): "n" may be a, t, c, g, other or unknown
  misc_feature (535)..(535): "n" may be a, t, c, g, other or unknown
  misc_feature (541)..(541): "n" may be a, t, c, g, other or unknown
  misc_feature (574)..(574): "n" may be a, t, c, g, other or unknown
ctatatcgtctaagtttaataattccatcagagatggatcagttttaaaattggaatccgttacgtagaagctatccccattggatagagcagggcttggcagaccccgcctttgaatgaacaagtcgacttgctcagataatccttggagggaagagacaaatgcgaggagtgtctccacagccctgctttgctttgctttcgtcactgtcgcccagccatcgcctctgaaggcctgtgaagttggagcggccagccccagaagtggtgcccaaagcctgtctctcagtggcctcacctctggagggctgggcaacagcactggtcagaagttccgacagctgaccaccctcttcggctgagctagaggtcttggctgggctctaggggagcctcgagctgccccacggagaccagggtgctgagctgtcccgaggcaccgctttcggtgggaaggtgaccaagtctgagttcttgntctcactctgatcactgngctgcttcttgnggcatctcaagagagtcatccctgacnaaggangccccgcaggtctcacagcggaaaggcctttgngtacgatcttg

SEQ ID NO: 7595 - DNA, 577 bp, Homo sapiens
  misc_feature (527)..(527): "n" may be a, t, c, g, other or unknown
  misc_feature (545)..(545): "n" may be a, t, c, g, other or unknown
  misc_feature (551)..(551): "n" may be a, t, c, g, other or unknown
  misc_feature (554)..(554): "n" may be a, t, c, g, other or unknown
caagtttgctattgtatcagaaacatatcttttagtattaacagtttccaaaggattatgtcttccacattccttatactgatagatttccccttggctatgatttccctgatatgcaaaacagttccaatccatggtgacatgtatatacattcttaatatttataaatttttacttgtctatagtctagtattgttataccatgtggtcttgttataatcatggtttccattctgtgagtcttcagattatgagtccaacacacaaggggatgtccacactaacctgtgtgaactctctgatgtacaaggtgtttgacttcaggcaggagtttctgattcactatactgaaagggttctctgatataaaatgaggtctgacttcagagaagccttcccacatctattacattcatattgcctctcctatgaattctctgatggctgttgaatgctgatttgtggtagaatttttttcccattcagtacactcatagggtttctctcctgaatgagtctataatgnacagtgaggtatgacatncgaganaangcttttccccctcatacattcaa

SEQ ID NO: 7596 - DNA, 582 bp, Homo sapiens
cttgtgtgaacacgataccagcacctccaacaccacatagaagctgaaagaggggttgagcctctcaacccttgtcctgggagcttcaagtatggtgaggcacaacttttattaaaagagtttacaaacagaactattaaacacacacacacatacacacacacatatacacacacaccccaaaaaaagatacactctccacgcccacccacagataggaatgttggctaagggataatccctcaataacagggaccgatggcattgatccccacagcctagagccgagacaggctctgtcttcatcactgtcctggggccagcacgtctaaggcaaaaacctgctgggaagattaaaggagctccagaaaggaagagatctttcaggttgaggtttttccctaaggtccgtgaggcaggtccctagagttaaaggcacattattggagaaaaggcccctggatgtagagaagaaaggactcttctctggcaccaacagcaataaaatttactggttgaaaacatcctgcatctgggagaaggaagaagctttatatataaatctcttctagtttcttggct

SEQ ID NO: 7597 - DNA, 572 bp, Homo sapiens
  misc_feature (520)..(520): "n" may be a, t, c, g, other or unknown
  misc_feature (557)..(557): "n" may be a, t, c, g, other or unknown
  misc_feature (572)..(572): "n" may be a, t, c, g, other or unknown
ctcatggccagaattgaaaattttctcatccagaaatttagggcacccaattattgaatacccttatcatattgctttaaatgacagaaagattaaagctggcatcctctatagtatactaagcatgaatgtaaagtatgagaataaataggagactttcctaaatgtcaaattacaaaaccgctcaaaactttgtaattgtgactcatgcaaataccttgttaggtcaacttaatattacaaatactgcatcagctcggtgcctttatatcccttttcataaaaaagaaattctcactccactcctgaagccagcaaacagctctggaggaattacctgtacacccaagtgccacggtcactctggaattttaatacacacacacacacacccttactcatgaacatacacattttacaaacacacaatggtgtacacacacacacacacacatccacacacaccccatctttaggattggaagctgattccaagcctggccttattctatctaaattntcttggatatcctgaacacctggtggtcacaaaatgnatcttttacctcctn

SEQ ID NO: 7598 - DNA, 456 bp, Homo sapiens
  misc_feature (383)..(386): "n" may be a, t, c, g, other or unknown
  misc_feature (418)..(418): "n" may be a, t, c, g, other or unknown
  misc_feature (432)..(432): "n" may be a, t, c, g, other or unknown
  misc_feature (450)..(450): "n" may be a, t, c, g, other or unknown
gggtttaggaacactggaaaataaataattcagcataatccaaaaataacatactccttttaaccatcattatttgagtgctctctagaacactcaaaaaaatgaactgcactttaaaagttaattcattaattttaaaggcaatttaaataatctttacatcttaaatgaacatctttaaaaagcaacttcagaaatcaaattgaatatcaaatttggcacaaaaattaaggaatttccttaaaacagttgaaacaaagttaaaacaaggtccttaaaatatctctgaatgttttatacagagataaatgttttatacagtgtttaatacagtgttttatacagaatgttttatacagtgttttcataaaaacactgccagnnnnccccggttacacctgtaatcccagcacttttnggggccaaggcggngagatcacttgaggtcangagctc

SEQ ID NO: 7599 - DNA, 584 bp, Homo sapiens
  misc_feature (513)..(513): "n" may be a, t, c, g, other or unknown
cattgaaagggctataaaattcaacatactgacaaggaagcaacataatcacatagataacgcctctgctaattgcttttacctaacttcacccttaaaggtgagctgcacactcagctacacaagtttctagactgtgcgatggcttcaaggctggcctaccacaactgactgaaaaaatgtcatgttggtaagctgacactgacttgtatgtttttaaaaatggagagacaatggcaaattgtaccttatgtccttatagaacccaaaggatcattctgagtaaatgtgaaataaataaagtgatccatgagtaaatacaatctctgggctaacttaaacctagaagagtgagccaagtgagcactaacaataccacttagaaatgtctagaaacatcatttctagaactcagcttgggagaccatatcttgcctgaatatgtacatatatttacaaaatattcccttttggcctctggaatttagccattttagtttggctgttagctgntttctttccatatgctagccaatactgcagttataactatcattaaaatactcttatgcatgaattccaat

SEQ ID NO: 7600 - DNA, 592 bp, Homo sapiens
  misc_feature (1)..(592): "n" may be a, t, c, g, other or unknown
nnnnnnnnnnnnnnnnnnnnnnnnnnnnnnnnnnnnnnnnnnnnnnnnnnnnnnnnnnnnnnnnnnnnnnnnnnnnnnnnnnnnnnnnnnnnnnnnnnnnnnnnnnnnnnnnnnnnnnnnnnnnnnnnnnnnnnnnnnnnnnnnnnnnnnnnnnnnnnnnnnnnnnnnnnnnnnnnnnnnnnnnnnnnnnnnnnnnnnnnnnnnnnnnnnnnnnnnnnnnnnnnnnnnnnnnnnnnnnnnnnnnnnnnnnnnnnnnnnnnnnnnnnnnnnnnnnnnnnnnnnnnnnnnnnnnnnnnnnnnnnnnnnnnnnnnnnnnnnnnnnnnnnnnnnnnnnnnnnnnnnnnnnnnnnnnnnnnnnnnnnnnnnnnnnnnnnnnnnnnnnnnnnnnnnnnnnnnnnnnnnnnnnnnnnnnnnnnnnnnnnnnnnnnnnnnnnnnnnnnnnnnnnnnnnnnnnnnnnnnnnnnnnnnnnnnnnnnnnnnnnnnnnnnnnnnnnnnnnnnnnnnnnnnnnnnnnnnnnnnnnnnnnnnnnnnnnnnnnnnnnnnnnnnnnnnnnnnnnnnnnnnnnnnnnnnnnnnnnnnnnnnnnnnnnnn

SEQ ID NO: 7601 - DNA, 592 bp, Homo sapiens
  misc_feature (390)..(390): "n" may be a, t, c, g, other or unknown
  misc_feature (438)..(438): "n" may be a, t, c, g, other or unknown
  misc_feature (460)..(460): "n" may be a, t, c, g, other or unknown
  misc_feature (471)..(471): "n" may be a, t, c, g, other or unknown
aactttggggatgtttattgcaaatggttataatttaagtgatatttacaattgtttaagacagagggcaaacaggctctgagccaggcctcagctttagaggcccatcctggagaggaaatggcacttgcagggaacatgagctcaatcactattgctcactaagcacagggtcacactggagtcatcttagggaggctgcgaggaagaaaagagagtgcacagagccatgaagcaactactttaaattctgaatcttgctgtgttcccactgagcatgctgccttcctagagcaggccttggagccatcccagggactaacacagatccttcctggggcgcaggcttctcacactagcgtagggtgcctaggtcatcctcatcattgnttatcatcacagacttctttctgcctgccagatatcttccctacttgnggctttaaaacaccagcaggangggaagtcaanggaatggtcttggtaagtataaatccatagcaaaaacgatttgagaactggatgctttccaaggttgcaggtgtttggatggttcctgaatctttatcccaggatcttgaatggggggcct

SEQ ID NO: 7602 - DNA, 540 bp, Homo sapiens
  misc_feature (106)..(106): "n" may be a, t, c, g, other or unknown
  misc_feature (146)..(146): "n" may be a, t, c, g, other or unknown
  misc_feature (148)..(148): "n" may be a, t, c, g, other or unknown
  misc_feature (166)..(166): "n" may be a, t, c, g, other or unknown
  misc_feature (186)..(186): "n" may be a, t, c, g, other or unknown
  misc_feature (225)..(225): "n" may be a, t, c, g, other or unknown
  misc_feature (228)..(228): "n" may be a, t, c, g, other or unknown
  misc_feature (266)..(266): "n" may be a, t, c, g, other or unknown
  misc_feature (319)..(319): "n" may be a, t, c, g, other or unknown
  misc_feature (383)..(383): "n" may be a, t, c, g, other or unknown
  misc_feature (389)..(389): "n" may be a, t, c, g, other or unknown
  misc_feature (420)..(420): "n" may be a, t, c, g, other or unknown
  misc_feature (430)..(430): "n" may be a, t, c, g, other or unknown
  misc_feature (459)..(459): "n" may be a, t, c, g, other or unknown
  misc_feature (463)..(463): "n" may be a, t, c, g, other or unknown
  misc_feature (488)..(488): "n" may be a, t, c, g, other or unknown
  misc_feature (499)..(499): "n" may be a, t, c, g, other or unknown
  misc_feature (512)..(512): "n" may be a, t, c, g, other or unknown
  misc_feature (520)..(520): "n" may be a, t, c, g, other or unknown
  misc_feature (536)..(536): "n" may be a, t, c, g, other or unknown
ctttttaatacccaaaccatccattttcaaagctttttttttaaaaaaattgttttttgattaaaaaaaaaaaaacaaaaaactaaaactgccacaaatactgaanaggcaagctccaggcctggcctttccagctggaggcccgntntcccgtggaccgcaccgnaaagcccagcccggcactgntgggtgaccgtcccatggctggttcgccccggaccactntgntgaagtccaggtgggtgttaaatgcccggcggcatcgntaaataaggacaaggggaaaaggcagcccacctttccctgaacaccttccatntgggctgaactttcttgggaatgtataagttatctggatgaaggaggtgggagatggagaaaantaaatnccaagaactaaagtgagggtcccaggacctntggtggcagntcagcccctggggcaaaactggcctccangganggaaccctgattatccaaatactgngcttttgaaanttggtttcttcanaaccttgncctgggggactgagtntaaa

SEQ ID NO: 7603 - DNA, 589 bp, Homo sapiens
  misc_feature (197)..(197): "n" may be a, t, c, g, other or unknown
  misc_feature (432)..(432): "n" may be a, t, c, g, other or unknown
  misc_feature (522)..(522): "n" may be a, t, c, g, other or unknown
  misc_feature (551)..(551): "n" may be a, t, c, g, other or unknown
  misc_feature (589)..(589): "n" may be a, t, c, g, other or unknown
gccagtgctatggtgcctgtttaattgaaatcttgtaataaaagtttaaatacataaaatttttttttttttttatcaaaagaacatcccccacttccctgaccagatacatccagaggggaggcaagtggagactggctgtctgtagggagtggagaaatggcaggtccagcttgggctggtgtcctcttcctcanaaagtgctgtgggtgaacccagagtctcagggagcagaagcccccctcgctggctttcttcacgcggggtcctcggcaagctgctctgcactgcggagaacgtgcgccttgtcctcagaagacgaggaagagcagggcctcatgccggggcagtacgatgttctccacagtgcgctccatggcgcgcacctgctccggggaggctgtcaggaacgccaggggcccgatgcgctgntccgcacaggagtggcagaagtagcccccctggtttccttcctgtgctataggtgatgagcactttttcatggtaaggacggggtcacangggatggcattgtgcactggcccacgcanaagggcaccacgcctggttttaaaacgttgttggaacn

SEQ ID NO: 7604 - DNA, 584 bp, Homo sapiens
  misc_feature (406)..(406): "n" may be a, t, c, g, other or unknown
  misc_feature (483)..(483): "n" may be a, t, c, g, other or unknown
  misc_feature (485)..(485): "n" may be a, t, c, g, other or unknown
  misc_feature (557)..(557): "n" may be a, t, c, g, other or unknown
  misc_feature (565)..(565): "n" may be a, t, c, g, other or unknown
  misc_feature (570)..(570): "n" may be a, t, c, g, other or unknown
  misc_feature (582)..(582): "n" may be a, t, c, g, other or unknown
aagaaaaaatgtctattatttattacacaataattctgaccaccaacaaccaacggcgggggcgggcaggagagaagaacatcttgcttctcaacaaactttcctcccttgctttaacatttttgaggattctttcccaaacctattacacctgtattatgatggttacaaattttccaactcttccactccttccagtgcattatttttagtatcttcattaaacgggcaaaaaaaaagatcccctacttgtaataacaaaacaatgttggaaactgtcattaaatcaggataagtgaaaaacagatctgttcccagactcgcaggactataagtttaggaagtacacaaaaaaattaaaaattaattacacaataggatacattaaatatgtgcagctttttgnatgtgaatcatacctaagtagttttaaaaacaaatggatccaacccatccaccaactaataaagaccaaccgagtcntncaaaggaaaatcacactttttgggttactcctacttgggttaagacccttaccataaaattgctgcatgganatggtctntaatncaccggtgaatntt

SEQ ID NO: 7605 - DNA, 551 bp, Homo sapiens
  misc_feature (76)..(76): "n" may be a, t, c, g, other or unknown
  misc_feature (279)..(279): "n" may be a, t, c, g, other or unknown
  misc_feature (291)..(291): "n" may be a, t, c, g, other or unknown
  misc_feature (453)..(453): "n" may be a, t, c, g, other or unknown
  misc_feature (455)..(455): "n" may be a, t, c, g, other or unknown
  misc_feature (471)..(471): "n" may be a, t, c, g, other or unknown
  misc_feature (512)..(512): "n" may be a, t, c, g, other or unknown
  misc_feature (525)..(525): "n" may be a, t, c, g, other or unknown
  misc_feature (532)..(532): "n" may be a, t, c, g, other or unknown
  misc_feature (549)..(549): "n" may be a, t, c, g, other or unknown
cacacttgcatttttttaataaggaatttaagatccatagtatctttaatgctcggaagagacacaaattcaaggngataaaaatattaattagaagacacataacatgcctcaagtatatcaacacttgactccacaaacaaggcataaccatgaaaacaacactccctttattttgggctcccaaaatcaaaagttagaactaatttatttaatcacagatatttagtatactcaataatgcactaacaatttctttaaaaaaacactaatactgtncagtatttctgngttttagtttttcccacagctgttgaaaatttcagccttgatttgaaacatgacctgcatgacaggctataagttgtcaatagttctttttctttggaaaagtcagctgtggcatttactcactttagcagatagctaaaagggaaaaataagggaaaaatntncactggacctgcagtnaagttttggaaatgccagggtcaaaaaccgatgaaccaccnttgctggaaaatnaaaggtntgcattgggctaaaaanag

SEQ ID NO: 7606 - DNA, 560 bp, Homo sapiens
  misc_feature (507)..(507): "n" may be a, t, c, g, other or unknown
  misc_feature (534)..(534): "n" may be a, t, c, g, other or unknown
  misc_feature (538)..(538): "n" may be a, t, c, g, other or unknown
ggtctccatatacatttattttgtgtagacaacaatgacttttcaccatttcctttcctgtggttccatggttctcaaaatggtaatttcatttatacatagcaaaaagttcacaaaacctttcagcactgttcacattttcacatttgtttaggaaacaatttgtttaggaatacagctagctgattttcttctgatttcttccacttttggaatcccacataataataatgttaaagtataccaagaagaacaggaagttcaagcaagatacaaaacacaccaatacagaaaacaagtccggtagtttctgaggaggatccagtgtgacagtcatcaacgtcagaagcaccatagtgatgactgagataagaaacaaatattgtataattctggaaagaaatgtaaaacatggaagatatttcctcacagaaatggaaaaggatttcaactgcagtcttcttcagaagtcttttcaaatattggaaaaggaagttccacaagctnttaaaaatgccatggtggcacaccganggcnttggagtcatccttataaaaag

SEQ ID NO: 7607 - DNA, 421 bp, Homo sapiens
  misc_feature (372)..(373): "n" may be a, t, c, g, other or unknown
  misc_feature (394)..(394): "n" may be a, t, c, g, other or unknown
  misc_feature (412)..(412): "n" may be a, t, c, g, other or unknown
  misc_feature (416)..(416): "n" may be a, t, c, g, other or unknown
  misc_feature (418)..(419): "n" may be a, t, c, g, other or unknown
caagttgattttattaacaaaaagtgcaaactattttgaacaaaagtaaactatgagtcacagcattcagcaagacatcagacacggaagagtgaacaatattcactaagtaaaatacagcagatgagatgtctctcacatgtatatttaattattcatgctttttcaatagtctcttagtcaactttcagtgtaatttccacaaatatatagcagctcaaacacaaatgcaggagcacaatggcaaagtttggcaactgttttgggctaattatgagtatgaaagaaaaccctatatcacagtttcacgttcatgtaagccactgtgcaacatgaatgaatctttaaatgtgttgacactgaaatcaatgnncaactaatgaaaataaagaanaaaagggggctttaaaanattngnngc

SEQ ID NO: 7608 - DNA, 553 bp, Homo sapiens
  misc_feature (484)..(484): "n" may be a, t, c, g, other or unknown
  misc_feature (539)..(539): "n" may be a, t, c, g, other or unknown
  misc_feature (543)..(543): "n" may be a, t, c, g, other or unknown
gagaacttctaatcttacatgtttaataccaaacacaaagcaaacacattcatcatctagagtactatattccaaccctatctcaaatgcaggaatgggcctctatctggtatctagaggatgatcataggaaacaaaatgaggacagaggcatctggtatcttctaaaagtggtacaaaactcccgcctgtcatgtcataaagctccccatctggtgctgcgacccacctccaagagaaagccaaaggaacagaccaataaaaggggtccggggtgctttctctatttcactcactcctcttatttgctaaggagctccaataaccaaaagaaatggttcctagaagaagagaactaaatctccagagagctgctggggcataccgataaaaactgggagaaacaaagactgacagcagagaagtccaatactgctgctaaagtttctcagcctaaatccgggaaagagctgggatctactgntttgtcagtaagaggacttttgggcctggatgacctttcacttttgcttgatgcncctntaaaacggtt

SEQ ID NO: 7609 - DNA, 555 bp, Homo sapiens
  misc_feature (488)..(488): "n" may be a, t, c, g, other or unknown
  misc_feature (498)..(498): "n" may be a, t, c, g, other or unknown
  misc_feature (547)..(547): "n" may be a, t, c, g, other or unknown
gcaagtttatgaatagtttattacatttcagtaagtgtattgtgaatcaataaagcaaaagttaaggacaatgagctcattaccaagccagttattgattctctggttccaaaatagaacagtacaggaagggtatagagaaaataggatttttcatgataaaaattttaagcatcttaggaacacagacctaaagaaactataagacacaacggaaatttcagcagctacttaggatgtttatttatttacctttttttgccaattagaattagttatttggtttttactcttaaaaaaaaaagtattttcaactcaagtcagaggagtttgccaaaactgaatattacctcttactgacttaattattctttcaatttcttgtatatcttcctctcttgcctttgaaaagtttaccttactagctatctatcttatatcactgtcgtagctcagactgccctaacaaaataccataggactggggnggtttaaccnccggaaattaatttcctcacagtctggggattagaagtcaactcaaggngtaagctg

SEQ ID NO: 7610 - DNA, 560 bp, Homo sapiens
  misc_feature (526)..(526): "n" may be a, t, c, g, other or unknown
  misc_feature (537)..(537): "n" may be a, t, c, g, other or unknown
  misc_feature (539)..(539): "n" may be a, t, c, g, other or unknown
atgttttgtcaagaactttaattatctctttacagggtttatgccagttacatacaaggatcctgcatatctcaaggaccctaaagtttgtaacatcagatatcgggaataaattctatcacgttaccactaataaacttattttacagtaagtggttgtatgatgccaatactgactcaaaccaacctttggatagaaaagtgtttgaggagtgaggtaaagaatgacacttccccttcataccaatgtccattaagcagattgcttatttaaaatgttaacactcatcacattttatctatgttgaataaatgtggttctgtgtgattgtcatttatatctgatccccaaatagctcatacaataatccattcaatagaatggaattaaaactgttcagaatgattttccaactagcaaatataagtatgcctggttaagatatcttccctttgtagaaatggtacattgggatgggatagtggtgctggcacagaaggccaaaatattcctagacgagctatnctcaaacccgnantggcttttacatggaagagag

SEQ ID NO: 7611 - DNA, 556 bp, Homo sapiens
  misc_feature (1)..(556): "n" may be a, t, c, g, other or unknown
nnnnnnnnnnnnnnnnnnnnnnnnnnnnnnnnnnnnnnnnnnnnnnnnnnnnnnnnnnnnnnnnnnnnnnnnnnnnnnnnnnnnnnnnnnnnnnnnnnnnnnnnnnnnnnnnnnnnnnnnnnnnnnnnnnnnnnnnnnnnnnnnnnnnnnnnnnnnnnnnnnnnnnnnnnnnnnnnnnnnnnnnnnnnnnnnnnnnnnnnnnnnnnnnnnnnnnnnnnnnnnnnnnnnnnnnnnnnnnnnnnnnnnnnnnnnnnnnnnnnnnnnnnnnnnnnnnnnnnnnnnnnnnnnnnnnnnnnnnnnnnnnnnnnnnnnnnnnnnnnnnnnnnnnnnnnnnnnnnnnnnnnnnnnnnnnnnnnnnnnnnnnnnnnnnnnnnnnnnnnnnnnnnnnnnnnnnnnnnnnnnnnnnnnnnnnnnnnnnnnnnnnnnnnnnnnnnnnnnnnnnnnnnnnnnnnnnnnnnnnnnnnnnnnnnnnnnnnnnnnnnnnnnnnnnnnnnnnnnnnnnnnnnnnnnnnnnnnnnnnnnnnnnnnnnnnnnnnnnnnnnnnnnnnnnnnnnnn

SEQ ID NO: 7612 - DNA, 557 bp, Homo sapiens
  misc_feature (468)..(468): "n" may be a, t, c, g, other or unknown
  misc_feature (506)..(506): "n" may be a, t, c, g, other or unknown
  misc_feature (522)..(522): "n" may be a, t, c, g, other or unknown
  misc_feature (550)..(550): "n" may be a, t, c, g, other or unknown
aataaaaagcatgaacatcattttcatgtacatatgtgtatacacaaaaagatttgtgaacttgaacaaggcaagagatacaatctaaactacaaagagaacaaaagctaacccctaccttggcccccggagtaagagatatcattctgaggaacaccaagtggaagcctctaaaactgcccccctccccagccaaactctatgatcaagatagtaaatgaaaaacaatattgtgggaggggtagtgaggtttataagatataaaaaagtaaaatatatttcatatcttgtaaaccctactatacatattagtgcagggagccaaaggcccatgggacatgacaaactcagcattccgctggaggctatatgatcaaacagcaaactgtttatcatgaatgcaggatgtgggcaaactcacactgccctgccaccattgccacagttaccatattaacagggcttttncctggacatgtcctaggacttaagctgggacttgctgnggaaggattttccccnttactgaatcccccgtttttccttgggnggatctt

SEQ ID NO: 7613 - DNA, 557 bp, Homo sapiens
  misc_feature (557)..(557): "n" may be a, t, c, g, other or unknown
attgttagaccagtaatgcagttttcatattttgtataacaaaaaagttgtaggacttttccttcttactgtgaaaatatgactcattaaatacataacttttagtattggccatttgtattcttatattcttagtcacaaagataactacgttttacaaagtcgaaaggttaataatagcagctagcatgaattcagagcttgctatgtattgagcactgggtttaaacacatatgctctattttattaagtccttatagtaggaaagtgaagaatacactagtcactgaagttccttcagtgctcaagactcaagtgcactatagcaagacaaacaccaggaaacatgtaactctgcttcgaatactttagcaagtgaatggcccagtttgggaaagcaagacaaacactggatccataatggctttttacacctgattggaatgcagaaaaaatggaaccactaactactaatattatctttgccagcaggtgacagtacatacctgacttcagaggattttattggaacctcatagatgatggtaataaaacn

SEQ ID NO: 7614 - DNA, 566 bp, Homo sapiens
  misc_feature (81)..(81): "n" may be a, t, c, g, other or unknown
  misc_feature (511)..(511): "n" may be a, t, c, g, other or unknown
  misc_feature (537)..(537): "n" may be a, t, c, g, other or unknown
  misc_feature (559)..(559): "n" may be a, t, c, g, other or unknown
gaaaaagagcctacagcacccccacccctacctcaccactccccaaaccagctcaagagttaaagccaggaagtggggcanactggggagaggaggcttgtgtggctccctctagtgttggttcactgctgtgcagcacacagcagtatctgggtcaatgaggacatggtcctagcctttctttctccaccaggaccctgacttatctggctggcccagcatggaggagaaggaaagcgggccgtgctgccggggggattcctggatccctctgcatgctgacagacagctgtccacagtgggtagccaaggtgactggcattttgatcccagctgaatgaagactggatttgaatgcagtgccagggctgttctgtagacaagagcgaacagtaccctgttcgctcccttctgcagtaccctgaggaaggagagaggcacccagggcacgaatgcagacaacagagggactggccaggctatcccgttttcacctgtctgtgccacaagncacccattccatacttcatgtcctangccaaagctggccatcctgggnaccccat

SEQ ID NO: 7615 - DNA, 560 bp, Homo sapiens
  misc_feature (46)..(46): "n" may be a, t, c, g, other or unknown
  misc_feature (48)..(48): "n" may be a, t, c, g, other or unknown
  misc_feature (152)..(152): "n" may be a, t, c, g, other or unknown
  misc_feature (175)..(175): "n" may be a, t, c, g, other or unknown
  misc_feature (245)..(245): "n" may be a, t, c, g, other or unknown
  misc_feature (268)..(268): "n" may be a, t, c, g, other or unknown
  misc_feature (285)..(285): "n" may be a, t, c, g, other or unknown
  misc_feature (291)..(291): "n" may be a, t, c, g, other or unknown
  misc_feature (305)..(305): "n" may be a, t, c, g, other or unknown
  misc_feature (319)..(319): "n" may be a, t, c, g, other or unknown
  misc_feature (385)..(385): "n" may be a, t, c, g, other or unknown
  misc_feature (420)..(420): "n" may be a, t, c, g, other or unknown
  misc_feature (450)..(450): "n" may be a, t, c, g, other or unknown
  misc_feature (458)..(458): "n" may be a, t, c, g, other or unknown
  misc_feature (489)..(489): "n" may be a, t, c, g, other or unknown
  misc_feature (495)..(495): "n" may be a, t, c, g, other or unknown
  misc_feature (505)..(505): "n" may be a, t, c, g, other or unknown
  misc_feature (511)..(511): "n" may be a, t, c, g, other or unknown
  misc_feature (532)..(532): "n" may be a, t, c, g, other or unknown
  misc_feature (551)..(551): "n" may be a, t, c, g, other or unknown
aagtccattacagggcacatttattgactctgggtatcttcacagngngatcttcaccacagcttgcaaagggtaaccactcagcaccttctgcttccttctgttcagtttttccactgcaattcttccagcataattttctgatagccagngtatgactttggctttgacttgnttctacacagggggtccagtcatttatttctggaacttgatcagtctttttccaggtatataagcaaatntttccacactccaatcctactgnaaccacgtatcgttganaagggnggagcactgggcanacgctgacagctgncacagccccacccacgtccaggactgaggagcaggggccaatgttgggctcaatacagtcatcagnggagtcgcacacaccccagacaaccacctttttgnctcgactcccagtgaagaaatacttgctgncaggactncaatcacaagacccaataattctactgggcncagaantaatttggtngggaangcaaaagcttaaaactggttnaactaggggaaaatggganccggttttc

SEQ ID NO: 7616 - DNA, 572 bp, Homo sapiens
  misc_feature (525)..(525): "n" may be a, t, c, g, other or unknown
  misc_feature (537)..(537): "n" may be a, t, c, g, other or unknown
  misc_feature (559)..(559): "n" may be a, t, c, g, other or unknown
  misc_feature (567)..(567): "n" may be a, t, c, g, other or unknown
gagagctctgcatacattcccacttttcctgtcaaagtggacaaaatgaagagtctcatgagtggaggggcattctgatcccaagagaccacccatctgtggagtggctacacagccagaatgtggatgtgaaccaactcaacgtgctccccagagactgaagaagcggcgttttagagctttggtttcagtctcttggaggagattttcagaaatggccaatttatgtgcaaaggtgacttttctaggcacccaggaaggcaaatttaagctccgagctgtatcaactgcattctgttcctatcatcagaagtctcagaattgaacagtaaatggtgcctacttggctccttgtcaaaataagtctgcatggctctcacaacaaggcagacagctgttcgttccgctggaaaggaaaggagatgaactttgttttgcctagcgttttgggaatcgtgaccacaatttaatacaatcaggtgtagtttggttaaggaattatcaaagatcatacttggctgtcanaatggaattganggccgataggcagactttgccntatgctanccgaa

SEQ ID NO: 7617 - DNA, 568 bp, Homo sapiens
  misc_feature (494)..(494): "n" may be a, t, c, g, other or unknown
  misc_feature (554)..(554): "n" may be a, t, c, g, other or unknown
gagacagagtcttgctttgtcaacaggctggagtgcagtggcgtgatctcggctcactgcaacctccacctcccgggttcaagcgattctcctgccttagcctcctgagtagctgggactacaggcgtgcaccgccacacccggctaatttttttgtattttagtagagacggggtttcaccatgttggccaggatggtcttgatctcctgacctcatgatccacccgcctcggcctcccaaagtgcttggattacaggtgtgaaccaccgcacccggtctggaggtcttaatggtcccccagagtcacccgctccacctgcagagtggcagtaccaccgtaacttgctctacacaggcaacaaggccattttcagctgttactcagaaacttgcttcttggtgatattaggtttaaaagacaagaaagaaatcttattctacagggttggagaaagggaaaattataacacaaaagcccacttcagtctctgntgattctgcaagagtcacagctgagttctgaggccgccttttttcaccagcccatttcanctggcagcacaagg

SEQ ID NO: 7618 - DNA, 570 bp, Homo sapiens
  misc_feature (470)..(470): "n" may be a, t, c, g, other or unknown
  misc_feature (512)..(513): "n" may be a, t, c, g, other or unknown
  misc_feature (516)..(516): "n" may be a, t, c, g, other or unknown
  misc_feature (535)..(535): "n" may be a, t, c, g, other or unknown
  misc_feature (553)..(553): "n" may be a, t, c, g, other or unknown
atctccaaagtttattttatatagcacacatttatatggaactgtaacagtgtttcaacacaagacatttgtgcagaaaaataacaggaactcttttgttaggatgattgtctctgttttatacatgaaagagctagtatataaaaatagtttttaaaccaaaggtaaccttctctattctatatcaaaagtacaatactctgagtggcaaagaaccagggaatctgaaagaattacctccttttactaatccaagactggcagccaaaaggaacactggcctgcttcagactatttacgattcaacactgaaaactcattaggagaattaatctgcatttgaattttatggaatcatatactgtgtgtgcatacatacgtgtatgtacatctgtgtgcatttctgtgtgcccatcacacgaactcactggcagccagtggctagagaaaggcaagcaaattttggttgnatctcaagcctgagtgtatctcacgacagaactggagagtcnngcngaaaagactttaacattanaggaattaacttcccccnggacaccggcctttctt

SEQ ID NO: 7619 - DNA, 500 bp, Homo sapiens
  misc_feature (424)..(424): "n" may be a, t, c, g, other or unknown
  misc_feature (460)..(460): "n" may be a, t, c, g, other or unknown
  misc_feature (468)..(468): "n" may be a, t, c, g, other or unknown
  misc_feature (472)..(472): "n" may be a, t, c, g, other or unknown
  misc_feature (479)..(479): "n" may be a, t, c, g, other or unknown
  misc_feature (492)..(492): "n" may be a, t, c, g, other or unknown
  misc_feature (494)..(494): "n" may be a, t, c, g, other or unknown
agagaagaaaacaccatctttaatcaacccgcctgcacagaaaccaggagagcactcccctccttgcaaggtcccagtgaaaagagaacctggtccccttgcaaaaaccatcttataaaaacaaaaggcttcaaagcaccagtggctacacccgttgagtagaaaggggcttgggggagagttggggtgagagaggtgagggctggaggcagggctggcccagtgaagggcagtagcttagcctgagggagctgcccccctctcaagctgtacccaccagctgggagctccatgcctgtgggggccagaggaactcctgggcctggctgcttgcatttgggatggtggggtggggttgccagccttgctcaggatattttggccttagagagtaggggaatgatagattggagggtagtggganaagaacggaatggtcaccacagacaggcttaagtgncaaacatntggnccatttnggggccccccaantnctcatg

SEQ ID NO: 7620 - DNA, 372 bp, Homo sapiens
  misc_feature (118)..(118): "n" may be a, t, c, g, other or unknown
  misc_feature (211)..(211): "n" may be a, t, c, g, other or unknown
  misc_feature (217)..(217): "n" may be a, t, c, g, other or unknown
  misc_feature (280)..(280): "n" may be a, t, c, g, other or unknown
  misc_feature (305)..(305): "n" may be a, t, c, g, other or unknown
  misc_feature (349)..(349): "n" may be a, t, c, g, other or unknown
  misc_feature (354)..(354): "n" may be a, t, c, g, other or unknown
  misc_feature (362)..(362): "n" may be a, t, c, g, other or unknown
  misc_feature (364)..(364): "n" may be a, t, c, g, other or unknown
  misc_feature (369)..(369): "n" may be a, t, c, g, other or unknown
ccggtatccactggaagtttatttctttagggttctatcccaaccagtcgcttaaaaaccaagtaacacagacctgaggggagggggctggggactgcacctccctcctactcatggnggacagcagtggggactagggaggggcaggagaggtggctgaagcaaggcagcagtaatggggccacgacgccacagagccagctccgtcctntcccanaccctggtgggagtccctgtggcttggggtggggagtgggggacccaccccaggccctccctntcccttcctcagacagcctcctttngggctcaacccatttcttccgcaggagacttgaggcacacaganaggangaagtggnanaggangac

SEQ ID NO: 7621 - DNA, 504 bp, Homo sapiens
  misc_feature (382)..(382): "n" may be a, t, c, g, other or unknown
  misc_feature (408)..(408): "n" may be a, t, c, g, other or unknown
  misc_feature (414)..(414): "n" may be a, t, c, g, other or unknown
  misc_feature (419)..(419): "n" may be a, t, c, g, other or unknown
  misc_feature (451)..(451): "n" may be a, t, c, g, other or unknown
  misc_feature (461)..(461): "n" may be a, t, c, g, other or unknown
  misc_feature (501)..(501): "n" may be a, t, c, g, other or unknown
  misc_feature (504)..(504): "n" may be a, t, c, g, other or unknown
gagacagagtctcactctttttgcccaggctggagtgcaatggcgcaatctcggctcactgccacctccacctcccgggttcaagtgattctcttgcctcagtctcccaagtagctgggattacaggcatgcgccaccacacccagctaattttgtatttttagtggagatagggtttcaccatgttggccaggctggtcttgaattcctggcctcaggtgatccgactgtctcagccccccaaagtgccgagattacaggtgtgagccaccacacccggcccccagcaaagagaatttttaacaactgctttggtctccagagccagttcttggccctcttcttactgatatacccatctcaaacgtccttgctactctgngattggagaatatctgatcaaccttntggganccaanaaagtagttgggaaatgggaaggtgggccaanaaaagaaggnagactcaatcggctgggggttaccgggggattcaagtgangcn

SEQ ID NO: 7622 - DNA, 576 bp, Homo sapiens
  misc_feature (1)..(576): "n" may be a, t, c, g, other or unknown
nnnnnnnnnnnnnnnnnnnnnnnnnnnnnnnnnnnnnnnnnnnnnnnnnnnnnnnnnnnnnnnnnnnnnnnnnnnnnnnnnnnnnnnnnnnnnnnnnnnnnnnnnnnnnnnnnnnnnnnnnnnnnnnnnnnnnnnnnnnnnnnnnnnnnnnnnnnnnnnnnnnnnnnnnnnnnnnnnnnnnnnnnnnnnnnnnnnnnnnnnnnnnnnnnnnnnnnnnnnnnnnnnnnnnnnnnnnnnnnnnnnnnnnnnnnnnnnnnnnnnnnnnnnnnnnnnnnnnnnnnnnnnnnnnnnnnnnnnnnnnnnnnnnnnnnnnnnnnnnnnnnnnnnnnnnnnnnnnnnnnnnnnnnnnnnnnnnnnnnnnnnnnnnnnnnnnnnnnnnnnnnnnnnnnnnnnnnnnnnnnnnnnnnnnnnnnnnnnnnnnnnnnnnnnnnnnnnnnnnnnnnnnnnnnnnnnnnnnnnnnnnnnnnnnnnnnnnnnnnnnnnnnnnnnnnnnnnnnnnnnnnnnnnnnnnnnnnnnnnnnnnnnnnnnnnnnnnnnnnnnnnnnnnnnnnnnnnnnnnnnnnnnnnnnnnnnnnn

SEQ ID NO: 7623 - DNA, 569 bp, Homo sapiens
  misc_feature (468)..(468): "n" may be a, t, c, g, other or unknown
  misc_feature (492)..(492): "n" may be a, t, c, g, other or unknown
  misc_feature (508)..(508): "n" may be a, t, c, g, other or unknown
  misc_feature (515)..(515): "n" may be a, t, c, g, other or unknown
  misc_feature (547)..(547): "n" may be a, t, c, g, other or unknown
  misc_feature (566)..(566): "n" may be a, t, c, g, other or unknown
  misc_feature (568)..(569): "n" may be a, t, c, g, other or unknown
gatagccattttaactggggtgagacgatatctcattgtggttttgatttgcatttccctgattcacgatgtcgaatattttttcatgtacctgttggccacctgtacatcttcttttgtgaaatgtctattcagatcatttgcccattttaaaaatcagattatttggctttttgccattgtttcagctccttatatattcttgttattaatccctcgtcagatggatattttgcaaatgttttctctgattcaataagttgtctctttactctgttggttatttcctttgctgtacagaagctttttagcttaatataataccatctatttttgcttttattgcctgtgcttttaagtttttacctcaaaaaaatctttgcccagaacaatgtcctgaagcatttccacaatgtttttgcctagtagtttcacagtttcaggtcttacatttaagtatttaatccncaaaataagaaagagatttgaaanggatacttcagtccangcatagnggctcacacctataagcctggcactttggganaccaaggcaggaggacacntnn

SEQ ID NO: 7624 - DNA, 393 bp, Homo sapiens
  misc_feature (363)..(363): "n" may be a, t, c, g, other or unknown
  misc_feature (374)..(374): "n" may be a, t, c, g, other or unknown
  misc_feature (376)..(376): "n" may be a, t, c, g, other or unknown
  misc_feature (381)..(381): "n" may be a, t, c, g, other or unknown
  misc_feature (386)..(386): "n" may be a, t, c, g, other or unknown
  misc_feature (391)..(392): "n" may be a, t, c, g, other or unknown
aggtcagagacagctggatcagctccagccacatttattacaaaatagtgaccgcagttctggtatagaaaagatccctgacagcccagtacacctgcaacggcccccaccccacagagttcctctctcaggtgcctcaggtgtggaagttctcagattcgaaggtttcctgccaggagggcgctgtaccgggcagttgtgaggggcaggtaggcacctacagcctggtccagaacgtacagtgggtcagacagggtgctggggtcgaagccctcatttgccatccgaactttctgctgtttgaaggtctctgtggtggccaaagactcctggagcctgaggaatcggggccgggcataaggnggcaagttctnanacacntgggntgtanna

SEQ ID NO: 7625 - DNA, 508 bp, Homo sapiens
  misc_feature (115)..(115): "n" may be a, t, c, g, other or unknown
  misc_feature (158)..(158): "n" may be a, t, c, g, other or unknown
  misc_feature (275)..(275): "n" may be a, t, c, g, other or unknown
  misc_feature (297)..(297): "n" may be a, t, c, g, other or unknown
  misc_feature (329)..(329): "n" may be a, t, c, g, other or unknown
  misc_feature (338)..(338): "n" may be a, t, c, g, other or unknown
  misc_feature (382)..(382): "n" may be a, t, c, g, other or unknown
  misc_feature (414)..(414): "n" may be a, t, c, g, other or unknown
  misc_feature (441)..(442): "n" may be a, t, c, g, other or unknown
  misc_feature (457)..(457): "n" may be a, t, c, g, other or unknown
  misc_feature (480)..(480): "n" may be a, t, c, g, other or unknown
  misc_feature (482)..(482): "n" may be a, t, c, g, other or unknown
  misc_feature (488)..(488): "n" may be a, t, c, g, other or unknown
atatagcacacatatcctaacattttctactggataatataacagtaacagaaaagcatgtgttggtacaaaaaagataactatagaattgaccaggcttattgaatattttggngttcccatgtgttaacactgagtaacatcctcaattttaaggnactttaaaaattgttttgtttttgaaaacttgtttaacttaacgatatttgtttatagagttaacataaatgtttgaggagaacattacattctatacaagtgaggccctgacactntgaagctgaggtcacagtttgnatcaatatgataaatattcattatttcattgnatagactgngtatatgaaattcagtaatattttactggtaacaaatctaacangataatatgttaagaaataccaaattatatgnggggctctggcaaatgaaccaacccgnnaaaaatttgacattnccgggacacattaccaggtttgncnaaaagnccttatttttttagccttac

SEQ ID NO: 7626 - DNA, 540 bp, Homo sapiens
  misc_feature (469)..(469): "n" may be a, t, c, g, other or unknown
  misc_feature (477)..(477): "n" may be a, t, c, g, other or unknown
  misc_feature (494)..(494): "n" may be a, t, c, g, other or unknown
  misc_feature (502)..(502): "n" may be a, t, c, g, other or unknown
  misc_feature (524)..(524): "n" may be a, t, c, g, other or unknown
  misc_feature (534)..(534): "n" may be a, t, c, g, other or unknown
  misc_feature (538)..(538): "n" may be a, t, c, g, other or unknown
gttagaaaattaatttttaattgtgccgctttcaaactatactgaattttacatttctaaagatgtaaaaactcaactaatagaaaatatacatgaccattctgtctacatagataacagaatctatgaatcttgaaactaagtacatcaatttcaaaaagtattggtcatttaaacagaatcaacaattcggattgacaagaactgttcaaattaatttgacctgtagattctgagccatgtttttattaaagtcagatctattcctaaatacaaaatattttgaagatttattaaaactgaatattacaatgcaaggtaaattaagactaaaggcacataaactttggtcccacctgggttgtcaagttttagaaaactgccacaaaattaatcttcctgcatattttcgcagtacactttctttatctttggaaaaatacatgccccagttcctgaactacttganccagctgnacatgctcagaaatccncaaccttnttccaaacttaattccaactanggtggcaatntttntt

SEQ ID NO: 7627 - DNA, 518 bp, Homo sapiens
  misc_feature (1)..(518): "n" may be a, t, c, g, other or unknown
nnnnnnnnnnnnnnnnnnnnnnnnnnnnnnnnnnnnnnnnnnnnnnnnnnnnnnnnnnnnnnnnnnnnnnnnnnnnnnnnnnnnnnnnnnnnnnnnnnnnnnnnnnnnnnnnnnnnnnnnnnnnnnnnnnnnnnnnnnnnnnnnnnnnnnnnnnnnnnnnnnnnnnnnnnnnnnnnnnnnnnnnnnnnnnnnnnnnnnnnnnnnnnnnnnnnnnnnnnnnnnnnnnnnnnnnnnnnnnnnnnnnnnnnnnnnnnnnnnnnnnnnnnnnnnnnnnnnnnnnnnnnnnnnnnnnnnnnnnnnnnnnnnnnnnnnnnnnnnnnnnnnnnnnnnnnnnnnnnnnnnnnnnnnnnnnnnnnnnnnnnnnnnnnnnnnnnnnnnnnnnnnnnnnnnnnnnnnnnnnnnnnnnnnnnnnnnnnnnnnnnnnnnnnnnnnnnnnnnnnnnnnnnnnnnnnnnnnnnnnnnnnnnnnnnnnnnnnnnnnnnnnnnnnnnnnnnnnnnnnnnnnnnnnnnnnnnnnnn

SEQ ID NO: 7628 - DNA, 562 bp, Homo sapiens
  misc_feature (494)..(494): "n" may be a, t, c, g, other or unknown
  misc_feature (498)..(498): "n" may be a, t, c, g, other or unknown
  misc_feature (548)..(548): "n" may be a, t, c, g, other or unknown
  misc_feature (558)..(558): "n" may be a, t, c, g, other or unknown
ggtgtgaaggcatgtattcttttggaaatggcctttgagaaaagtaaccagggacctgaaagaccatgagattgtggaaggcacctggacttagtcctaggagaagaccagcggctttgctagctgctcatcacagatgtagcctagttggtctgtattatccttggatgacaacggtgtcatgtgacactatctagggtactgtggctcttgtgcctgagtggaccttgaggctggggaggccagactgaggggtcattcatggaagggcaagatgtgtgaactctaaaggggatgttagcactaaagactgcccagccctggtccttggaggtactatacttgatactgtgccaagtttagcagtagcctgtaccatggatcccatcaggtgaccagattcttgcccaaagcaaagttgagagaactggccaagttctcttcagcacttagcacctaacccagacatgccccttaaggaatggggaaagttnctgncacccagcacaaaaggctcaatgggaagttgaatggtccaagaaaaactntggcccagtngttg

SEQ ID NO: 7629 - DNA, 568 bp, Homo sapiens
  misc_feature (477)..(477): "n" may be a, t, c, g, other or unknown
  misc_feature (505)..(505): "n" may be a, t, c, g, other or unknown
  misc_feature (524)..(524): "n" may be a, t, c, g, other or unknown
  misc_feature (531)..(531): "n" may be a, t, c, g, other or unknown
  misc_feature (538)..(538): "n" may be a, t, c, g, other or unknown
  misc_feature (549)..(549): "n" may be a, t, c, g, other or unknown
acactctacactctattctttattctggcctggggcacaagagcaaagagatgggccagtgactcagtctctgtctctagatatgcaagttcctggtacagctcagcatggatttcagctcctactacaaccgggtacacatcctgggggtgagcacacagcaaaatggggtgggacgtgcagagaggtatagggtaaaggcaaaggaagcagaggatgagaccagcaggccctttctctttcaggagcctcgaccacacctctttggtcagatgttcgtccgcctgcagcttctgagagctgtgcgtgaggtgctccatactggcctggctatgctgggtctccctccactgagccacatttaaggccacagaggctccaatacctgggaatgttcacaaagtcatcaactggaaaaaaagcaaaaacccacgggcaaaataaattgggactggttggtacaaaagtctggcttgncatgggggaagtcgggcatattcttggnaagacttcacttaaccttnagtctgnaccgacntaggaaccccnggcacaacttcttccctta

SEQ ID NO: 7630 - DNA, 564 bp, Homo sapiens
  misc_feature (453)..(453): "n" may be a, t, c, g, other or unknown
  misc_feature (458)..(458): "n" may be a, t, c, g, other or unknown
  misc_feature (525)..(525): "n" may be a, t, c, g, other or unknown
  misc_feature (528)..(528): "n" may be a, t, c, g, other or unknown
  misc_feature (533)..(533): "n" may be a, t, c, g, other or unknown
  misc_feature (538)..(538): "n" may be a, t, c, g, other or unknown
  misc_feature (541)..(541): "n" may be a, t, c, g, other or unknown
  misc_feature (558)..(558): "n" may be a, t, c, g, other or unknown
  misc_feature (563)..(563): "n" may be a, t, c, g, other or unknown
cacgtgtgcacagcgctttacaggttacaaagtgtttcacatacatcatctcatcaattcctcacaacagccctgtgaggtaggcagggcagggggtaatgttcccatttgtacagatgtggagactgaggcccagagaggccagtgacctgcttgaggccacacagcaagtgagcagcagagctgggaccagaggctggggtgggccccacctccagcccctggctctctccactgactgtgctgtcccccaggaggaccccagcctctgtccagagtctcagccacacccaagccaggctcccaccccttgcagtggtgccgcctggcagcccagcagacaggctcccacccccatcggcagacctgtcccctccacctgcgccctgcaaaaagccagcccggagctgggcccaggcctgccccctagcctgctcctgatggtgcctgggncgggntggcaagtgggttgggctggaacctctttctgtttcctgagggatccttcccacttgggaaaaaaanaanaaggnggaanaanaggaggaggaggaaaanaaaant

SEQ ID NO: 7631 - DNA, 563 bp, Homo sapiens
  misc_feature (469)..(469): "n" may be a, t, c, g, other or unknown
  misc_feature (477)..(477): "n" may be a, t, c, g, other or unknown
  misc_feature (480)..(480): "n" may be a, t, c, g, other or unknown
  misc_feature (495)..(495): "n" may be a, t, c, g, other or unknown
  misc_feature (502)..(502): "n" may be a, t, c, g, other or unknown
  misc_feature (528)..(528): "n" may be a, t, c, g, other or unknown
  misc_feature (534)..(534): "n" may be a, t, c, g, other or unknown
atttcaagtggtctctttattaaggaaggaggtaaaaggaacataacctgagcgcaataaatatctagtttcatataaaactagtattatacaaaattcagtttctaatgatcactgtccatcagcaacttacaatcaaataaaagacagatcaaagtataagaaaattgtagacggtaatattttcctaatgacctagtctcccatcttggtttaaatatgagaaattctagtagatagtggggatggagctaaataaacgaaaacgtaaggaagttagagaacggggacaaagacttaaagatttttcaacgtaagcactatttctcctcaaccttgttcagtttttaatggatcatcttattcaacaggagccacaacctgttttgaggaacaaccaacaactgtgggcctactggaagttcaaaagacgattgttcctgtttctgaggttgacatctaaatgcangaaaattncantacgattcatactgnacaatcntcaaggctacaactggaccagaaccnttttcnttccaaagaacctgaaaatgatgcgtcct

SEQ ID NO: 7632 - DNA, 555 bp, Homo sapiens
  misc_feature (437)..(437): "n" may be a, t, c, g, other or unknown
  misc_feature (473)..(473): "n" may be a, t, c, g, other or unknown
  misc_feature (475)..(475): "n" may be a, t, c, g, other or unknown
  misc_feature (508)..(508): "n" may be a, t, c, g, other or unknown
  misc_feature (523)..(523): "n" may be a, t, c, g, other or unknown
ctttttaaatgcttttatttgccaaaagttttgggtgattttgaaatacattagacatcccattcattgaggaaaaagacagtttattccaaaacattctttaatagtcctaaactgattttgtctatcagagcaaaaggaacaaaggtaaaaatccacctgaaaaaagatctttgtatcatggaaattatgaagctggatttcttagacattaaagaaattcacagacccacatagtttaaaaatttaatttttaagattaaattttcacaacacattatgactgtaaatgagttacctgaataccaattattacctctagttatttttagcaagggagctggacttcactttacttaatgctagcttataaatttaactttgtaaaattatagtgggaaatgtgtcctggctagctgcctctgcccaaagcaaangcatctcccctaagtgccacagttctatctccccgncnttgggctccactggaacttacctgggatccttntggccccaagccttntaataagagctcttgctcaatcaaaaggggtg

SEQ ID NO: 7633 - DNA, 554 bp, Homo sapiens
gagatggagtcgcactccattgaccaggctggagtgcagtggtacaatctccactcactgcaacctcagcctcccgggttgaaatgattctcctgcctcagcctcccgagtagctgggattacaggcgtatgccaccacacccagctaatttttgtatttttagtagagacggggtttcaccatgttggtcaggctggtcttgaactcctgacctcatgatccacccacctcaacctcccaaagtgctgggattacaggcgtgagccaccacgcctagccaccaccgactttttttaattaacaaaagcacattggtgtacaaaaagatgaatctaatatcgaattactcaagttcaaatccaagctccatcacctgctagatacagtaaccctcagcaagacactcaaggttgagtgccttcaaattatatctcaaattacttatctgtaaaatggagataatagtacccactcacacaaatggaagaacaattataattaacttggtaaatggtaactattatcttactggcctgattccagaatcatcatt

SEQ ID NO: 7634 - DNA, 585 bp, Homo sapiens
  misc_feature (468)..(468): "n" may be a, t, c, g, other or unknown
  misc_feature (512)..(512): "n" may be a, t, c, g, other or unknown
  misc_feature (544)..(544): "n" may be a, t, c, g, other or unknown
  misc_feature (584)..(584): "n" may be a, t, c, g, other or unknown
aaataccattctccatacaatttattgtcagcatatttacataggggagtgttcacactttaaaatgcaaccacaattttcaaattgttgtcacaatttctccaggattaccctcattctcattttccgacttttggccagcttcacatttgtcagattgttcattgcagttctcaggcaattctgatgttgctctgaaggagaataaaagttaaaagtattcactgccacccactctgggacaggcttggttgcaaagaaaatggtgttcctggcgctgaaggataactaggaaacccatcaggctgagctggatagctttccagagccgaagctgaatggacctgctgtaacaatgctgactgcgcagccgcattatgctgtaattcttgcaaggatgattgtgaaggattctgaggaaacccagggatacccgggagggacaaaaggcctggaaaaacagaactncctgcacttggaagtccagatgataaccggttgtgcaacaagancggagttgaaattggaactgatgcttaaggcnaatcctggaggactggaacttgggatgggctttgcaaccnc

SEQ ID NO: 7635 - DNA, 521 bp, Homo sapiens
  misc_feature (386)..(386): "n" may be a, t, c, g, other or unknown
  misc_feature (473)..(473): "n" may be a, t, c, g, other or unknown
  misc_feature (493)..(493): "n" may be a, t, c, g, other or unknown
  misc_feature (495)..(495): "n" may be a, t, c, g, other or unknown
  misc_feature (518)..(521): "n" may be a, t, c, g, other or unknown
atttactcagtgaatttattgtaaaaataaagaaactcaattattccagttaatggatttcacgttaaatagtttaactttcaatgggctttctgaagagctgttcataggatgatatttggaagagtcctttccttaaggaaaaaaagggtgaacaataaataaagagttacttgcgttaacggtcacgttatttcattaaaagagaggaggagcagaaatctatgacatagttgcccaacatggcatttatctgctgcaacagaaagctgtaacactggcgggcatttcacagtatttgcgcatagtaaacttctgccattgttaaagtctgagttagaattatcaatgaattcttttttttttggctttttaaattttcttgnttttaaaaaatggatttggggtttgcagggtggaacccaaacccagtctggccacgttccgtgaaagttgtgggccaaatggttcangttctggtccccttgggccngnggggggatggggtgggggcatgnnnn

SEQ ID NO: 7636 - DNA, 573 bp, Homo sapiens
  misc_feature (62)..(62): "n" may be a, t, c, g, other or unknown
  misc_feature (74)..(74): "n" may be a, t, c, g, other or unknown
  misc_feature (95)..(95): "n" may be a, t, c, g, other or unknown
  misc_feature (191)..(191): "n" may be a, t, c, g, other or unknown
  misc_feature (264)..(264): "n" may be a, t, c, g, other or unknown
  misc_feature (282)..(282): "n" may be a, t, c, g, other or unknown
  misc_feature (330)..(330): "n" may be a, t, c, g, other or unknown
  misc_feature (340)..(340): "n" may be a, t, c, g, other or unknown
  misc_feature (344)..(344): "n" may be a, t, c, g, other or unknown
  misc_feature (360)..(360): "n" may be a, t, c, g, other or unknown
  misc_feature (436)..(436): "n" may be a, t, c, g, other or unknown
  misc_feature (455)..(455): "n" may be a, t, c, g, other or unknown
  misc_feature (469)..(469): "n" may be a, t, c, g, other or unknown
  misc_feature (543)..(543): "n" may be a, t, c, g, other or unknown
  misc_feature (552)..(552): "n" may be a, t, c, g, other or unknown
  misc_feature (558)..(558): "n" may be a, t, c, g, other or unknown
  misc_feature (564)..(564): "n" may be a, t, c, g, other or unknown
  misc_feature (567)..(567): "n" may be a, t, c, g, other or unknown
gcttttaaaaatcaaaatttatttcatcaagataaaagattacaatagaattcttcatttgntaaatcagtaangatttttaaacaatactcaangatgatattcattgaaataatccaatacattaatttggagagtatgaacgcaatctggcaatataaaccattaactatgaaaacattctatgcctntaactcaataatcactattctgggaatcctaagaaaatattcttatatatggatttttaaaagctttatgggnaaaaacttttactggaanggtatttccactttttaattaaaaaaattttcccctcattttggaggnaataaatatnctgnaaaatatttttaaagnaagaaaaagcccccaaaatataatcccatcccagaaataaccactcttaacactttcaacttatctaccatttttncccacttaaaaaattatgncccgaagccacagnattttcaccaaaaggccatccgggccccaaacttgggttctaaaacccttttaccttaaaaagggacccagggntccttgganaacggntggttntangggtag

SEQ ID NO: 7637 - DNA, 569 bp, Homo sapiens
  misc_feature (364)..(364): "n" may be a, t, c, g, other or unknown
  misc_feature (428)..(428): "n" may be a, t, c, g, other or unknown
  misc_feature (461)..(461): "n" may be a, t, c, g, other or unknown
  misc_feature (514)..(514): "n" may be a, t, c, g, other or unknown
  misc_feature (527)..(527): "n" may be a, t, c, g, other or unknown
  misc_feature (549)..(549): "n" may be a, t, c, g, other or unknown
  misc_feature (556)..(556): "n" may be a, t, c, g, other or unknown
  misc_feature (558)..(558): "n" may be a, t, c, g, other or unknown
  misc_feature (567)..(567): "n" may be a, t, c, g, other or unknown
aaaggttgggagatatttattttctttaaacaaggtcataaataacaaaaaacaaagtaggtcccagactccggaccatgcagcaggacaggggtgggaggttgttgagtggaaaggtggagggggctacacatcacctaagacagtcacagaaaagatgggcttcaggacactgccccttcctgcccttggaaatggcgtgcctgggcaatagggacaggccacagtgctgtgtcgaggcagctggaagaaggcaaagactggggatgccaggctgtaatgtttctgtgtggagtgatgtgaaatccacaaatggcaaagagaagctgtaggtttgaagaggcaagggggcactgcacacctncaggaaccagttatgaaaatggttaaatttgatgattaaaaacaattccatagctttggcctgnggctttgtgcatgggctggatttaaccctgggntgctcttgtggcaagtgaaggccccagaaggccctggaaccacctgggcttanccaaggcaagtgnccaaaacttttggaatggaccnggggctntnccaatggangg

SEQ ID NO: 7638 - DNA, 567 bp, Homo sapiens
  misc_feature (129)..(129): "n" may be a, t, c, g, other or unknown
  misc_feature (170)..(170): "n" may be a, t, c, g, other or unknown
  misc_feature (282)..(282): "n" may be a, t, c, g, other or unknown
  misc_feature (420)..(420): "n" may be a, t, c, g, other or unknown
  misc_feature (514)..(514): "n" may be a, t, c, g, other or unknown
  misc_feature (554)..(554): "n" may be a, t, c, g, other or unknown
  misc_feature (561)..(561): "n" may be a, t, c, g, other or unknown
  misc_feature (567)..(567): "n" may be a, t, c, g, other or unknown
ccaaatattatcccaaataggtgttttacagataagggtcaatacgaagtcaaacattctacagaagaaaatcgtttttacagacattaagaataattttaacagaagaaaaagctcacatctatctanatgtggctatgttccatgggaaaaatttcagcatccaaagngcaaagaaaaaatgactgtagcttttcttaccacaaaatattgacaatcttcccttatagcctactctttattgttagttgggatgccaaaggatgatatattgacctttanaagttgggctccactggacaaggttgggggtatgggggccaagcatcagaatgaattcaattttaaaagaaaaactggctttgaccccaaatgaacccaaagttcagccagcggcacatcagagataaatccagttgnactttcacatttacaagggtgtgccactcaacactattaaagacctaatcatcccaatcaaaagctcccatacttccatactaagtctggcctnaaggcttcccattttatgaaagcttcctattatgcttaantcataanggggan

SEQ ID NO: 7639 - DNA, 577 bp, Homo sapiens
  misc_feature (454)..(454): "n" may be a, t, c, g, other or unknown
  misc_feature (502)..(502): "n" may be a, t, c, g, other or unknown
  misc_feature (552)..(552): "n" may be a, t, c, g, other or unknown
  misc_feature (561)..(561): "n" may be a, t, c, g, other or unknown
cagagggcttctccttttttaatcaatgaccaacttatccagctttggaaatctggacaaagagaaggctgagaggaggcctggtccagtgtctaagggtctctgagtgagtctgtgtcagcatgtgggccccagctgggcctgtccatgggttgggcacagcagtttcctgagtaagagccagccccaccctcagggcagcattccagcccaaaaagaaatccaggccctccaggttcggcctgttttcaaggccctcaggacagtcaataaataggttagattctgagccaggcctggaaagtgagggtattcaaagggcaggatgagctgctagggatcgtaatgattcccaggtactctcctgcccttctccaacaaggaagtaaataaatagacttttaactcaggaaccgggtgttggaacaggggaacccttcccttggaagttagnaaattaagctcatggtaaaaacaaggaaccccaagcccttaccagatntacaaatcctacaggatggaagggaaggcttgccacctgggggtcccatnccagccccnaggtcctgggggaggt

SEQ ID NO: 7640 - DNA, 503 bp, Homo sapiens
  misc_feature (85)..(85): "n" may be a, t, c, g, other or unknown
  misc_feature (171)..(171): "n" may be a, t, c, g, other or unknown
  misc_feature (198)..(198): "n" may be a, t, c, g, other or unknown
  misc_feature (222)..(222): "n" may be a, t, c, g, other or unknown
  misc_feature (383)..(383): "n" may be a, t, c, g, other or unknown
  misc_feature (416)..(416): "n" may be a, t, c, g, other or unknown
  misc_feature (449)..(450): "n" may be a, t, c, g, other or unknown
  misc_feature (469)..(469): "n" may be a, t, c, g, other or unknown
  misc_feature (485)..(485): "n" may be a, t, c, g, other or unknown
  misc_feature (487)..(487): "n" may be a, t, c, g, other or unknown
  misc_feature (503)..(503): "n" may be a, t, c, g, other or unknown
gagacgaagtctcgttttgttgcccaggctggagtgcagtggcatgatctgtgctcactgcaaccgccacctccagggttcaagngattctactgcctcagcctcccaagcagctgggattacagacgcctgccaccacgcccggctaactttgttgtatttttagtaganatggggtttcaccatattggccagggnggtctcgaactcctgacctcaagngatccgcatgcctcggactcccaaagtgctgggattacaggcgtgagccactgcgcccagcccaaattatattttttaataactaatacaaaggtgaagtggctcctcccaagtagcagtgctgccggggcctggcccaggcctagccctgggctcacctntcatgctcccaagccaaccctgagcttcctggntcaagggtagaccttttccctttaaaggttaanngtccagggagctctatganaattgggggaaatgangngaacccttacttcctn

SEQ ID NO: 7641 - DNA, 553 bp, Homo sapiens
  misc_feature (405)..(405): "n" may be a, t, c, g, other or unknown
  misc_feature (434)..(434): "n" may be a, t, c, g, other or unknown
  misc_feature (442)..(442): "n" may be a, t, c, g, other or unknown
  misc_feature (464)..(464): "n" may be a, t, c, g, other or unknown
  misc_feature (476)..(476): "n" may be a, t, c, g, other or unknown
  misc_feature (490)..(490): "n" may be a, t, c, g, other or unknown
  misc_feature (509)..(509): "n" may be a, t, c, g, other or unknown
  misc_feature (521)..(521): "n" may be a, t, c, g, other or unknown
  misc_feature (546)..(546): "n" may be a, t, c, g, other or unknown
  misc_feature (549)..(549): "n" may be a, t, c, g, other or unknown
cgtctcaattgtttattcgactcacagtcagtgcacacactctaccatccaaaagtcgaagctgtgacaatcgactgctacaggcagtgcatggatgtgtaaacaaacacaaatgaaaatgcaaatcagagtgggcggggccaaggcccactgttacattcacagcacagggtaagtgcaaaagaacaggatgtcaggatggggggcggggagcacagggtccttcctgccctggaggctgcctccaggcatcagcctgggaggtgggttagtgcccatggaaccctcctgcccaggaagctgcctccgggcatcagcctgggaggcgggttagtgcccatggatccggtgtctgggaaggggcccacagaagatgggccacacccagcatcatctcctctctgnggtgcgccctccatccccagacccctttnccatttangggaaaagggccctggtcacangagccagtcctntgacctctgagtgngggaaacccagaagggaangggtttttctgnaggccttttaaacttggaaaggccnaancccc

SEQ ID NO: 7642 - DNA, 574 bp, Homo sapiens
  misc_feature (456)..(456): "n" may be a, t, c, g, other or unknown
  misc_feature (487)..(487): "n" may be a, t, c, g, other or unknown
  misc_feature (535)..(535): "n" may be a, t, c, g, other or unknown
  misc_feature (537)..(537): "n" may be a, t, c, g, other or unknown
  misc_feature (542)..(542): "n" may be a, t, c, g, other or unknown
  misc_feature (549)..(549): "n" may be a, t, c, g, other or unknown
  misc_feature (571)..(571): "n" may be a, t, c, g, other or unknown
cattaaaaatgttttatttcttcaataaattaaccttggctcacaatgaacatttggtttataaactttaatttcttaaaactttttgactctttggtaataatgcttagcttattgtacagctgtacaaaatatttctttatatccttattctataagcttttttatatattttttttaacattggaaaaacctttttgtgaaaaactaagatataaacacacacattagcctaagcctacacagggtcagaatcctcagtatcactgtcttcctcctccacatcttgtaccactggaaggtcttcaggggcaataacacacatgaagctgtcaccttctatgataacaatgccttcttctggagtacttcctgaaggacctgtcagaagctgttttacagttaacattttaagtagtataccctaaaataatgataaaaagcatagcaaagacncaaaccagtaacatattatcaagtattatgnatgccctggacataattatatggaccatcctttatatgactggcaccncnaacgngggtaangggtggggctcaggtttacaangac

SEQ ID NO: 7643 - DNA, 549 bp, Homo sapiens
  misc_feature (418)..(418): "n" may be a, t, c, g, other or unknown
  misc_feature (460)..(460): "n" may be a, t, c, g, other or unknown
  misc_feature (475)..(475): "n" may be a, t, c, g, other or unknown
  misc_feature (492)..(492): "n" may be a, t, c, g, other or unknown
  misc_feature (534)..(534): "n" may be a, t, c, g, other or unknown
  misc_feature (537)..(537): "n" may be a, t, c, g, other or unknown
  misc_feature (540)..(540): "n" may be a, t, c, g, other or unknown
  misc_feature (544)..(544): "n" may be a, t, c, g, other or unknown
atgttttttctttttatttatcaagttttattctacagctaaatttcagatttcttttacatatagaccttgcaaggcacggtaagaactgagcacttgttttatttgagggataaaggtgtagaaattttctctttgaattttataaggaaaggctgggtacagtggctcatgcctgtaatctcagcattttgggaggctgaggcaggaagatcacttgtggccaggagtttgagaccagcctgggcaacacagtgagacccccatctctaccaaaaaaaaaaaaaaccttaaaagataataagtatctaattcttttatacttgcatttctctttggatcaaatctcaactttgtgagaggtcatacatttctacagggttaggagtaccctgcataatttatacaaatgtaaagngtatattaaaaaaaaaaaggtgaaagtacctgcaatctaaangggtttcttccctanaaacggcaccttttggnaagggatgacccattttcctatttatgaaagcagggttcccntgntancctnccgga

SEQ ID NO: 7644 - DNA, 552 bp, Homo sapiens
  misc_feature (4)..(4): "n" may be a, t, c, g, other or unknown
  misc_feature (107)..(107): "n" may be a, t, c, g, other or unknown
  misc_feature (122)..(122): "n" may be a, t, c, g, other or unknown
  misc_feature (209)..(209): "n" may be a, t, c, g, other or unknown
  misc_feature (285)..(285): "n" may be a, t, c, g, other or unknown
  misc_feature (303)..(303): "n" may be a, t, c, g, other or unknown
  misc_feature (309)..(309): "n" may be a, t, c, g, other or unknown
  misc_feature (443)..(443): "n" may be a, t, c, g, other or unknown
  misc_feature (479)..(479): "n" may be a, t, c, g, other or unknown
  misc_feature (506)..(506): "n" may be a, t, c, g, other or unknown
  misc_feature (512)..(512): "n" may be a, t, c, g, other or unknown
  misc_feature (529)..(529): "n" may be a, t, c, g, other or unknown
  misc_feature (536)..(536): "n" may be a, t, c, g, other or unknown
  misc_feature (539)..(539): "n" may be a, t, c, g, other or unknown
  misc_feature (548)..(548): "n" may be a, t, c, g, other or unknown
gcanaaaataacagctttattgctacagatgtgagagcatttacaaaatgccaaggaaaaccattccgttttgagtctctggagcctgaactctcaccatgtaccanaaaagaatgcccctntttcgaactttcaaacagttgggattatttttgtttcttatcatcccaattatttgctcaagtttgcctccattgggtcccgttcanagtttcttgggctgcttgtactagtcacagctccacttccatctcttctcaggaagaggtgggcacaagacacatntgagccccttagtattgngatggnggccaggaaatgatcaaagggtagcatttaggaaatcagcaaactaaagcctcaaatcaaaggtggacaaatgcattctcaactcaaacaggttgggtaatgctttcataagatcattatgtttttgggacccnggcccccaaatttaataaggctacaaccaggattcnggaaagacctccagctttttcccaaangatggncaagggcaaaccaaacnaaaaggnggngacccaatngata

SEQ ID NO: 7645 - DNA, 561 bp, Homo sapiens
  misc_feature (90)..(90): "n" may be a, t, c, g, other or unknown
  misc_feature (176)..(176): "n" may be a, t, c, g, other or unknown
  misc_feature (274)..(274): "n" may be a, t, c, g, other or unknown
  misc_feature (428)..(428): "n" may be a, t, c, g, other or unknown
  misc_feature (437)..(437): "n" may be a, t, c, g, other or unknown
  misc_feature (473)..(473): "n" may be a, t, c, g, other or unknown
  misc_feature (507)..(507): "n" may be a, t, c, g, other or unknown
  misc_feature (530)..(530): "n" may be a, t, c, g, other or unknown
  misc_feature (541)..(541): "n" may be a, t, c, g, other or unknown
  misc_feature (546)..(546): "n" may be a, t, c, g, other or unknown
  misc_feature (553)..(553): "n" may be a, t, c, g, other or unknown
  misc_feature (558)..(558): "n" may be a, t, c, g, other or unknown
gtacatgaaagagtatttattgaaaacatggttactgacaggaagctcctggctgctctctggttacaatcttggctcacaactggaagngttacatactttttacttcccctcaattttatttttccccaaggttccatcctaagataggtagatcttatataaatatatatacncgtctgtataagtatggcctatagtaatgaaaatatatagtacactcttcattgggtagtacctaccatgccaggccaccaatactgaatgccaatgngctaacgtatgtccagggagagaggctgtgtgtgtggtttacaagtgctgcagcaccagggaagccccactggcacaggtgtggcctcagccggcctcagccagctccctgaaatcatggccaatggcagaaaccatagcactaggaagggaangccaacttnctggggtctggaaggccaaaggaaagcaaactgganggggcttgcaattaaggttaggggaaattctttntgaggaaggaaaagggtttaatnggggggaaaanccttnaatttanggccncct

SEQ ID NO: 7646 - DNA, 568 bp, Homo sapiens
  misc_feature (476)..(476): "n" may be a, t, c, g, other or unknown
  misc_feature (479)..(479): "n" may be a, t, c, g, other or unknown
  misc_feature (488)..(488): "n" may be a, t, c, g, other or unknown
  misc_feature (507)..(507): "n" may be a, t, c, g, other or unknown
  misc_feature (529)..(529): "n" may be a, t, c, g, other or unknown
  misc_feature (547)..(547): "n" may be a, t, c, g, other or unknown
  misc_feature (552)..(552): "n" may be a, t, c, g, other or unknown
gatattttcataacattttctttaacatttaatagaaactatatacaataaatttttactatattttacataagatagcaaccacagaaatttacataggttaaaagcaagacggataaggaggacccagtcctgtgggctgttttctcagaggataaaaagccagagttcaccagggaaaggggttaaagactgcccaattaagtagaggtgaagaaaagctaaactgcaggtcttcagatagagataaccgatattagggccatcagtatctcaaagaccactcacaaagacagctcccacctagctacttaagtggatttctatccatgacttgggaaatcccattacaaagatgtcactttccttttaggtatagtcccaaataatcccagaagctttgatagggattatctctctttctcttccttgccctgagtggggaagaaacccacggtccacggtcctcaaaattnggnttaccgttngactataatactcaatccngaagaaaaaccagggtaagctngggttgccggggttttgngaganatgatccgaaatcctt

SEQ ID NO: 7647 - DNA, 570 bp, Homo sapiens
  misc_feature (489)..(489): "n" may be a, t, c, g, other or unknown
  misc_feature (499)..(499): "n" may be a, t, c, g, other or unknown
  misc_feature (508)..(508): "n" may be a, t, c, g, other or unknown
  misc_feature (515)..(515): "n" may be a, t, c, g, other or unknown
  misc_feature (530)..(530): "n" may be a, t, c, g, other or unknown
  misc_feature (549)..(549): "n" may be a, t, c, g, other or unknown
  misc_feature (568)..(568): "n" may be a, t, c, g, other or unknown
ggagacggagtctcactcttgtcacccaggctggagtgcagtgacacgatctcggctcactgcaatctccgcctcctgggctcaagcgattctcctgcctcagcctcctgagtagctaggattacaggctcctgccaccacaccccacacattttttgtatttttagtagagaacgggaattcgccatgttggccaggctggtcttgaactcctgatctcaggtgatccgcccgcctcggcctccctaagtgttgggactacaggcgtgagccaccatgcctggccccaaccagaacacttctgagcgtggaagaggatgctgttaattactcaagaccaaaaggcataaaaggagacatatgtccacccaagtgataaggcagtttgggaaactacatttcccagtatgccctgccccttgaaagttaaaaatcttaactggcacagagcaccctgggacacctgtggttagcaccatttaagaagtnaaaaggatangggttgggntctgacntgaagggctttcccnttcatgggacacttaaccngacccaggaccacacctgngg

SEQ ID NO: 7648 - DNA, 572 bp, Homo sapiens
  misc_feature (1)..(572): "n" may be a, t, c, g, other or unknown
nnnnnnnnnnnnnnnnnnnnnnnnnnnnnnnnnnnnnnnnnnnnnnnnnnnnnnnnnnnnnnnnnnnnnnnnnnnnnnnnnnnnnnnnnnnnnnnnnnnnnnnnnnnnnnnnnnnnnnnnnnnnnnnnnnnnnnnnnnnnnnnnnnnnnnnnnnnnnnnnnnnnnnnnnnnnnnnnnnnnnnnnnnnnnnnnnnnnnnnnnnnnnnnnnnnnnnnnnnnnnnnnnnnnnnnnnnnnnnnnnnnnnnnnnnnnnnnnnnnnnnnnnnnnnnnnnnnnnnnnnnnnnnnnnnnnnnnnnnnnnnnnnnnnnnnnnnnnnnnnnnnnnnnnnnnnnnnnnnnnnnnnnnnnnnnnnnnnnnnnnnnnnnnnnnnnnnnnnnnnnnnnnnnnnnnnnnnnnnnnnnnnnnnnnnnnnnnnnnnnnnnnnnnnnnnnnnnnnnnnnnnnnnnnnnnnnnnnnnnnnnnnnnnnnnnnnnnnnnnnnnnnnnnnnnnnnnnnnnnnnnnnnnnnnnnnnnnnnnnnnnnnnnnnnnnnnnnnnnnnnnnnnnnnnnnnnnnnnnnnnnnnnnnnnnnn

SEQ ID NO: 7649 - DNA, 581 bp, Homo sapiens
  misc_feature (466)..(466): "n" may be a, t, c, g, other or unknown
  misc_feature (526)..(526): "n" may be a, t, c, g, other or unknown
  misc_feature (551)..(551): "n" may be a, t, c, g, other or unknown
  misc_feature (563)..(563): "n" may be a, t, c, g, other or unknown
  misc_feature (571)..(571): "n" may be a, t, c, g, other or unknown
acaaaagcaatacccgtttactaaagacattttcagatatttacagatcaatttctcacatctatttctataacttgactttgaagtttattataatcatattactattctgaattttaaaaggtccagagaatgtaaacaaattctatctttaaaaaggcttactgacaactgcagactcaaagtggctacaaaaggaaaagtattgtaaacatttgtctcttaactctaggcactaatctcctaaaccagttcaacttgataaggaaaaagacttgagattcactcatttataacttagttagcaatgtcattgatcattaaagatatggaagaataatggaaaactggatttttcactaatgcaaaattaacaacaatacctcgacccccattaaatatacagatgccaccatctcttccatcatggattttatttcttcttagtgtagggattactatctgncttaatccagactccagccattgcattggcaaatatttcattggcttctatacagcctanaccagaaattttaaactaggaattnccccattctggncctcccanatttggtggg

SEQ ID NO: 7650 - DNA, 587 bp, Homo sapiens
  misc_feature (485)..(485): "n" may be a, t, c, g, other or unknown
  misc_feature (521)..(521): "n" may be a, t, c, g, other or unknown
  misc_feature (532)..(532): "n" may be a, t, c, g, other or unknown
  misc_feature (573)..(573): "n" may be a, t, c, g, other or unknown
  misc_feature (579)..(579): "n" may be a, t, c, g, other or unknown
ccatataaaaagaggtttatttcgatgttagaatcatctagtgatcgaacaagattggacatgaacccacccaggcccagggctgggctgccgagcagctgccgctgacatctgtgtggatttgacatgcaacagggagtagccacgtgctcgctcgctggccactgtgcttcgaaacgtttttccagcggacggctgtgattgcagttttcagatgtgctctggcctctaaggacgtggggccgaggcggtgtcctctgtataaaaagtgctgtcctgggagcttcccaacggacatcttggggcatctgagtgattcccagggagggcagcttggccttcctcaggctaccactgcagccaccgccggccattctcaccagcaatcaaccaaaaagcatcagagcctctgtgaacctgctgtgatggtaagaaccaaatgtttcctaagctaagacttgtatgcagaacacagaaaactgcanttaggaacaccctacaaaattgaccacagtattttncaaaaatatcntttacatcctttaaataattaccaaaagctccaaaatcttnttaccnggacccgt

SEQ ID NO: 7651 - DNA, 588 bp, Homo sapiens
  misc_feature (487)..(487): "n" may be a, t, c, g, other or unknown
  misc_feature (539)..(539): "n" may be a, t, c, g, other or unknown
  misc_feature (564)..(564): "n" may be a, t, c, g, other or unknown
  misc_feature (579)..(580): "n" may be a, t, c, g, other or unknown
gagatggagtttcactctttttgcccaggctggagtgaagtggcgtgatcttggctcactgcaaactccaccttccaggttcaagcaattctcctgcctcagcctccccagtagctcggattataggcaccccccaccatgcctggccaatttttgtatttttagcagagacggggtttcaccatgttggccaggctggtctcaaactcctgacctcaggtgctccacccgcctcagccacccaaaatgctgggattaggctgctctttgagagctttacaaatttatttaatccttacaatgactctgaggtagatcttcttgtctctgtttgtagataagaaaactggaactgtcaagaaacttgcttaagatcacagagtgcattaggcttggatccataatcaaattggaaaaaaagaaaaacacaaagaacaattaagactccaaagccctaatgcttaagctttggatcctatcacactgnggcattatatatataaaacaaaaaactttataataaagagaaatggattttnccaactgggggttttcagatacaangggctcatgaggacnntttgtaaa

SEQ ID NO: 7652 - DNA, 576 bp, Homo sapiens
  misc_feature (520)..(520): "n" may be a, t, c, g, other or unknown
  misc_feature (522)..(522): "n" may be a, t, c, g, other or unknown
  misc_feature (548)..(548): "n" may be a, t, c, g, other or unknown
  misc_feature (562)..(562): "n" may be a, t, c, g, other or unknown
  misc_feature (565)..(565): "n" may be a, t, c, g, other or unknown
  misc_feature (573)..(573): "n" may be a, t, c, g, other or unknown
  misc_feature (575)..(575): "n" may be a, t, c, g, other or unknown
aatcagtgttatgtatacacatggtaagtaactccatggtatagaaaaactgatgatggaattcaataggtgcactctgcctttccattcccaagcccacgctctagagcaagcctggtatagcttttgttttcagttcttctgagggttaaataaaacgagtaggtagttttgtgaattaatattgccttataattttaagtatagtacatgacccaggtggagtgctttagatacagatgtatgagtgattagttgcaggaaacacaaactactgtagctagccacatttaaaaggactgtaaaacagggaactggatgcttgcaatattgtcacaagggctaggagtgggttccatactgggtctccagaattaactcccagaaaaacactgcaggtctgtctggcttgccagaggcgctgctaccccacaataatgagaaaggtgaagaatcagggttgcatccaccacgccacttgcctcaacaactgactgcaagaattctgctgcagggaaantnaatggcttcttaaccacacatgccancagaacacagccangangaaaatgntnt

SEQ ID NO: 7653 - DNA, 573 bp, Homo sapiens
  misc_feature (414)..(414): "n" may be a, t, c, g, other or unknown
  misc_feature (501)..(501): "n" may be a, t, c, g, other or unknown
  misc_feature (503)..(503): "n" may be a, t, c, g, other or unknown
  misc_feature (517)..(517): "n" may be a, t, c, g, other or unknown
  misc_feature (540)..(540): "n" may be a, t, c, g, other or unknown
  misc_feature (551)..(551): "n" may be a, t, c, g, other or unknown
  misc_feature (553)..(553): "n" may be a, t, c, g, other or unknown
  misc_feature (566)..(566): "n" may be a, t, c, g, other or unknown
cattactcatatcttgtattttatttcttatgaaaatggctacccaaagaagtcattgtagcaggctactattttaaggcagcaactgtataacttaaatgctaagactcactccataagacagaaaacccttccccagggctgtaatgggcatttaagtttcccaaacccagggacaactaatttttattacctattgaatagaaacaaatggattttaatagttcccctcccctatagctgaaaaactccacaaacaataattgactctatctacatgatctgttgactcacgccagaaatagttactaaaacacttagaattgtgatgttcaaactggcctctggctacttctggggggttatttggtgttacgcaacgacatattgccagcgacatggtgaatatactgnctttatagtcagcaatgtttagttgaggctaatcacgtatttattttttcaaaagggtaaatgtaagcttttcccagctgaaatatntngaaaaccccaatgnttgaaccaggtttaagcattggnggtggcaccgnantgggctgatgggncctcctg

SEQ ID NO: 7654 - DNA, 587 bp, Homo sapiens
  misc_feature (507)..(507): "n" may be a, t, c, g, other or unknown
  misc_feature (555)..(555): "n" may be a, t, c, g, other or unknown
  misc_feature (577)..(577): "n" may be a, t, c, g, other or unknown
  misc_feature (587)..(587): "n" may be a, t, c, g, other or unknown
gcatgtgcacacatgtatacatttattgcataaaattcatcatagcactttcccccatatttttataatccaaaaggaaaatgattcaagaaaggatttcattgtgctcagtttcaaaaaatataaaaatggacatcagattagagatacaagttcatacgctgaactgaattgtacataccaactgcctggctatggaaacccgtgacttgacttaggggtgctgatgacatgatctcgacaagaaccccctagcaactctcaggtggaggcagcacagggatgcggttcctggtgaggagggtcctcactcggtgaccacactgcctgggctcacagctggagggctcacccatgagggacacgggtggacacccactgcttcacatgcctaattcacattagaaacatgtaaagccattcagtctgtgcaataaagagatcctgtatgaaatccactcattcctttctaacagctaaagctcaaaggcatactggacccttganggaaaacaggagaacctgaaatgggaagggaagaaagggattgcaccnttacagagcaaaatgggcaacnggaccgggan

SEQ ID NO: 7655 - DNA, 462 bp, Homo sapiens
  misc_feature (132)..(132): "n" may be a, t, c, g, other or unknown
  misc_feature (231)..(231): "n" may be a, t, c, g, other or unknown
  misc_feature (325)..(325): "n" may be a, t, c, g, other or unknown
  misc_feature (423)..(423): "n" may be a, t, c, g, other or unknown
  misc_feature (427)..(427): "n" may be a, t, c, g, other or unknown
  misc_feature (429)..(429): "n" may be a, t, c, g, other or unknown
  misc_feature (437)..(437): "n" may be a, t, c, g, other or unknown
  misc_feature (447)..(447): "n" may be a, t, c, g, other or unknown
  misc_feature (458)..(458): "n" may be a, t, c, g, other or unknown
  misc_feature (461)..(461): "n" may be a, t, c, g, other or unknown
aggtacacacagtaaagtttattttggtgcatggtatacttcactccattaaaaataaattaatcagcaaattcctgcctggctcagctctggtttatgtaaatagtgcccagctgtaatgagttacaaggngttattatctcacacacacacaggaggcttcactctagagctccgctcgcaacaaaagcatcttaaataaactgagagaagcggtttgatttgtaatgntttcacagaagtgggatatacctcacccatatagagtttctttatatgactcattttatagcaagttaaatgaaggaagttttgatggggggangggaggggcaatatggttccccaccccctttcttcactttaagaaaatcccccaagagatgaccccgcactgaggggaggaggggctgggcctcaggngctnanaccaaggnggctctgcancactgcttcanaant

SEQ ID NO: 7656 - DNA, 533 bp, Homo sapiens
  misc_feature (166)..(166): "n" may be a, t, c, g, other or unknown
  misc_feature (407)..(407): "n" may be a, t, c, g, other or unknown
  misc_feature (425)..(425): "n" may be a, t, c, g, other or unknown
  misc_feature (447)..(447): "n" may be a, t, c, g, other or unknown
  misc_feature (491)..(492): "n" may be a, t, c, g, other or unknown
  misc_feature (512)..(513): "n" may be a, t, c, g, other or unknown
  misc_feature (515)..(515): "n" may be a, t, c, g, other or unknown
  misc_feature (529)..(529): "n" may be a, t, c, g, other or unknown
cgagtaagctggtaagtggtataataggaatagtagaagaatatgccatagctatggctcaagaataggaataagaaaaatgtgcagtagacgctgtttgtccgacgatgatgaaagtgtgcacggccggctgtcctccgattgaggggccttgtcaaggcctcanaggcagcgaggtcacagcctggtggagggtctgggtgtgcgctgtgtccatctgcacctcacagacaccagtcatggggggatgaaaccgggccaagaacacatgtgtgcacaggctgtgtgtgcctgcatgtgtgggatgcgtgtaggctgtggcgggggtggagatgagggataggacagaaaatggcccatccaaccccacatcctggcccggcgtgtccaaggtccctgtggggccnagggtttggctgccccanacgtgacagggacttggctttnagggtcaaggacctggctgggaacaccccatttgaaaaggaacnnaaaccagcccttggaccctnnanacccccagagcttnctgg

SEQ ID NO: 7657 - DNA, 485 bp, Homo sapiens
  misc_feature (131)..(131): "n" may be a, t, c, g, other or unknown
  misc_feature (138)..(138): "n" may be a, t, c, g, other or unknown
  misc_feature (331)..(331): "n" may be a, t, c, g, other or unknown
  misc_feature (396)..(396): "n" may be a, t, c, g, other or unknown
  misc_feature (406)..(406): "n" may be a, t, c, g, other or unknown
  misc_feature (420)..(420): "n" may be a, t, c, g, other or unknown
  misc_feature (447)..(447): "n" may be a, t, c, g, other or unknown
  misc_feature (459)..(459): "n" may be a, t, c, g, other or unknown
  misc_feature (462)..(462): "n" may be a, t, c, g, other or unknown
  misc_feature (483)..(483): "n" may be a, t, c, g, other or unknown
acatgtctggagatgttggcttggttatgaattcaaaagttctcccagagttcttgatgatgattcatagagaaatctttcaatgctatcctcttccaaagtaatttccatgaatgtctttagttttctgngaacagnggctgcaacctccctcacttttgagcttttatgtttacctgcattaataaccaggataatatgcacagcagccgtgaggcacacaatgccttcaatatcattagaagccacacatgcctttaattcatccaaaaatgacctgaccacattcgaagactttattattattcctattaaacaccttgaaaatggngggaagatcagaaagatgctctggaggggtaagctcttctacgtcagaaaccttccgtaactggngacttatctnaaccacaggcccancgatcagagtagaaaggtccccccggngcacaagggtgnctnggtgcccagactggaccagcngt

SEQ ID NO: 7658 - DNA, 503 bp, Homo sapiens
  misc_feature (360)..(360): "n" may be a, t, c, g, other or unknown
  misc_feature (381)..(381): "n" may be a, t, c, g, other or unknown
  misc_feature (394)..(394): "n" may be a, t, c, g, other or unknown
  misc_feature (416)..(416): "n" may be a, t, c, g, other or unknown
  misc_feature (423)..(423): "n" may be a, t, c, g, other or unknown
  misc_feature (430)..(430): "n" may be a, t, c, g, other or unknown
  misc_feature (436)..(436): "n" may be a, t, c, g, other or unknown
  misc_feature (472)..(472): "n" may be a, t, c, g, other or unknown
  misc_feature (499)..(500): "n" may be a, t, c, g, other or unknown
gcaattctgtaaggtttattgaatgggtgggtaaaaagtgaacgacagctacaaattcaaaaataaaactcttggttattaaagtcattccaggcatggacagagggatgcgaggctggccttccctgtccacggtcctctgaggcagctgaagtctcccatgtctggaccccgaatcttgtgcagattgaacagtggatccggggtgctctgagcaggcagcagggagcagctctggtgacgcttcatgtggtagcctcactctccattctctgcccctctcgtgcccacaaacaccaccaagagattcacggtgagaaatatcagcaaacccagatcccagatcaccaactccatggncttaggacttccttggactgnccttggatctaangctgagaccttacaagcaccgnagcttancctcttnttgaanacacgttacctggggccctgggcacacaggacaaangtcaactgacaatcctttggtttctgnntca

SEQ ID NO: 7659 - DNA, 471 bp, Homo sapiens
  misc_feature (410)..(410): "n" may be a, t, c, g, other or unknown
  misc_feature (426)..(426): "n" may be a, t, c, g, other or unknown
  misc_feature (436)..(436): "n" may be a, t, c, g, other or unknown
  misc_feature (450)..(450): "n" may be a, t, c, g, other or unknown
  misc_feature (452)..(452): "n" may be a, t, c, g, other or unknown
  misc_feature (466)..(466): "n" may be a, t, c, g, other or unknown
  misc_feature (470)..(470): "n" may be a, t, c, g, other or unknown
caatagaaaaaacatttattatatatgcatgcaagaacactacaaagagtagctctctgaacagcaaggggtaagggtttacagatcagctttatggtgtgtgtcttaaggcttcagaatgaaactacaaaaagttctgataaggcttatttacaataccttgggaggtcctagtgctaagtgcccttataagaggaacactcagaggagggttttggcagctgaattctcggtaagacctgctttactcatcaaagtttagctaaggctttttgtctgcagctgctgtttgttcagatattctcaaagtagacttgtatcatattgatgggttgttagtcccttcattgccctatttgaaacttgacatgaagtttcactgacaaggagctgtgctgattgctgtgganataaggctaggttcanaggttggganttaagggatctgcnanatttgcgaaagacncganc

SEQ ID NO: 7660 - DNA, 572 bp, Homo sapiens
  misc_feature (565)..(565): "n" may be a, t, c, g, other or unknown
ccggtagtaaaacatttactagagagcaagcagaaaggaatgcacatcttaaagaaaccttcacaaagtcacaaaagtcaaagtttgtatatttcttttcctttttataaacgataaacaaaaatcatcaaaatcatttcagcaaaagacttttctatcattggggcaagttaaaaaaaatacaatgaaatagaagacactttaaaagctgttgttgggtctcttgtttaattttaaatttagcaataccatctcaaacctggagcaatcctggaacagttaccaggatcaccttttcccttcaatccttgtggcttctgggaatcttcagagcctgggtctgaaaggtgtttcctacatgtctcagggctggatgcaaacctggctggggacctgagcatcaactcccatttagaatcagacatctcccttccctgcaaatgtctacaactaccaaattgtccccaacagttagctcaatggattgaatttgcagaagcccacttctaaaatggggactggctggccatacactaagaaaaagactcaattatagatgctatanggggccc

SEQ ID NO: 7661 - DNA, 176 bp, Homo sapiens
  misc_feature (114)..(114): "n" may be a, t, c, g, other or unknown
  misc_feature (122)..(122): "n" may be a, t, c, g, other or unknown
  misc_feature (152)..(152): "n" may be a, t, c, g, other or unknown
  misc_feature (173)..(176): "n" may be a, t, c, g, other or unknown
catataaaactatttattcataaatattttccaaaatgaaaataggtttaccaaaaaatgtccctcactggggaggggaggagggggcagccctcgcccccgggcccccagggnggggctgngaggaaaacctcccggccccctccctgctncctgggagagggggatgcccnnnn

SEQ ID NO: 7662 - DNA, 575 bp, Homo sapiens
  misc_feature (524)..(524): "n" may be a, t, c, g, other or unknown
  misc_feature (535)..(535): "n" may be a, t, c, g, other or unknown
  misc_feature (572)..(572): "n" may be a, t, c, g, other or unknown
gacatttgtgcaagaggcaaggtgaatgcatacatattaaaatgttcacatttaatgggaagaccacacataatggcagtctacattgaacccattttcaagtatttgttcacagattcttctgagtactgttatcagctctttatactggtaaggtagcccctgtgagctacacatctctttagcttcaaacaaaagaaatggaatgaccagcaccttcctttgttttcaggcaagtacacagaagccttgctgcagtagctacatgtggcaagttctgatgttgccaaagttagaaagagtttctttggccacttggttctcctaaaatacaagcgagtctcttgttttaaggtacccttacaacatcatcctctcaacaacacggacaggataaagccacatgggaatagcacacttgaggcctagtatgtgtatttgttcagtggtctgacagatggggtttgaggaacaaaggaaggctttggtggcacgtcaggttttaaggacggggtcctctttantcccgtcctangaagaaggcccttactggggtaactgctctgctgganagg

SEQ ID NO: 7663 - DNA, 564 bp, Homo sapiens
  misc_feature (115)..(115): "n" may be a, t, c, g, other or unknown
  misc_feature (423)..(423): "n" may be a, t, c, g, other or unknown
  misc_feature (493)..(493): "n" may be a, t, c, g, other or unknown
  misc_feature (505)..(505): "n" may be a, t, c, g, other or unknown
  misc_feature (531)..(531): "n" may be a, t, c, g, other or unknown
cacaaatagcactttttatttgccactatttgaagtctgaactttaaacagattcttggactggtggttcatatccatcagctcgttcaactttagcacctgtctcgtccccagnggcttttccagaactactgtgatgaaaggaaaaaaaaagtttaactttccaaaggtaatgctttcatgaagagttagaaatagcagttttagtaattagttgtaggaattctggttaagacttcaacattttaccttacttaaaagatttgctttatgcaacatttaatgcccagttttgcatggctctaaaaatctttaaaatgcaaaagcttttccagtgactggaagccaacacgacaagaatgaaatggtatgacctgtgaattagcctggtttataaaaaaataccagttcagagaccataancaaaataaagaaactaagcaatccttaaattggatttagccttgggcaattagcagaaaaaattcactcntaaaaggatccnttttcagaatattggttttttaaaangtagggactgggtttataagagtaaaaagttta

SEQ ID NO: 7664 - DNA, 554 bp, Homo sapiens
  misc_feature (320)..(320): "n" may be a, t, c, g, other or unknown
  misc_feature (423)..(423): "n" may be a, t, c, g, other or unknown
  misc_feature (470)..(471): "n" may be a, t, c, g, other or unknown
  misc_feature (507)..(507): "n" may be a, t, c, g, other or unknown
  misc_feature (545)..(545): "n" may be a, t, c, g, other or unknown
acaatttcagctttattgaccccctaaagtctacaaatccttgggactctactgacccttgctgtaaagtgaagggagtgaaagtatttggaatataggtaggacctctaatataataaagatgtcactttaagatcaatttattcaacaaacatttattaaacattcatatgccaaaaactatgctatggagatgcaaaaaataaaaaggttccttttcctgcccttaaggagctcacattctagtaaagacttttgaaaaataaaacaatacagtacgatttaagtgacatacaatagaggtaggttgtaattacagnggtgacacgaaagtggaagttagatgactctccttgagtggagcaaaggaggtttcacagaggaaatgcttatgtcaggcctgcaagatgcataggaattttncaagtggggaaggatgactagcacacttgatgccaaagaggtccagnntttaccaaggcggaaggcctggccaaatggggcttntgaaaaaatgtaagctgttcaccagaacattcgggggnggaacccat

SEQ ID NO: 7665 - DNA, 552 bp, Homo sapiens
  misc_feature (1)..(552): "n" may be a, t, c, g, other or unknown
nnnnnnnnnnnnnnnnnnnnnnnnnnnnnnnnnnnnnnnnnnnnnnnnnnnnnnnnnnnnnnnnnnnnnnnnnnnnnnnnnnnnnnnnnnnnnnnnnnnnnnnnnnnnnnnnnnnnnnnnnnnnnnnnnnnnnnnnnnnnnnnnnnnnnnnnnnnnnnnnnnnnnnnnnnnnnnnnnnnnnnnnnnnnnnnnnnnnnnnnnnnnnnnnnnnnnnnnnnnnnnnnnnnnnnnnnnnnnnnnnnnnnnnnnnnnnnnnnnnnnnnnnnnnnnnnnnnnnnnnnnnnnnnnnnnnnnnnnnnnnnnnnnnnnnnnnnnnnnnnnnnnnnnnnnnnnnnnnnnnnnnnnnnnnnnnnnnnnnnnnnnnnnnnnnnnnnnnnnnnnnnnnnnnnnnnnnnnnnnnnnnnnnnnnnnnnnnnnnnnnnnnnnnnnnnnnnnnnnnnnnnnnnnnnnnnnnnnnnnnnnnnnnnnnnnnnnnnnnnnnnnnnnnnnnnnnnnnnnnnnnnnnnnnnnnnnnnnnnnnnnnnnnnnnnnnnnnnnnnnnnnnnnnnnnnn

SEQ ID NO: 7666 - DNA, 563 bp, Homo sapiens
  misc_feature (503)..(503): "n" may be a, t, c, g, other or unknown
  misc_feature (519)..(519): "n" may be a, t, c, g, other or unknown
  misc_feature (537)..(537): "n" may be a, t, c, g, other or unknown
  misc_feature (543)..(543): "n" may be a, t, c, g, other or unknown
gagatggtgtctcactctgtcacccaggctggagtgcagtggcacaatctcagcccactgcaacctccacctcccaggtccaagcaattatcctgcctcagcctcccgagtagctgggattacaggtgcccaccaccagggaaaactacattttcaaggggcattcgagatgccttaaaaccaagaaaacccaaaagaattaatctcatctgattaattctcatcagtcaccctgtattcacttcatggcttaccctgcttttaaaaaacctcgactgtttctggttttaatccttaactacctcaagaatccagaagtcttagaaatatctaaaaattgtagcatctctgagcaaatgcacaggctccagtcaatgtaaaattattaccagctgcttaaaaaaggtcatttgtccacaccataagcagaaaccgaggagacaagactataaactagaaccaaggctgacaggcaacaggaagaaacagtccagatccaggantggggagtgggcaaanccaagcaaacggcatgantggaangggatttgaaactaaggtag

SEQ ID NO: 7667 - DNA, 558 bp, Homo sapiens
  misc_feature (94)..(94): "n" may be a, t, c, g, other or unknown
  misc_feature (110)..(110): "n" may be a, t, c, g, other or unknown
  misc_feature (139)..(139): "n" may be a, t, c, g, other or unknown
  misc_feature (142)..(142): "n" may be a, t, c, g, other or unknown
  misc_feature (173)..(173): "n" may be a, t, c, g, other or unknown
  misc_feature (194)..(194): "n" may be a, t, c, g, other or unknown
  misc_feature (217)..(217): "n" may be a, t, c, g, other or unknown
  misc_feature (228)..(228): "n" may be a, t, c, g, other or unknown
  misc_feature (331)..(331): "n" may be a, t, c, g, other or unknown
  misc_feature (484)..(485): "n" may be a, t, c, g, other or unknown
  misc_feature (511)..(511): "n" may be a, t, c, g, other or unknown
  misc_feature (513)..(513): "n" may be a, t, c, g, other or unknown
  misc_feature (519)..(519): "n" may be a, t, c, g, other or unknown
  misc_feature (531)..(531): "n" may be a, t, c, g, other or unknown
  misc_feature (558)..(558): "n" may be a, t, c, g, other or unknown
ccatccaagataactttattccattttgcattatttgataactatttccttcccctccccacctccaactgcatctcctactctgaaatgcctnttgagcagccaagggnggccagttctgctcctcattttcctgaanaanaatctcagcctgaaagaatatagagctaggngacatatgggtggccaaccgnttctcctcaagttccaagagagngggcaattagngaaattccatcagtcatgttaaaatatactttcaccaggtagacatccttctttcaatgctagaggacagtgaaaaatgtagattaatgagatctgtaactgncttctcttaactgtacacccctcaggctgaacgcgggagtgctgaacacatgccctcggaaggggaccctgaagacccaagtgacctgcccataaaccaccccgagggtcaaccttgctgccagccttcaagaaggcagcaggggccacctgnntggaaaacctgggcacgggttttggngncctggncctggcctggcntcttcaaggtccttggaaccaggtttn

SEQ ID NO: 7668 - DNA, 565 bp, Homo sapiens
  misc_feature (311)..(311): "n" may be a, t, c, g, other or unknown
  misc_feature (335)..(335): "n" may be a, t, c, g, other or unknown
  misc_feature (402)..(402): "n" may be a, t, c, g, other or unknown
  misc_feature (447)..(447): "n" may be a, t, c, g, other or unknown
  misc_feature (476)..(476): "n" may be a, t, c, g, other or unknown
  misc_feature (498)..(499): "n" may be a, t, c, g, other or unknown
  misc_feature (511)..(511): "n" may be a, t, c, g, other or unknown
  misc_feature (535)..(535): "n" may be a, t, c, g, other or unknown
  misc_feature (541)..(541): "n" may be a, t, c, g, other or unknown
  misc_feature (555)..(555): "n" may be a, t, c, g, other or unknown
gcatcttaaagactttatgctaagtgaaaccagtcacaaaaggacaaatactgtatgattccacttacatgagaaatatgagtagtgaagttgatgatagagacaaaaagtatggctgttgctaggggagggggaggtggggagttattgttcaatgggcacagaatttgggaagatggaaaacttctggagatggatgatggtgatggctggacaacaatgagaatgtacttaatccactgaattgcatatttaaaaatgggtaagctggtcagttttatgttataaatattttaccccaataaaaacanattgaacttaaaaattcactgaanaagcccatatggaaaaaggactaaatgttaaaaaaaaaaaaagccaactttttttttttttaatcangagataagtccgtagctgcaagctcaaggtctcggttgaggacantcattatgagtcctagtaaaagacaaccngttttaagaacactgtcaggcnngctaccatgtanttctccttggcttccatgcttacntttttnagactttccagtanttccaaaggg

SEQ ID NO: 7669 - DNA, 443 bp, Homo sapiens
  misc_feature (82)..(82): "n" may be a, t, c, g, other or unknown
  misc_feature (113)..(113): "n" may be a, t, c, g, other or unknown
  misc_feature (223)..(223): "n" may be a, t, c, g, other or unknown
  misc_feature (275)..(275): "n" may be a, t, c, g, other or unknown
  misc_feature (328)..(328): "n" may be a, t, c, g, other or unknown
  misc_feature (386)..(386): "n" may be a, t, c, g, other or unknown
  misc_feature (421)..(421): "n" may be a, t, c, g, other or unknown
  misc_feature (431)..(431): "n" may be a, t, c, g, other or unknown
  misc_feature (435)..(435): "n" may be a, t, c, g, other or unknown
  misc_feature (437)..(438): "n" may be a, t, c, g, other or unknown
  misc_feature (443)..(443): "n" may be a, t, c, g, other or unknown
ccagagacaacttctaagtttctctttatttcttttggaaacaacctccattcttcatctctcaatgtagtcctggcctagngaaaaagaaggcttttctttctggcctccanagactgcttcctttgtaggaaaaggaacaataaacacttcccattaggtttctgtctccagataccaatcagggaatgactggccaggactggaacttaacggccttganaacatgtgggatttgtctttgagccccattggcttgtgatgttttcctctgncctccctgagacagttgctcctgtcctggggggctctgcctccacctcccagnccaggatgtctgaggtggttgcaggctgcttgctgcccagtttccagtctgttctggnccagggaagcaccaccccatggcccttgctgcttntggcaggggncctnannagctn

SEQ ID NO: 7670 - DNA, 773 bp, Homo sapiens
  misc_feature (501)..(501): "n" may be a, t, c, g, other or unknown
  misc_feature (680)..(682): "n" may be a, t, c, g, other or unknown
  misc_feature (695)..(695): "n" may be a, t, c, g, other or unknown
  misc_feature (752)..(752): "n" may be a, t, c, g, other or unknown
  misc_feature (763)..(763): "n" may be a, t, c, g, other or unknown
  misc_feature (771)..(771): "n" may be a, t, c, g, other or unknown
aatatagaacagtcaggttttattacttttaagtaataaagagccttttccttgcttttcttttttccctttttttcttttcttttttcttttcttacaacatacattaagtcgtgaatcagatgttaggggatgtggagatggaaggaaaattggtgacatcacaatatttttacaactttacaacaaatataaatctgagtttgttgcatctaccagtgtctagcaagggtggaaagcaaaggcacactcgggtttatggaccctccccccacacacagtggggaaaaaaactggggagaaatacttaaatgcagaagaccagctcaatacatgtgggtattttagggttaacaccagaagtgatgggttgtgggggtgtaggaatgtggatgtaagttttgacacaggtctccttaacagctgaggcagtgatgcctacaaacactggacaagacagccgcttacgtcaatgatgggtgctgcactgccagtactctngggagtcaagcatgggaaagaagggggcagggggatacagacccatcaccttcctaatttctgcatttctagagaaaattcaaggaagaaaacaatatttcaggttctaggaaatacttcagggtttcaggagacagagttcacaggatgtgaacatggattccattcaaaagccaaannnaaaaaagtaaaancacacaaccacctactcctaaatacagcaaaactaagggcttttggaacaaaggctnttacccccctnagctaagnct

SEQ ID NO: 7671 - DNA, 868 bp, Homo sapiens
  misc_feature (300)..(300): "n" may be a, t, c, g, other or unknown
  misc_feature (315)..(315): "n" may be a, t, c, g, other or unknown
  misc_feature (699)..(699): "n" may be a, t, c, g, other or unknown
  misc_feature (706)..(706): "n" may be a, t, c, g, other or unknown
  misc_feature (752)..(752): "n" may be a, t, c, g, other or unknown
  misc_feature (757)..(757): "n" may be a, t, c, g, other or unknown
  misc_feature (787)..(787): "n" may be a, t, c, g, other or unknown
  misc_feature (828)..(828): "n" may be a, t, c, g, other or unknown
  misc_feature (859)..(859): "n" may be a, t, c, g, other or unknown
  misc_feature (868)..(868): "n" may be a, t, c, g, other or unknown
gataagtaaaatgacttttactattgatatcagttttgtttaatctgaaactataaaatagagatatatctacctatttatggatggataataccatcatctcatatttgtggaatgctttatagtttttcaaagtacttttattcactttatcttccatatatgttatctcctctgattccagcaataacagcccggtgaggtagccagggcaagtatgtattttacacattagcaggaagggaggctaagcgaggtttatgtaacttactcaggctgaaacactgaagaaaaatttgngactctcatttcagngatgttttctgcattattaaaaaatattatgctactcctcactatattatgttgatggttgaaatgtcattataaagcttaatttatatgattctcttgatgaggatgatgaagcaaatgctccatcaactcactagtttacaggggcaagcattttcctacatttcacacataatttgattacctctgtcctaagtgaataatctactatctgggtatgagaaacatgatttgaaaacactaaaccactatattatttcaacaaagaaccatctttcacacctaagtaaaaaggaacttcaaaaaaagtcctaaccaaaaaaaatccaaatgatgcatgaaatcaagtcaaaattgggtatcttttatccggttcttcgttgnggtgaanaatgttgcctggattccttccatctaaaacttgatggtagacctgnggcanaactctagaaccgactttagccttgggaanccaagaggccaaacctaaagctcactttctgcatggatgcntgatcaaggagctcttctgcttggaaccggngcttggaan

SEQ ID NO: 7672 - DNA, 388 bp, Homo sapiens
  misc_feature (317)..(317): "n" may be a, t, c, g, other or unknown
gccaagataaatcacttttatctctatagggaaagggaggatctaaaaaaaatataaattacattagtaacacaacataagaaaaagacagggacaaaaacaacagaagaagtctgaatgatgctaccctaacctatttataaaaaggccctgcatcagaaattcacaatcctacccacttctaaaaatatatttagacatgtacagaagcggtgggcttgtttttaaattgtttgctttttttgtaaaaatatattaaaggtgaatagaaatcctctctcccttccccctgtccagcccccagctagggactgganatcaggggtaactatctcatggtgttctaaaccttgattactaacactcccaacccctccccaactcactt

SEQ ID NO: 7673 - DNA, 360 bp, Homo sapiens
  misc_feature (3)..(3): "n" may be a, t, c, g, other or unknown
  misc_feature (14)..(14): "n" may be a, t, c, g, other or unknown
  misc_feature (19)..(19): "n" may be a, t, c, g, other or unknown
  misc_feature (134)..(134): "n" may be a, t, c, g, other or unknown
  misc_feature (137)..(137): "n" may be a, t, c, g, other or unknown
  misc_feature (147)..(147): "n" may be a, t, c, g, other or unknown
  misc_feature (149)..(149): "n" may be a, t, c, g, other or unknown
  misc_feature (275)..(275): "n" may be a, t, c, g, other or unknown
  misc_feature (312)..(312): "n" may be a, t, c, g, other or unknown
  misc_feature (348)..(348): "n" may be a, t, c, g, other or unknown
ganatggagtggantgcantggcgtgatttcagctcactgtaacctccaccttgcaagttgcagcgattctcatgcctcagcctcccgagtagctgggactacaggcatgtgccaccacacctggctaattttngtnttattagtananatggggtttcactgtgttggccgggctggtcttgaactcctgacctcaggtgatccacctgccacagcctcccaaagtgctgggattacaggcttgagccagtgcacccggccgactctctaccanaaacttttcttccaatatgaaggaagcatggagtgtnggctacagtcacttaatgatccttccaagttcaaantcatgataattc

SEQ ID NO: 7674 - DNA, 378 bp, Homo sapiens
  misc_feature (234)..(234): "n" may be a, t, c, g, other or unknown
  misc_feature (245)..(245): "n" may be a, t, c, g, other or unknown
cacaatgaataatacatttattaaacaaattatttctttcctacatgatttctctgatgttacattgagggttgacttatggcagaaaaattttccatattcattacatttataaaattttactcctctatacatactcacagtttagcattgtgtaagttatttgatttgttgctttgttggaatttattactttgttggaacttattccttgtgggatttctgatgtaaaanaaagtttgatntgtggcgaaatgttttctcacatttgttacattcataaggtttctctcctgtgtgtattttctgatgttcagtgagagtccacaggcgacggtaggttttcccacattgattacattcatatggtttctctcc

SEQ ID NO: 7675 - DNA, 377 bp, Homo sapiens
  misc_feature (84)..(84): "n" may be a, t, c, g, other or unknown
  misc_feature (143)..(143): "n" may be a, t, c, g, other or unknown
  misc_feature (150)..(150): "n" may be a, t, c, g, other or unknown
  misc_feature (175)..(175): "n" may be a, t, c, g, other or unknown
  misc_feature (268)..(268): "n" may be a, t, c, g, other or unknown
ccgtgtcattctcacttctaaatagctctagacttggtcccattgcactaacttaattcactctccatcatctttggcttggantacaactccgtccttccatctaatctgcctgtctccaatcgttctcccctttgatgtgnagggcanccactgatctctctaacatttacanaaaaatgcaccacttgggttgtttaaaacccttcaatggcttcccattgccccaagttcaaactctgcaatgtggcctacacatctctctagnttcacctcctgctcaatatcctacagcacagtgaagttcttggtggtcctcaaaagggccctcaaacttcaaacattcccttcaaccttaaaatcctcaattgggaaaa

SEQ ID NO: 7676 - DNA, 223 bp, Homo sapiens
  misc_feature (38)..(38): "n" may be a, t, c, g, other or unknown
  misc_feature (65)..(65): "n" may be a, t, c, g, other or unknown
  misc_feature (143)..(143): "n" may be a, t, c, g, other or unknown
  misc_feature (168)..(168): "n" may be a, t, c, g, other or unknown
  misc_feature (175)..(175): "n" may be a, t, c, g, other or unknown
  misc_feature (204)..(204): "n" may be a, t, c, g, other or unknown
  misc_feature (206)..(206): "n" may be a, t, c, g, other or unknown
gagtatgatgtttaatgtaagatccagtggcttggcanagttggtgcaaaactgtaaagtaccanattaagttctagtcagtgagttagcagcctaggcacttgggcaaaaaaattggccctgctgtcccaagtcctccaaanccctctccgtatcaccagctagganctccaanactgatatgccactacttggaggcttgantnaaatccacgcgtcctca

SEQ ID NO: 7677 - DNA, 379 bp, Homo sapiens
  misc_feature (25)..(25): "n" may be a, t, c, g, other or unknown
  misc_feature (339)..(339): "n" may be a, t, c, g, other or unknown
  misc_feature (354)..(354): "n" may be a, t, c, g, other or unknown
  misc_feature (360)..(360): "n" may be a, t, c, g, other or unknown
  misc_feature (368)..(368): "n" may be a, t, c, g, other or unknown
  misc_feature (376)..(376): "n" may be a, t, c, g, other or unknown
ggtttgaaatatctttttgcaatanataatcttatttacattaatacagaatcattttacattcctaaatcagacactaatagatgctttattttagtgaattataaaggaaaacaaaaaggaaactgttgagaagtgttcttcattaacctgtctaacgacagcccgaagatcctgaaacacatggaaactgcgacatgctaccagcagaggctggggaatgggggttctgctctcactgaatggtggggaaccttcaactgcttagcctgtgctttccttttctgaatcaacatttacaaaggaaaaaacaatgattagcactgaataatttaaacncacttcagaaaatanatgtcnacagtgtnagtggganaac

SEQ ID NO: 7678 - DNA, 376 bp, Homo sapiens
  misc_feature (169)..(169): "n" may be a, t, c, g, other or unknown
  misc_feature (171)..(171): "n" may be a, t, c, g, other or unknown
  misc_feature (244)..(244): "n" may be a, t, c, g, other or unknown
  misc_feature (304)..(304): "n" may be a, t, c, g, other or unknown
  misc_feature (310)..(310): "n" may be a, t, c, g, other or unknown
aaaatatttccttttattctggaacaaaaactggagaaaggacaatgattccttcagaaagcaatgactcaattcaggttgttactttacatttaagtaccactcaaaaagtggacataaaagcaagtgattcctgtttgcccatcactatatcagctacatagctgananttcagatcttaattacacaacactttctctgttaccagaagctaagactgctctgcgacaaataggacaggtngaattctcagataaccagcgatcgatgcagtggacatggtactcatgggaaacaaggtantttacnaagtttgttgccttctggtatattctgtaatgcaaacactacagggtttttaatgcatcatttttc

SEQ ID NO: 7679 - DNA, 386 bp, Homo sapiens
  misc_feature (316)..(316): "n" may be a, t, c, g, other or unknown
  misc_feature (344)..(344): "n" may be a, t, c, g, other or unknown
ggtagtcaaagtaaaggtttgtccttgcatcagaatggtttaaatcttgcaatttgcatatacaaaggagttcagcaacattcactggcattataatcagagcaagatcaaattataaatgtaatcaaagaaaatatgatagttgaactgtaataacatacatacattataaagactgcacataaattaaacacaacttagttaaacaaacaaacaaaaaagtatcagtaattatacacttaaaagaataacatggggatgtctccaaatgctgaaacacaggtgtcaggctcatttaaaaaagtgtttaaaaacncataaaaataccttttaaaacactggtntgcattcttcattcatatagcacatgggagaaaaaccgtaaa

SEQ ID NO: 7680 - DNA, 285 bp, Homo sapiens
  misc_feature (2)..(2): "n" may be a, t, c, g, other or unknown
  misc_feature (8)..(8): "n" may be a, t, c, g, other or unknown
  misc_feature (24)..(24): "n" may be a, t, c, g, other or unknown
  misc_feature (126)..(126): "n" may be a, t, c, g, other or unknown
  misc_feature (140)..(140): "n" may be a, t, c, g, other or unknown
  misc_feature (205)..(205): "n" may be a, t, c, g, other or unknown
  misc_feature (235)..(235): "n" may be a, t, c, g, other or unknown
  misc_feature (254)..(254): "n" may be a, t, c, g, other or unknown
  misc_feature (271)..(271): "n" may be a, t, c, g, other or unknown
  misc_feature (284)..(284): "n" may be a, t, c, g, other or unknown
tnagttanatacagtgcctataangaacagacgcccagcgcaacaggtcgaggcctttgtccttgatgatttttttttcctctggctacgttcagtccgactgaagtgcagcgctatgcatatgtnaacatattcgttanagccgatcacctttaaggtcattcggaaaaaacggtccttgttttcgcggtgtgggtgtgggtcntaacaccagtctcattcccccgggaggaangctcttgggcgttggacantcccactcgggttgtgncacagggacaatnt

SEQ ID NO: 7681 - DNA, 380 bp, Homo sapiens
  misc_feature (162)..(162): "n" may be a, t, c, g, other or unknown
agaatacaaagaaatttacatttattataccgcaaaaaaactcatacatttataaataccagtaacatgcatagaattggaataagatggttactttctaataaaaggagacacctccaatgggcaaagcggtaaaaaaggactttccacaaattaaacganactagcctcagtagatccttattaacacttaagtgaattcaaagcccttcctgaaactgggatttgcctcgctaaccctctctgcaccctgagcaacgaagttggggataattggcttcaggaacttgaactcatttgtcccggattctccagtcagacacacctcgtactggtagctctgggacagggtcccggtgccgctcacgtccaccatctgc

SEQ ID NO: 7682 - DNA, 380 bp, Homo sapiens
aaaaagatacttttaataacatgaaggaaaaaaattcaaaataacatatctatacaaatacatcctattgttattccagtatttcacagaataaagaatttgtctatataatttccttcagtagcccacaaaatatttaccactcctttccttaattaccattgtattaaagacatctgatgtcaatgacaaaaactccagtattaatgcttaagagctaggttacattatttaagtttttcatttaatctaacatcttcaagtcatagggaactttttaaactaatcttgttcacactccaggacattcccacgccaaaaaaaaaaagtcagatcaacagccagaaaaaaaaaccaaacaacaaaaaaaaccacagcta

SEQ ID NO: 7683 - DNA, 379 bp, Homo sapiens
  misc_feature (49)..(49): "n" may be a, t, c, g, other or unknown
  misc_feature (255)..(255): "n" may be a, t, c, g, other or unknown
  misc_feature (317)..(317): "n" may be a, t, c, g, other or unknown
  misc_feature (369)..(369): "n" may be a, t, c, g, other or unknown
agtataatccactttataagtttttaaacaaatatacttatgcataganaaaatctggaaaaatatatgccagctataaagtggttattgctcatgggataaattgtgggaaactttttccctttttgcttctctgtgttgtgatttcctaaagacagggcagtggtgtccctaaactgctctggaactgcaggacctaacagcctcactgtgtctgctcacccaagtctgacaggtggcagggcagtgtctgangcccactgggatgcagacccaggaaagctggggtggggggcttctggtccccatctctgcancctcatcctctccccagctacacagacccagatggtcactgtcctggaccanatgaaggcag

SEQ ID NO: 7684 - DNA, 381 bp, Homo sapiens
  misc_feature (23)..(23): "n" may be a, t, c, g, other or unknown
  misc_feature (381)..(381): "n" may be a, t, c, g, other or unknown
gagttggagttttgctctgttgnccaggctggaatgcagtggcgcggtctcggctcactgcaacctctgcctcccgggttcaagcgattcttcctgcctcagcctcccgagtagctgggactacaggcgcgtgccaccacgcctggctaattttttgtatttttattagagaccgacttagccaggatggtctcgatctcctgacctcttgatccacccgcctcagcctcccaaagtgctgggattacaggcgtgagccaccgtgcccagcttttcaagtttcttaaatccatgatccttagtaaaaacattttacacatatcttcatacaagtatatgtatatgtggtatacgtacacactatagttgtatatgcattan

SEQ ID NO: 7685 - DNA, 378 bp, Homo sapiens
  misc_feature (130)..(130): "n" may be a, t, c, g, other or unknown
  misc_feature (132)..(132): "n" may be a, t, c, g, other or unknown
  misc_feature (178)..(178): "n" may be a, t, c, g, other or unknown
  misc_feature (183)..(183): "n" may be a, t, c, g, other or unknown
  misc_feature (188)..(188): "n" may be a, t, c, g, other or unknown
  misc_feature (250)..(250): "n" may be a, t, c, g, other or unknown
  misc_feature (271)..(271): "n" may be a, t, c, g, other or unknown
  misc_feature (279)..(279): "n" may be a, t, c, g, other or unknown
  misc_feature (376)..(376): "n" may be a, t, c, g, other or unknown
aggatgttctctttatttctctttggtttcttaacacaaaagacatgcattctataaataaaaggaactaagattttctgggaaaccataaattgggaggaattcccacagtcacacctctgtggtcaanangatggtcttcagcccccatctggctgtaatctctgatgaaatccanaaaanaaggnccgtgtgttatccaaaaaggtgaaacactcaaggacagtgaatgccacagtcctctgctcanaactgggctaggccccaaggnccactgantacaatgtctaccctatctccttgttacatcctttttacaatatccttgggtgatgcttcttttcatggggctattggaaaggctccaacaccaaanaa

SEQ ID NO: 7686 - DNA, 384 bp, Homo sapiens
  misc_feature (9)..(9): "n" may be a, t, c, g, other or unknown
  misc_feature (194)..(194): "n" may be a, t, c, g, other or unknown
  misc_feature (197)..(197): "n" may be a, t, c, g, other or unknown
  misc_feature (374)..(374): "n" may be a, t, c, g, other or unknown
gtatcaatnaatttttttattcagaacctggatctttaagactggtataaacaaaaataaaatacaaacaacttgttattaacataatagctgcagttattaactgcaagaaatacagtaaaaaggagtcatactaaatgttaatgttcttgcaacagaattttcccaatcaccttaaggtagcaaattctggnaanaaatgataattcatttcttattaaaaatacttaaagaatttccaagattgatcagttgtgccacaaataaaacagcagtttattcaaaagaagcccttacctttctcttattttcctaaaagatctgccatttacaggtaactactaatttcagatcagttattcaaaccaggggtncttcctggta

SEQ ID NO: 7687 - DNA, 387 bp, Homo sapiens
  misc_feature (279)..(279): "n" may be a, t, c, g, other or unknown
gactgccattgcttcacacctttaatactgtcttaaaggttctattgctcttcaacgatcttagtgtactttgaaatataaaagtaataattatcattggaacagttattctaaatctaaaaagataactcccatagcaatatttgtttactcagaacatattttcacttccaatatatgtaaaatttctcacaaaggaacagaactcacagtttgaacagaaacctcagtgtttaaatctccacattcagtaaaataaacgctacatagtaggttgtnctgaatataaatcacgcatttaactaaatgggatataatttctaacttgtgttaaaagtgaagaaataattttttatggtgaagccttgtcccaactcagtcaagtgc

SEQ ID NO: 7688 - DNA, 282 bp, Homo sapiens
  misc_feature (3)..(3): "n" may be a, t, c, g, other or unknown
  misc_feature (52)..(52): "n" may be a, t, c, g, other or unknown
  misc_feature (98)..(98): "n" may be a, t, c, g, other or unknown
  misc_feature (184)..(184): "n" may be a, t, c, g, other or unknown
  misc_feature (195)..(195): "n" may be a, t, c, g, other or unknown
  misc_feature (237)..(237): "n" may be a, t, c, g, other or unknown
  misc_feature (259)..(259): "n" may be a, t, c, g, other or unknown
  misc_feature (265)..(265): "n" may be a, t, c, g, other or unknown
cantgaacattccagattttattagtaaccatgcattatatatttctttacncttaaggaatagatatgaaacaatcttggagtaaaaattagaaggnaacttgcttcaagtttgtcccaagtcaatcaagcagaaacctgaagaaccttgttttaagatgagagtcatttatacttggcaggnattttcttccnatgaaaaaataaagtcaatgtgccattatcttgacacttatnaaaatgtttataaaaagcattnaggccnttgattctcacagttgg

SEQ ID NO: 7689 - DNA, 379 bp, Homo sapiens
  misc_feature (4)..(4): "n" may be a, t, c, g, other or unknown
  misc_feature (23)..(23): "n" may be a, t, c, g, other or unknown
  misc_feature (126)..(126): "n" may be a, t, c, g, other or unknown
  misc_feature (131)..(131): "n" may be a, t, c, g, other or unknown
  misc_feature (133)..(133): "n" may be a, t, c, g, other or unknown
  misc_feature (224)..(224): "n" may be a, t, c, g, other or unknown
  misc_feature (262)..(262): "n" may be a, t, c, g, other or unknown
  misc_feature (307)..(307): "n" may be a, t, c, g, other or unknown
  misc_feature (315)..(315): "n" may be a, t, c, g, other or unknown
  misc_feature (348)..(348): "n" may be a, t, c, g, other or unknown
  misc_feature (379)..(379): "n" may be a, t, c, g, other or unknown
gcantttgtaaaatgtttattanacctaaacgggtgcctggctcttagttgattatctcctggatctgcaaagaaaaaaaggaaaacaaaaggggaaggggattctctacaaggcctaggcatganagganantcacatcaagttaagtactgggccacgtgacatatcacaatccccatgtggacacattccagtaagacaacacctaggtgctgggcccagnaacatatgactgtgtcttttataggcaaacacagggtntaaagaggggaggggataacaatcaaacatctgatgggccaaaanatatgtcncaatgccccctgtgggcagggtccacgctgganacacatatcaccttggcgttgggcccatgan

SEQ ID NO: 7690 - DNA, 387 bp, Homo sapiens
  misc_feature (1)..(1): "n" may be a, t, c, g, other or unknown
  misc_feature (73)..(73): "n" may be a, t, c, g, other or unknown
  misc_feature (97)..(97): "n" may be a, t, c, g, other or unknown
  misc_feature (129)..(129): "n" may be a, t, c, g, other or unknown
  misc_feature (197)..(197): "n" may be a, t, c, g, other or unknown
  misc_feature (228)..(228): "n" may be a, t, c, g, other or unknown
  misc_feature (244)..(244): "n" may be a, t, c, g, other or unknown
  misc_feature (269)..(269): "n" may be a, t, c, g, other or unknown
  misc_feature (337)..(337): "n" may be a, t, c, g, other or unknown
  misc_feature (345)..(345): "n" may be a, t, c, g, other or unknown
  misc_feature (348)..(348): "n" may be a, t, c, g, other or unknown
natacacaatatataatactgggaagatttcatttcagtgtttcccaaaacattattcctgggaaagggtgtnctctcccatgactctggataatanaagttttgttctgattttttaagtcacctcanacagacactggaacacgttagatctaacacttaagtgctttgaaagggcagtaaaaaatccccaaggnaattcaagaaattgtaataattgctgggaanactgtggtttctgtancccagggtggcttcacagttgtcanaggtcacaaattctatgtccctctccgaccagggacctccaggacagcttccctggttggttctcgantctttcancanaaggcagaccaacagaagaagggttgttgaccttctcca

SEQ ID NO: 7691 - DNA, 383 bp, Homo sapiens
  misc_feature (96)..(96): "n" may be a, t, c, g, other or unknown
  misc_feature (133)..(133): "n" may be a, t, c, g, other or unknown
  misc_feature (196)..(196): "n" may be a, t, c, g, other or unknown
  misc_feature (215)..(215): "n" may be a, t, c, g, other or unknown
  misc_feature (236)..(236): "n" may be a, t, c, g, other or unknown
  misc_feature (240)..(240): "n" may be a, t, c, g, other or unknown
  misc_feature (282)..(282): "n" may be a, t, c, g, other or unknown
  misc_feature (311)..(311): "n" may be a, t, c, g, other or unknown
  misc_feature (343)..(343): "n" may be a, t, c, g, other or unknown
  misc_feature (361)..(361): "n" may be a, t, c, g, other or unknown
ggcagtcatacacttgtcattcttgtttcttcctctcatgacatgggaaaggcaggtaaaaagatctcttgaaggttgctccgaagcccatgggantgaatgttccggtggacttggggctctgctgacggangccaggccacaaggggacaacgctggcaccaggcccagtcacctctgtaccactcgttagtantctggttggtggccgccanatacaggacaaacaacaggtngccncccaggaggaagctcagaaccacgacaaagcccagcatgaanacaatccgtggaaaagtcaggaacaggtnctgaataaaaaagaccgtgtccataacatggnaggtgtccaaggtcatcnatgtaagtctcctggtataaat

SEQ ID NO: 7692 - DNA, 379 bp, Homo sapiens
  misc_feature (1)..(379): "n" may be a, t, c, g, other or unknown
nnnnnnnnnnnnnnnnnnnnnnnnnnnnnnnnnnnnnnnnnnnnnnnnnnnnnnnnnnnnnnnnnnnnnnnnnnnnnnnnnnnnnnnnnnnnnnnnnnnnnnnnnnnnnnnnnnnnnnnnnnnnnnnnnnnnnnnnnnnnnnnnnnnnnnnnnnnnnnnnnnnnnnnnnnnnnnnnnnnnnnnnnnnnnnnnnnnnnnnnnnnnnnnnnnnnnnnnnnnnnnnnnnnnnnnnnnnnnnnnnnnnnnnnnnnnnnnnnnnnnnnnnnnnnnnnnnnnnnnnnnnnnnnnnnnnnnnnnnnnnnnnnnnnnnnnnnnnnnnnnnnnnnnnnnnnnnnnnnnnnnnnnnnnnnnnnnnnnnnnnnnnnnnnnnnnnnnnnnn

SEQ ID NO: 7693 - DNA, 418 bp, Homo sapiens
  misc_feature (1)..(418): "n" may be a, t, c, g, other or unknown
nnnnnnnnnnnnnnnnnnnnnnnnnnnnnnnnnnnnnnnnnnnnnnnnnnnnnnnnnnnnnnnnnnnnnnnnnnnnnnnnnnnnnnnnnnnnnnnnnnnnnnnnnnnnnnnnnnnnnnnnnnnnnnnnnnnnnnnnnnnnnnnnnnnnnnnnnnnnnnnnnnnnnnnnnnnnnnnnnnnnnnnnnnnnnnnnnnnnnnnnnnnnnnnnnnnnnnnnnnnnnnnnnnnnnnnnnnnnnnnnnnnnnnnnnnnnnnnnnnnnnnnnnnnnnnnnnnnnnnnnnnnnnnnnnnnnnnnnnnnnnnnnnnnnnnnnnnnnnnnnnnnnnnnnnnnnnnnnnnnnnnnnnnnnnnnnnnnnnnnnnnnnnnnnnnnnnnnnnnnnnnnnnnnnnnnnnnnnnnnnnnnnnnnnnnnnnnnnnn

SEQ ID NO: 7694 - DNA, 458 bp, Homo sapiens
  misc_feature (66)..(66): "n" may be a, t, c, g, other or unknown
  misc_feature (219)..(219): "n" may be a, t, c, g, other or unknown
  misc_feature (233)..(233): "n" may be a, t, c, g, other or unknown
  misc_feature (299)..(299): "n" may be a, t, c, g, other or unknown
  misc_feature (306)..(306): "n" may be a, t, c, g, other or unknown
  misc_feature (344)..(344): "n" may be a, t, c, g, other or unknown
  misc_feature (380)..(380): "n" may be a, t, c, g, other or unknown
  misc_feature (388)..(388): "n" may be a, t, c, g, other or unknown
  misc_feature (420)..(421): "n" may be a, t, c, g, other or unknown
  misc_feature (458)..(458): "n" may be a, t, c, g, other or unknown
aatgaaatggaatttaatgtaactatgacataaacacacacagggtggggaggacgggtgaccaancgcaaacgtgggtgacacgtggccccgctctctggaccctcagtgggaaaaagtctgaggctggcgtctctcaccaaaccccacctcccctggtgggtcaatactgatctggctgagtgacagcatctcgtgacccaggctggccctgggaangcgccacaggcgangcctgcgagtccaggggagcaggcagacgctacagtggcccccgagcgcgccaggtgccagcctcnacgtgtnaatggcccgctgcgggcgctgctgggaaagaaaacaanaaggtgagggctcgtcctcaccaagtgcttcctgantgccgtangacgtgggtgggacatggggacagtgagggtnncacaaacagcaacgaatgcacaaagacaagttccagn

SEQ ID NO: 7695 - DNA, 400 bp, Homo sapiens
  misc_feature (139)..(139): "n" may be a, t, c, g, other or unknown
  misc_feature (149)..(149): "n" may be a, t, c, g, other or unknown
  misc_feature (171)..(171): "n" may be a, t, c, g, other or unknown
  misc_feature (174)..(174): "n" may be a, t, c, g, other or unknown
  misc_feature (234)..(234): "n" may be a, t, c, g, other or unknown
  misc_feature (245)..(245): "n" may be a, t, c, g, other or unknown
  misc_feature (318)..(318): "n" may be a, t, c, g, other or unknown
  misc_feature (346)..(346): "n" may be a, t, c, g, other or unknown
  misc_feature (357)..(357): "n" may be a, t, c, g, other or unknown
  misc_feature (394)..(394): "n" may be a, t, c, g, other or unknown
  misc_feature (398)..(398): "n" may be a, t, c, g, other or unknown
gccttttgtacaaagtttttatgtatatatatatgtatatatatttatgtacacagacacaaggggtataaaatccagtgagaagggctcacacatgcccaggtaagggatgggagtagctataattgccagggttgangccacagtanaggcacacaggaagtggtaaantancagcctccctccatcctcctacctcgggccaaagggaggaaatgggaggaaggacaattntacaaaggaanatggaaaatactggaaaggcatactccaccttttactaaattcctgaaagcccctaaatgcctcacaggacanatcactctcacacctcctggcaggacanatcactctgangcctcctggcaggataaatcacttccatgcctcctancaanat

SEQ ID NO: 7696 - DNA, 601 bp, Homo sapiens
  misc_feature (59)..(59): "n" may be a, t, c, g, other or unknown
  misc_feature (196)..(196): "n" may be a, t, c, g, other or unknown
  misc_feature (217)..(217): "n" may be a, t, c, g, other or unknown
  misc_feature (262)..(262): "n" may be a, t, c, g, other or unknown
  misc_feature (400)..(400): "n" may be a, t, c, g, other or unknown
  misc_feature (503)..(503): "n" may be a, t, c, g, other or unknown
  misc_feature (510)..(510): "n" may be a, t, c, g, other or unknown
  misc_feature (578)..(578): "n" may be a, t, c, g, other or unknown
  misc_feature (588)..(588): "n" may be a, t, c, g, other or unknown
  misc_feature (601)..(601): "n" may be a, t, c, g, other or unknown
gtattggttttatttaaattttacagaaacctgatcagagttaagtatgtaattataantccagtaacaatttctacaaaaatgcacatacaatgccagaactccttaaaagcaactaatatcatatttgtgttttgcataaaacatgcattaatatgttggccaaaatcagtctctacaaaaagagacagtccantacagtcaataagaaaactanttgtgaacaacaggtaaaaaaagaggtttccagttaatgtgaaanaaggaatagtacctttcataaaacaagcccttcagcgctgagttaactgatcggtactattgtgctgcacgtaatgtaacacatcacctccaagacttggtcctgattggtcataggaagtaagggactttctggtanttacatcagatatttgagaagattaaaagttttccggacatgatggtatactaatagtgcaaccttgcaaaaagggttcgaaacattgtcagacttggaaaantccccancttgataaacaacccccaaagacaccccgagcctttgaacggagcctctgcacaaggccactcaaggntcaccatttnttctgtgggcccn

SEQ ID NO: 7697 - DNA, 574 bp, Homo sapiens
  misc_feature (459)..(459): "n" may be a, t, c, g, other or unknown
  misc_feature (517)..(517): "n" may be a, t, c, g, other or unknown
  misc_feature (531)..(531): "n" may be a, t, c, g, other or unknown
  misc_feature (540)..(540): "n" may be a, t, c, g, other or unknown
  misc_feature (549)..(549): "n" may be a, t, c, g, other or unknown
  misc_feature (569)..(569): "n" may be a, t, c, g, other or unknown
attaataatacttattttaatctgttccctttagtatgtctttatacagttcccctcgtgtatatacactgatataactacaatttaaaagccactaattatctgttttttactttgtagtaacaagatatagacatttgaatgccaatgtcttattctggagagacactggagctgaagttcaacaatgatcacacttattacctggcaataaaaacacaaccatctttccagtcaggtcaaaatatcctactttttgcctttctaccaaatcccaaacattcacagtttttcaaggaccactaataaaatacaggaagcttttaaagacagtaagagaacacctagtgtaagttaggtgaattaaagatggcaaaggagattacatcctcaacactgacagcttccaagacttagaaaagagattgttccttgcttctaaaattgttctattttccnctgtagggaaaatgaaagttttttcttacaaatattgaataatccaagtacttacgcnaaattaatcctgcnccccatganatgaacacnccatttaaatgatctttacnatccc

SEQ ID NO: 7698 - DNA, 490 bp, Homo sapiens
  misc_feature (85)..(85): "n" may be a, t, c, g, other or unknown
  misc_feature (118)..(118): "n" may be a, t, c, g, other or unknown
  misc_feature (239)..(239): "n" may be a, t, c, g, other or unknown
  misc_feature (244)..(244): "n" may be a, t, c, g, other or unknown
  misc_feature (302)..(302): "n" may be a, t, c, g, other or unknown
  misc_feature (405)..(405): "n" may be a, t, c, g, other or unknown
  misc_feature (443)..(443): "n" may be a, t, c, g, other or unknown
  misc_feature (450)..(450): "n" may be a, t, c, g, other or unknown
  misc_feature (457)..(457): "n" may be a, t, c, g, other or unknown
  misc_feature (472)..(472): "n" may be a, t, c, g, other or unknown
cccaggagataaaaaaatttattttaatgcacaactatagcattcatatgcctcagcccagggcaggggttgggagttaggtaanaagggatgcatttagtttgccctgtccccaaanagcgggtaaatagctaagccactcttcactcccagcacagaccttcagaagccccagatatcaggatgtaatggtagggctcactgctctaaaacagctcaaacaacctgctcccaggaangcaanccttctgctccttggtcccctgcctaccattaggacacaatgttcttcgtctggccanacatctgttgaaaggctggatacaggacaacgtacccatctttccatctatatcaactatcctaggtctctgataccccattttggagcactgttgaagtcantctctggaggtagtgctgacgcaaaaggggcaactganaataaanctcaaanccctctgggaacgtngaaattgggaagcttata

SEQ ID NO: 7699 - DNA, 358 bp, Homo sapiens
  misc_feature (37)..(37): "n" may be a, t, c, g, other or unknown
  misc_feature (114)..(114): "n" may be a, t, c, g, other or unknown
  misc_feature (203)..(203): "n" may be a, t, c, g, other or unknown
  misc_feature (206)..(206): "n" may be a, t, c, g, other or unknown
  misc_feature (250)..(250): "n" may be a, t, c, g, other or unknown
  misc_feature (281)..(281): "n" may be a, t, c, g, other or unknown
  misc_feature (333)..(333): "n" may be a, t, c, g, other or unknown
  misc_feature (335)..(335): "n" may be a, t, c, g, other or unknown
  misc_feature (338)..(338): "n" may be a, t, c, g, other or unknown
  misc_feature (353)..(353): "n" may be a, t, c, g, other or unknown
aaggcaagaacaacagtatttattcagcaagtacaanaccagtttgagagctgcattcagtgcaaccagagaccctttcgttccaaccaggagccagtggggctggtgacaaanctggctggagctctgcacggggcaaggagtgcatggtgggggctgaccgctcatttggctccttgaatctctttctgatttctatctanaanctcccgggcaagggtagggcctatgtagggactgggggtggatnaagcgcatggcctacagtggaccactccaanacgtggttccctggtgccacgggtcacacatctctcaggcggaggcactcananaangtaaagctttcctancccaa

SEQ ID NO: 7700 - DNA, 585 bp, Homo sapiens
  misc_feature (331)..(331): "n" may be a, t, c, g, other or unknown
  misc_feature (354)..(354): "n" may be a, t, c, g, other or unknown
  misc_feature (446)..(446): "n" may be a, t, c, g, other or unknown
  misc_feature (491)..(491): "n" may be a, t, c, g, other or unknown
  misc_feature (558)..(558): "n" may be a, t, c, g, other or unknown
  misc_feature (568)..(568): "n" may be a, t, c, g, other or unknown
  misc_feature (574)..(574): "n" may be a, t, c, g, other or unknown
  misc_feature (581)..(581): "n" may be a, t, c, g, other or unknown
gagatggatcttgttctgttgccaggctggggtgcagtggcatgatctcagctcactgcaacctctgcctcctgggttcaagcagttctcctgcctcagcctcccgagtacctgggactacaggcacacgccaccatgcctggctaatttttgtatttttagtagagatgggatttcaccatgttggccaggatggtctccatctcttgacctcgtgatccacctgcctcagtctcccaaagtgccgggattacaggcatgagccactgcgcccagccaaaatcacccaattttaaaatactgattcaaaaacaaaaattccacgatgtangcctaacagaacttgataggtanaaattgggggaggccaccagtttgtgacccctcttgtaaatgaggatgatacttacttggcacaaaacatctgtctttgtggaactaactanatggtcctaggtacataaacttaattttcatatcttgccaaaatngaagcttttctgtgtatccaaatatattgttcaaaattctcccaccaggttcaggaattccattaanatggttgttnaccccnaaaaaanaatc

SEQ ID NO: 7701 - DNA, 525 bp, Homo sapiens
  misc_feature (21)..(21): "n" may be a, t, c, g, other or unknown
  misc_feature (55)..(55): "n" may be a, t, c, g, other or unknown
  misc_feature (82)..(83): "n" may be a, t, c, g, other or unknown
  misc_feature (150)..(150): "n" may be a, t, c, g, other or unknown
  misc_feature (183)..(183): "n" may be a, t, c, g, other or unknown
  misc_feature (271)..(271): "n" may be a, t, c, g, other or unknown
  misc_feature (323)..(324): "n" may be a, t, c, g, other or unknown
  misc_feature (450)..(450): "n" may be a, t, c, g, other or unknown
  misc_feature (457)..(457): "n" may be a, t, c, g, other or unknown
  misc_feature (460)..(460): "n" may be a, t, c, g, other or unknown
  misc_feature (506)..(507): "n" may be a, t, c, g, other or unknown
agagatggaacttgctatgtngtccacgatggattcaaaatcctgggctcaaganatcctcctgcctcagcctcctgagcanntgggactacaggtgtgcaccgccacactccacagctgatgttttaataaagtgccactgagtatcanactgatcaaactgaaaacatcccagaacttcanaccaggttaagggggccaatgagaagatcatgaaaagtgacatcagatgaaagctgagatctgtgaaagtttcaaatcagtttttccnagtaagtccacagaccatttgataggctaagcccagttctttacacaatgtnncagccatcatgtctgagtactaattgttctcttcccactggtttttgtgaaattttctgttctgttaccttttaaagattctaccaagtttttgactgtttcaattgcaaacttattgcttttctncttggtnaangactttctgtttggagcaaatggtacaataaggataccaccccccnngccgattacttgaaatgg

SEQ ID NO: 7702 - DNA, 306 bp, Homo sapiens
  misc_feature (52)..(52): "n" may be a, t, c, g, other or unknown
  misc_feature (84)..(84): "n" may be a, t, c, g, other or unknown
  misc_feature (163)..(163): "n" may be a, t, c, g, other or unknown
  misc_feature (169)..(169): "n" may be a, t, c, g, other or unknown
  misc_feature (177)..(177): "n" may be a, t, c, g, other or unknown
  misc_feature (180)..(180): "n" may be a, t, c, g, other or unknown
  misc_feature (198)..(198): "n" may be a, t, c, g, other or unknown
  misc_feature (271)..(271): "n" may be a, t, c, g, other or unknown
  misc_feature (274)..(274): "n" may be a, t, c, g, other or unknown
  misc_feature (279)..(279): "n" may be a, t, c, g, other or unknown
  misc_feature (293)..(293): "n" may be a, t, c, g, other or unknown
  misc_feature (304)..(304): "n" may be a, t, c, g, other or unknown
agaaaatcaattgctttaattgcattgcagcagggaacctcagcaccatgtnggggaagaagaaatgggaagtcttggtttcanaatgcttttggctggccagaaggtggccaaacagggcaagggggctccctctgcttgggcattgtccacccctggtcantgagangggggcancangggtgctccccacggcantcctgctgcggccttccctcctggcctattcctggggcaggaacaaactccagccttcctccacatggctgangtnatcancacccctaccccangggcatcttcnca

SEQ ID NO: 7703 - DNA, 541 bp, Homo sapiens
  misc_feature (82)..(82): "n" may be a, t, c, g, other or unknown
  misc_feature (99)..(99): "n" may be a, t, c, g, other or unknown
  misc_feature (173)..(173): "n" may be a, t, c, g, other or unknown
  misc_feature (347)..(347): "n" may be a, t, c, g, other or unknown
  misc_feature (415)..(415): "n" may be a, t, c, g, other or unknown
  misc_feature (465)..(465): "n" may be a, t, c, g, other or unknown
  misc_feature (493)..(493): "n" may be a, t, c, g, other or unknown
  misc_feature (495)..(495): "n" may be a, t, c, g, other or unknown
  misc_feature (499)..(499): "n" may be a, t, c, g, other or unknown
  misc_feature (537)..(537): "n" may be a, t, c, g, other or unknown
cccaggctttctggccacctgttacaaaagcaatggaatgggagcaaccccgcaaaactggtcagggagtattgccactaanacttaaggaacagtcanagcctatgcctgtcgtatctgatttggggaggcaggagtagggctatgatttttaaaaaagttaggctaggcantgtcacttacaccccttccagctgtggtacttcatgatcctctgaactttaaactcgagaaagcaatatatcacctggaaccacgcagcatcctgaaccccctctctgggcaaggcttggaggcatggcgggtcccttcaagcccagggtggccttgacattcccgggatccanttgtcagcctttcttttctcggtgcacctcaggtccatgcggggttcagacctagaactcaaacttgngtaggccaatgaatttacctgttccaagaatccaaaacaggtggtgaaanataaaaatctccttaacccaatcccttntnttgnaagggaacaaaaatccttggaactttggccaggggtcncccc

SEQ ID NO: 7704 - DNA, 332 bp, Homo sapiens
  misc_feature (52)..(52): "n" may be a, t, c, g, other or unknown
  misc_feature (68)..(68): "n" may be a, t, c, g, other or unknown
  misc_feature (126)..(126): "n" may be a, t, c, g, other or unknown
  misc_feature (153)..(153): "n" may be a, t, c, g, other or unknown
  misc_feature (168)..(168): "n" may be a, t, c, g, other or unknown
  misc_feature (170)..(170): "n" may be a, t, c, g, other or unknown
  misc_feature (259)..(259): "n" may be a, t, c, g, other or unknown
  misc_feature (270)..(270): "n" may be a, t, c, g, other or unknown
  misc_feature (281)..(281): "n" may be a, t, c, g, other or unknown
  misc_feature (301)..(301): "n" may be a, t, c, g, other or unknown
  misc_feature (327)..(327): "n" may be a, t, c, g, other or unknown
gcactctcttcctgtacagtatttattgttcctggcactttatttaaaaatntttgaccctcactgantgtctgtgtgtctgtcctgcatccctgggttggtgtcttgaaatgtggagggaatgcnaagaactgaggtcaggccaacccgttnaaaaaccttttccanantctgaaaacaaaggttaaaacctctccctaggtctgaaggcggaaacaggccggcttccaaaaaactattccaagggcggagggcggangcagggacccnctctgggtctnaatgctggggcaaaactgangacaaccccccctacccttaaaaacntctga

SEQ ID NO: 7705 - DNA, 426 bp, Homo sapiens
  misc_feature (113)..(113): "n" may be a, t, c, g, other or unknown
  misc_feature (247)..(247): "n" may be a, t, c, g, other or unknown
  misc_feature (261)..(261): "n" may be a, t, c, g, other or unknown
  misc_feature (263)..(263): "n" may be a, t, c, g, other or unknown
  misc_feature (292)..(292): "n" may be a, t, c, g, other or unknown
  misc_feature (361)..(361): "n" may be a, t, c, g, other or unknown
  misc_feature (394)..(394): "n" may be a, t, c, g, other or unknown
  misc_feature (397)..(397): "n" may be a, t, c, g, other or unknown
  misc_feature (402)..(402): "n" may be a, t, c, g, other or unknown
  misc_feature (410)..(410): "n" may be a, t, c, g, other or unknown
caaatgcaaatagtctttattatgagaaagcagtgttatctaggaaagtcacatgctggtttctttctaataaaatgacaaagcaggtttcttaaataatttacaaagggcanaaattgctcttgaacagggctacccctcctggcacatccacagtgctctgcactgagcatataaataggtacccgtgagcccagggtcgtaagcctggaaatatctcctatgccttcctccgagtccctggtanggaaaggagggatnanagtggggccctcaaaagccttggcaccanaaacacagtgggtgagtgactctgcggatgactccccaaaaaccaggcacccgggtacagagctaaganctctcaaatatctgatgctagcacttcatgttntanatgangcaaatanaagctcaaggtcaagt

SEQ ID NO: 7706 - DNA, 509 bp, Homo sapiens
  misc_feature (434)..(434): "n" may be a, t, c, g, other or unknown
  misc_feature (478)..(478): "n" may be a, t, c, g, other or unknown
  misc_feature (494)..(494): "n" may be a, t, c, g, other or unknown
  misc_feature (504)..(504): "n" may be a, t, c, g, other or unknown
  misc_feature (506)..(506): "n" may be a, t, c, g, other or unknown
ctagtttgtgtagtaattttactgcataaggaaattacagagattgcataaatcattaggtcaacagcatacagagaagaacaaaacaaaacattgtttgggatcaaataaaaaacagcaggaacaactcaattcttaaaaataccacgaattccccgaatgtggctccatttgatagaaaattttgcattttctggataatgtctgtagttacattaagcaaaatggaaaacggccttcagataaacacactaaaaagcagcttacacagatgtgttgccctcttcaccttggatgttacaaaaataaagatgtgaggctgcctgctcttgcctaaagcatggcttgaactttcaattgatagtaaccgcttatgaaaaatattacattacataatctcctgtgtattgaaattgcacaagtcagagcatccnaaaactgcaagagtcaatttcttcctatggggaaaagcatatanatattctatgtttaanctccattccncnttc

SEQ ID NO: 7707 - DNA, 594 bp, Homo sapiens
  misc_feature (462)..(462): "n" may be a, t, c, g, other or unknown
  misc_feature (529)..(529): "n" may be a, t, c, g, other or unknown
  misc_feature (536)..(536): "n" may be a, t, c, g, other or unknown
  misc_feature (541)..(541): "n" may be a, t, c, g, other or unknown
  misc_feature (549)..(549): "n" may be a, t, c, g, other or unknown
  misc_feature (566)..(566): "n" may be a, t, c, g, other or unknown
gaagattaatcatttatttgggatctagatccatatatctgaaaactgaagtataaagtttctcatttccatttaccttgtcaacaaacatatcccaaacatttcagcatctgtaaaaggtgatctatttagcatctgtaataagtgatttatagttatatatgctaaataaaggttgacacagctggatcctaaaagctcagattttataaatttaaaatagattaagtatttatgccaaaaaacaagaactggatctaggattttattttaaattatggaagtctctggggaaaaaaaatagcaatggaatgacaatagatgtcagatatttctctgagaagtatatagtttctcaattttcgctaggtagtgcatcccaactgaattaaaactaaagcatatttacagtgcattttttctcactaaaatttcccaattctaaaatggtctggccaggcngcattggctcagcctgttatcccaccacttggggaaggccaaggcaggcggatcccaaggtcagganattgaanacaanccgggctnacatggtgaaaaccccnttcctcctccaaaatttaaaaaaaattt

SEQ ID NO: 7708 - DNA, 611 bp, Homo sapiens
  misc_feature (152)..(152): "n" may be a, t, c, g, other or unknown
  misc_feature (167)..(167): "n" may be a, t, c, g, other or unknown
  misc_feature (197)..(197): "n" may be a, t, c, g, other or unknown
  misc_feature (199)..(199): "n" may be a, t, c, g, other or unknown
  misc_feature (513)..(513): "n" may be a, t, c, g, other or unknown
  misc_feature (517)..(517): "n" may be a, t, c, g, other or unknown
  misc_feature (588)..(588): "n" may be a, t, c, g, other or unknown
  misc_feature (597)..(597): "n" may be a, t, c, g, other or unknown
  misc_feature (605)..(605): "n" may be a, t, c, g, other or unknown
aacattactttcttagattttatttttttcaaaacattatggcttaaggaaaatagtttacttacttggtgacttgcctatgtagtagctattaaaaaaacagggtttttgtgagtttacaccttgtttgtctacttgatgggactgagtancttccttcaactganatagaatttgtctaccactgcgctgggaanangcattcacttcaaatatcttaaatccaagctcctgggcacaagcatacactgcagcagtttttcccactcctgttggccctgttataagggacagtattgcaaagacgactctcttcttcatcatctgaactgcctttaaagtctatgccacccgagaaatcttcatgtttctcatctctttttcccttcagattctgcctttcttccaattcagctcttcttttccagtctttcaaccaactatgtaacttttttatagctaactcatttcctataaattcactggcaagtctgaagttgaatacttttctgntccnaagcatgtcttcagttcccaaaatcttggaaaaactaccttatcccaaaaaaattgtttccttttgctaanttctccgantcccaatnggtctc

SEQ ID NO: 7709 - DNA, 297 bp, Homo sapiens
  misc_feature (253)..(253): "n" may be a, t, c, g, other or unknown
  misc_feature (280)..(280): "n" may be a, t, c, g, other or unknown
  misc_feature (285)..(285): "n" may be a, t, c, g, other or unknown
  misc_feature (287)..(287): "n" may be a, t, c, g, other or unknown
  misc_feature (290)..(290): "n" may be a, t, c, g, other or unknown
acagtctctgattttaatgagtcaatctcaaggcaaagctataaccttttccatgtgaacttaaaacggaaatcctacgtgtttggctcagctaccatagacatgtcttgccccagagttccagtgtatttttcacctttagtttcttggctcctctccgcctctacaccagcctcatatccacacgggatgctctctgctgagtattgtcttgagttagttctccctctcatgttctggctgatgctactcntggtcatagtatcacctgacggggaangaatntnctntgaaagt

SEQ ID NO: 7710 - DNA, 475 bp, Homo sapiens
  misc_feature (71)..(71): "n" may be a, t, c, g, other or unknown
  misc_feature (297)..(297): "n" may be a, t, c, g, other or unknown
  misc_feature (326)..(326): "n" may be a, t, c, g, other or unknown
  misc_feature (382)..(382): "n" may be a, t, c, g, other or unknown
  misc_feature (448)..(448): "n" may be a, t, c, g, other or unknown
  misc_feature (452)..(452): "n" may be a, t, c, g, other or unknown
  misc_feature (466)..(466): "n" may be a, t, c, g, other or unknown
  misc_feature (470)..(470): "n" may be a, t, c, g, other or unknown
gaaggtgattagttttcatttaataaaattaataacacattacatgtagatgaagatataacaaaaccatncgaaagcttgtcagagatattcaactagaaaactaaaacagtagccactagaaaaaagacatagtggaaaaatttttgaacggatatgctttttgttgaataattacagtaattactaccaatatattcagaccaacaaagattagaaagaacatgcaaaatgctgagaaaatttctcctacaattaaaacaaatgtgtttttatgagagagaaaaaaataagtcnagctcctaaaatgaaaattacaaaacatngggattaacaatttattaaaaattaccccttgatttttttgaggccaaaaaaagtngtttttttaaaacaagggcatgaaaaagacttcagattaagactcatactctgttctaaatgaaangtantaaaactacttctngtanaaaat

SEQ ID NO: 7711 - DNA, 303 bp, Homo sapiens
  misc_feature (15)..(15): "n" may be a, t, c, g, other or unknown
  misc_feature (52)..(52): "n" may be a, t, c, g, other or unknown
  misc_feature (231)..(231): "n" may be a, t, c, g, other or unknown
  misc_feature (243)..(243): "n" may be a, t, c, g, other or unknown
  misc_feature (252)..(252): "n" may be a, t, c, g, other or unknown
  misc_feature (260)..(260): "n" may be a, t, c, g, other or unknown
  misc_feature (277)..(277): "n" may be a, t, c, g, other or unknown
cactggaaagcttanaatgaagctgctcttgcctgttcctcctgagaaccanagcagcagtggtccagggcacaaagcataatgatctctcatgaggattcctatctgaacacatcagaagtcctatgaacataaataggtctgttttagaatataaatggtagtgacttcctgcgctcctgaggcggggcaaaataatccataaacacataatccttctgggcaataatntttctggactcnccagcaaanggctctangaacaaaagtgggggtnaaatccgggaaaaaaaaagttctaaa

SEQ ID NO: 7712 - DNA, 477 bp, Homo sapiens
  misc_feature (138)..(138): "n" may be a, t, c, g, other or unknown
  misc_feature (216)..(216): "n" may be a, t, c, g, other or unknown
  misc_feature (305)..(305): "n" may be a, t, c, g, other or unknown
  misc_feature (393)..(393): "n" may be a, t, c, g, other or unknown
  misc_feature (408)..(408): "n" may be a, t, c, g, other or unknown
  misc_feature (443)..(443): "n" may be a, t, c, g, other or unknown
  misc_feature (450)..(450): "n" may be a, t, c, g, other or unknown
  misc_feature (469)..(469): "n" may be a, t, c, g, other or unknown
acagtgttagagaattttgttttattgttttggtggcatgggcataattggagaaaccattggggtattcactagtaacctacattgttagtttccttggttccagcaggtaatacactgggttccgtcaccctgganatggctacggggaggctgagtgacttcccaaagtaataaagagtttggaatcagaattccaggtctgactcccagcanactgttctatttccttacacacctgcactttcatcaatcttctccagctccaatttcttgtgccccttcaacagcatctggcacagganaatcataggctctcggaactcggcctgacagatggcgcagatgtcaccagcttctgtgcactgctgcccggtggctcggactccatanttctgaaaggtacanagaagcttcagggctttcctaactccgcccacacntccacanatgtctaaaggacttgcanaagctgtt

SEQ ID NO: 7713 - DNA, 618 bp, Homo sapiens
  misc_feature (367)..(367): "n" may be a, t, c, g, other or unknown
  misc_feature (522)..(522): "n" may be a, t, c, g, other or unknown
  misc_feature (543)..(543): "n" may be a, t, c, g, other or unknown
  misc_feature (568)..(568): "n" may be a, t, c, g, other or unknown
  misc_feature (603)..(603): "n" may be a, t, c, g, other or unknown
  misc_feature (608)..(608): "n" may be a, t, c, g, other or unknown
ataattaggttttttaattgcctgaatataactgaccatttccacatgcccttggaccttcgacatgcatcgcgtcatgagattcaacgtatttggagctgtgacttttctgcagcatgcagtatcataaatattggagaactagagactgaattatcgcttgtgtaaatcttatcatgttccatagtaatggtccttgaataatagcctcagcatacataatccatctgtatggtttcatccaagatgtatgttttgatatctagtcatttggcaggcctcaagagacctgattcacatacattgctatgatttctctttagtatggaatctctgatgttgattaatgctagaacttagcatgaanagtttgccatactcagtttgtaagaactctctcatgaatgaattctctcatgctgtgcaaggtgtgaattattactaaagatcttaccacacacatttcatctgtacggttctctccagtatggattctgtgatgattgccaggtttgaatttcnaatgaaatccttacacattcntgaaatctgttccggttctccccantatgaatccctcctgtttttttaaggttaacttgngggtngaaaaacttg

SEQ ID NO: 7714 - DNA, 513 bp, Homo sapiens
  misc_feature (127)..(127): "n" may be a, t, c, g, other or unknown
  misc_feature (169)..(169): "n" may be a, t, c, g, other or unknown
  misc_feature (202)..(202): "n" may be a, t, c, g, other or unknown
  misc_feature (223)..(223): "n" may be a, t, c, g, other or unknown
  misc_feature (245)..(245): "n" may be a, t, c, g, other or unknown
  misc_feature (342)..(342): "n" may be a, t, c, g, other or unknown
  misc_feature (354)..(354): "n" may be a, t, c, g, other or unknown
  misc_feature (361)..(361): "n" may be a, t, c, g, other or unknown
  misc_feature (428)..(428): "n" may be a, t, c, g, other or unknown
  misc_feature (433)..(433): "n" may be a, t, c, g, other or unknown
  misc_feature (451)..(451): "n" may be a, t, c, g, other or unknown
  misc_feature (454)..(454): "n" may be a, t, c, g, other or unknown
  misc_feature (502)..(502): "n" may be a, t, c, g, other or unknown
gtaacaaacagtaccaatttattttggccgtgggtttttgctttttttccagttgatgactttgtgaacattcccaggtattggagcctctgtggccttaaatgtggctcagtggagggagacccancatagccaggccagtatggagcacctcacgcacagctctcanaagctgcaggcggacgaacatttgaccaaagangtgtggtcgaggctcccccangatgtgtacccggttgtagtangaactgaaatccatgctgagctgtaccaggaacttgcatatctagagacagagactgagtcactggcccatctctttgctcttgtgccccaggccanaataaagaatanagtgtanaatgtcctggttgtctatgcctcaccatctctgtgcgtacagcaatgtggaccccggggctgtgcantccancactgctgtccggctcancanatccggaaaggggaagatactgttgaaaaacaacaccactcccccctnttggggaaaaa

SEQ ID NO: 7715 - DNA, 223 bp, Homo sapiens
  misc_feature (164)..(164): "n" may be a, t, c, g, other or unknown
  misc_feature (178)..(178): "n" may be a, t, c, g, other or unknown
  misc_feature (191)..(191): "n" may be a, t, c, g, other or unknown
ggcaggaacagtggtttatcaaccaggcaggcctccccagcccggccactgctccccaaggggctcgggctgtgtgggctggccttggcaaaaggtggacaatcctctaggtccaaggacatgggggtcacaaaagtgggggccttgggcccacacattcaaanaaaattcccaaaantttccagtggctntcccaagcaggtatcaggttcggcccacacct

SEQ ID NO: 7716 - DNA, 577 bp, Homo sapiens
  misc_feature (81)..(81): "n" may be a, t, c, g, other or unknown
  misc_feature (139)..(139): "n" may be a, t, c, g, other or unknown
  misc_feature (563)..(563): "n" may be a, t, c, g, other or unknown
gcagatgggacatatttaataaccaaggttctaagcaaagttctgaaaagaaaactttttgtagtaaatatgctagcatanacaagttccttgtgttttccaacaggtttgcttcaaaatcaatccttacagcttcaanaacaggagaaactcttaacaaagaaaggtcagcaaatttattaccacaaattctaagatattgctcttctcttacctgcctagaggcagcgggatggactacatgacctcctggagtcccagccagttctgggagtctgttaagtccgggatgtgtgggagctttttaaggagtgatcattggctctgaggacacttcaactagttggccttctatcttgaggtatataaactgtgaaaaagggtttctattctctctgaaagcacatgtctgtgttgaacatttcagtaaatttattttgaactcaggatttcatgtcaatttttacacacttgattttccaaatcacatccaactccccaccccaaaccacatacatccaaatcaactcctgttaccctaaaaaatcactgtccatgttccngaaaatccctgttt

SEQ ID NO: 7717 - DNA, 515 bp, Homo sapiens
  misc_feature (121)..(121): "n" may be a, t, c, g, other or unknown
  misc_feature (475)..(475): "n" may be a, t, c, g, other or unknown
  misc_feature (494)..(494): "n" may be a, t, c, g, other or unknown
  misc_feature (501)..(501): "n" may be a, t, c, g, other or unknown
  misc_feature (507)..(507): "n" may be a, t, c, g, other or unknown
  misc_feature (514)..(514): "n" may be a, t, c, g, other or unknown
atgaaatttcattttattctgataaagactaatatatgcttgataacctagtgataatccataagtttggtatttcacaacattttttagaaagcacataagattaacattcaaataaggnattatagaaagttttataaagaatgaagtgtttcctatatttcttttaaaaaaccttggttcatcttgaaagatcgatgaattttttaaatatcagaagaaaagggaaataaaattttccccccaaaacacataagaaccacttactggcacttgtattttaagtacctgggaaaaaaacggaacagatttttaaaggcaataacgacttgtaagacggcttgtttcatttgatttggcacgaagtaaagtaagagtaaatatgccatgggaagacataatcaagtttttcctccatctctcatatttccccacttctaccagaccacacagtacatcagcaaccatcctttanattccaatttttaaatggntgctccnacaacncaattana

SEQ ID NO: 7718 - DNA, 521 bp, Homo sapiens
  misc_feature (345)..(345): "n" may be a, t, c, g, other or unknown
  misc_feature (437)..(437): "n" may be a, t, c, g, other or unknown
  misc_feature (475)..(475): "n" may be a, t, c, g, other or unknown
  misc_feature (479)..(479): "n" may be a, t, c, g, other or unknown
  misc_feature (508)..(508): "n" may be a, t, c, g, other or unknown
  misc_feature (516)..(516): "n" may be a, t, c, g, other or unknown
aactgggtgaagttagacttttataagcaattattttctgtttaacagtattcacattaaattagttacaacattttagaatgttttaacacgatttacgcaatcagtcaagtggctacatttactagtttattgaatatgaggtttatccatttagcaatgtaaggaaaactttagttctgtttctcagttatcaggagtgaacataaaactattctaaaccacaattagtttaccagcatagtacaaaataaaatgacagcgaaataaagcaattaaagtaacttatttttactcataaggttaccataataataaaaattcctttaattttcaaagcactcntcatgaaaagtagttggggtaaaattactatttgttcaaagtagaataaaagggaaggatgctctaattaaacattttattaaaattaaacnctctatttgaaaggtagaaatttaatctggaaacctanatanatttccaattccgataaaatgggtgacanccataacnggtat

SEQ ID NO: 7719 - DNA, 260 bp, Homo sapiens
  misc_feature (186)..(186): "n" may be a, t, c, g, other or unknown
  misc_feature (189)..(189): "n" may be a, t, c, g, other or unknown
  misc_feature (255)..(255): "n" may be a, t, c, g, other or unknown
acaaatcaaaaggctttattccttatataaacccacacttaaaaaaaataaatagttaataaattataggcaaaccagttggtctcagccacgcctcccactgaggtccagggcagccgctgcagcagcagaagagcgggaagtgtaccacagcttggctcaagggcgtggtctggactggggacnaanggacagaagaagaagcaaggtctgggtgaaggcaaggatgggggctaaaagtgggttcctgaagcntgcca

SEQ ID NO: 7720 - DNA, 527 bp, Homo sapiens
  misc_feature (22)..(22): "n" may be a, t, c, g, other or unknown
  misc_feature (165)..(165): "n" may be a, t, c, g, other or unknown
  misc_feature (183)..(183): "n" may be a, t, c, g, other or unknown
  misc_feature (305)..(305): "n" may be a, t, c, g, other or unknown
  misc_feature (323)..(323): "n" may be a, t, c, g, other or unknown
  misc_feature (368)..(368): "n" may be a, t, c, g, other or unknown
  misc_feature (398)..(398): "n" may be a, t, c, g, other or unknown
  misc_feature (420)..(420): "n" may be a, t, c, g, other or unknown
  misc_feature (449)..(449): "n" may be a, t, c, g, other or unknown
  misc_feature (492)..(492): "n" may be a, t, c, g, other or unknown
  misc_feature (495)..(495): "n" may be a, t, c, g, other or unknown
  misc_feature (517)..(517): "n" may be a, t, c, g, other or unknown
aaggaaaagctacaaacctcanggttgttttatttaaaccaaataatctgagcaagacatatatacattaaaaacaaatgaacacattaaaatttcactattttacaatctaaattctagcaacatatacaaatactgagtgactacagtacatgccgaggtaanataagtacattctggganaatatcactgacgctcaaaccatttttatttccaatatgtatttcaatacatgtttgtttccacttttcccagtgccacacacacacacacaaaaacaaaacaaaacaaaaaaaaacagtcncaagttggattacattanaattggtgccacagttgactttaaaagcattttaataaccacccnactcttaaattttgcagtttagggacttcnagttcagaaccaaaaagcaganaacgttcatgtgacatgatgtttctatanacctcttgctctctaaggtgacaatgcaaaaccagggggaaanggntttaaactttgtccctccacanctttgttggc

SEQ ID NO: 7721 - DNA, 500 bp, Homo sapiens
  misc_feature (199)..(199): "n" may be a, t, c, g, other or unknown
  misc_feature (254)..(254): "n" may be a, t, c, g, other or unknown
  misc_feature (297)..(297): "n" may be a, t, c, g, other or unknown
  misc_feature (361)..(361): "n" may be a, t, c, g, other or unknown
  misc_feature (428)..(428): "n" may be a, t, c, g, other or unknown
  misc_feature (467)..(467): "n" may be a, t, c, g, other or unknown
  misc_feature (487)..(487): "n" may be a, t, c, g, other or unknown
  misc_feature (489)..(489): "n" may be a, t, c, g, other or unknown
  misc_feature (498)..(498): "n" may be a, t, c, g, other or unknown
aaaagtttaagtcagcattttataaaaacgagaaacaaaataattgctttcacaatgtagtacttgaaactaaagttctccagctatcaacagatgtgactccagcatcaagggcctagcaggaaaattctgaatggtttacaacagtgcacataaattgcaggtggctggggccgtgtgtctatttgatgcttcccanaatgtgtgctgctagtcaccatttccaccattcacatatttaacatttttattanacttttatttagcctcatcataagaatataagggagatcatanatttgatgtatgaaatttttaaattcacactaaaatacattacgattaaaatgaattatcttcnaccacccgttttgctatcttttgctgagtaatctgtgccagtccttgtgaaaaatctttattttaanaaaaaaatttagtttacaaaaaaatttaacaagtttccncttaacaaaattcccccggnanggaatcccngt

SEQ ID NO: 7722 - DNA, 474 bp, Homo sapiens
  misc_feature (6)..(6): "n" may be a, t, c, g, other or unknown
  misc_feature (104)..(104): "n" may be a, t, c, g, other or unknown
  misc_feature (118)..(118): "n" may be a, t, c, g, other or unknown
  misc_feature (172)..(172): "n" may be a, t, c, g, other or unknown
  misc_feature (199)..(199): "n" may be a, t, c, g, other or unknown
  misc_feature (282)..(282): "n" may be a, t, c, g, other or unknown
  misc_feature (308)..(308): "n" may be a, t, c, g, other or unknown
  misc_feature (378)..(378): "n" may be a, t, c, g, other or unknown
  misc_feature (386)..(386): "n" may be a, t, c, g, other or unknown
  misc_feature (397)..(397): "n" may be a, t, c, g, other or unknown
  misc_feature (453)..(453): "n" may be a, t, c, g, other or unknown
  misc_feature (455)..(455): "n" may be a, t, c, g, other or unknown
cccaanaaaatcattttctagtctgctcccttcttcatctgaggtttgtccttctaactccttgaaagtatcttcacaaacatctccagtctctgctgccccangaaccaccccaaanagtccccctgatgtcctgttagatgactctgatcctttaaaaaattcctgcttnggagtcaactctgaacccttcatcatnttctcacccaaggaggccatgctatggtgattttctggcatcatgttccactgcagggctctctgactgagtgtgagactttnccatttcttctgagtgtagtctacanataggtcctcatatgccacagtatccgaaatcccactggggaggtggtgtgtccctggggtcataagganggctccangtgggctccangggctgagccccactgaaaggggttaggttggaagaaatccctttgttgtacccananctgttgtctccccgaaatg

SEQ ID NO: 7723 - DNA, 526 bp, Homo sapiens
  misc_feature (105)..(105): "n" may be a, t, c, g, other or unknown
  misc_feature (172)..(172): "n" may be a, t, c, g, other or unknown
  misc_feature (368)..(368): "n" may be a, t, c, g, other or unknown
  misc_feature (392)..(392): "n" may be a, t, c, g, other or unknown
  misc_feature (468)..(468): "n" may be a, t, c, g, other or unknown
  misc_feature (484)..(484): "n" may be a, t, c, g, other or unknown
  misc_feature (492)..(492): "n" may be a, t, c, g, other or unknown
  misc_feature (495)..(495): "n" may be a, t, c, g, other or unknown
  misc_feature (524)..(524): "n" may be a, t, c, g, other or unknown
attaaccatgttctggtatcagaatggtgttccttctccatcagaggctgggaaacgtattataattagtttttctcccacataccttcaccaagagcagtgaanaataactgaaggctggaccatgcatccttaaaagtattgcatgagcatctccacctcagtatggaanagggatggacaaccccctattcatacctctgagttcctgatggcattagtcatataggtaagtcatctaataatctttcttaagactctgcaatggaaaaactggttgtataaagtcttctctgccctctccatttgtatcagcaatggggaatgctgcaaaacatcatcttgctcatgtgatggtgatggcaaanatatcacaaggagttggtaataanatttaattttccagtagcctgcatgaattgtccccacataaaactgtacagttagtgactgaattgtttacttaanttcccagttttttacntttgtggngantgaaatttaaaggttaatttctttaacantt

SEQ ID NO: 7724 - DNA, 491 bp, Homo sapiens
  misc_feature (269)..(269): "n" may be a, t, c, g, other or unknown
  misc_feature (301)..(301): "n" may be a, t, c, g, other or unknown
  misc_feature (333)..(334): "n" may be a, t, c, g, other or unknown
  misc_feature (410)..(410): "n" may be a, t, c, g, other or unknown
  misc_feature (427)..(427): "n" may be a, t, c, g, other or unknown
  misc_feature (440)..(440): "n" may be a, t, c, g, other or unknown
  misc_feature (462)..(462): "n" may be a, t, c, g, other or unknown
  misc_feature (471)..(471): "n" may be a, t, c, g, other or unknown
ggtctgatggcacatatttattgttctgtggtctaatcacagtgtttctaaatgtaaaaagtgcatatgttggtgtagctagtcccgcgacattgagctcctctgcatgaagacactgggctcctgcatccagctgtttttattgcaaactagctcctttctcccacactgggaactttagtccacgaggctgtcaccaccctggtagcactgggccaggctttgtagctcctgcagcagctctgctacgtcatcgtgctccactccancatccatgaaactgggccagcgccgcaagtcnaatttggtgaggtctctggccaaagcttccannggtctggtgcaaggacaaaaaagaacacatgccccaaacactgggatgctctccactgctgctcccttgggggaancaccagaaacatacccngtggactgcaacnttgaaaaaaagttgggggttangaagaaccnccctgccagggaattctcca

SEQ ID NO: 7725 - DNA, 552 bp, Homo sapiens
  misc_feature (350)..(350): "n" may be a, t, c, g, other or unknown
  misc_feature (482)..(482): "n" may be a, t, c, g, other or unknown
  misc_feature (485)..(485): "n" may be a, t, c, g, other or unknown
  misc_feature (512)..(512): "n" may be a, t, c, g, other or unknown
  misc_feature (524)..(524): "n" may be a, t, c, g, other or unknown
  misc_feature (551)..(551): "n" may be a, t, c, g, other or unknown
ggaaaaattactttatgaagccttaagcactaagaataattaattaaactgtaatccaggattagatacaatttaataatagttcaattccaaaataaaagttattgtaggtaagaccatgaaatttcctaacacttgattttaatacattgcgctaattttctaaaacaactcagaggaacccatatttacagtaggcagaatatttatgaaaaaaatctggcatcaggtatatttatatatgtatgtgtgtgtatacgtatgtgtgtgtatatatatatgtgtgtgtgtgtgtatcccgagattatatgaactaagaaacaagttgtgtatcttaacagcagtactanagcgcagagtttcagacttgggatttataaatgctttcaacgtgtggtgtttgggaaaaggagaagactccatctgattttccaaaacctgaaatttttcctcaggactgaaatccaaatccgtaactgccncanaagggaaaaagggaaacctttcccccnttattggtcccnccgcggtccgaaaagtccagtttcccng

SEQ ID NO: 7726 - DNA, 599 bp, Homo sapiens
  misc_feature (369)..(369): "n" may be a, t, c, g, other or unknown
  misc_feature (382)..(382): "n" may be a, t, c, g, other or unknown
  misc_feature (476)..(476): "n" may be a, t, c, g, other or unknown
  misc_feature (499)..(499): "n" may be a, t, c, g, other or unknown
  misc_feature (519)..(519): "n" may be a, t, c, g, other or unknown
  misc_feature (540)..(540): "n" may be a, t, c, g, other or unknown
  misc_feature (580)..(580): "n" may be a, t, c, g, other or unknown
  misc_feature (591)..(591): "n" may be a, t, c, g, other or unknown
  misc_feature (599)..(599): "n" may be a, t, c, g, other or unknown
gctcttgtttacattttattatcattattagtaataaaccaataaaaactgaataacaaaggaaaaagctcaagataaataatttcttccttgtgaattcaaacacatgcacacacacacatcctcctctgtgtgtgttacttcctcctcacattctgtcctacggtacaaatagttacacaaaagtctacaaaacgcgagtagcagaccccagctgtgttaagctcaggctgattctcagtctagatcaccagcttctccacgctaagtgtacttgtggtttcatcctcttcatttgacccaaaatatcctgggaggtccagcatcctctgctcagcctcagtgaggccaaacgacgtattgtcatanaaagcaaactcanggtgagtggggaagctttgacacttgtcttttctacactgagaaagggctcagaaaactgaccctctggtagttatctttgggggatgtggganaaaactacttccttgaaaatacnctgttaatgggggggaaggnccccaagaactctgttggggnccgttctctcattcccgccactaatccctgcctgggggantccccaaggtntggtttcn

SEQ ID NO: 7727 - DNA, 497 bp, Homo sapiens
  misc_feature (176)..(176): "n" may be a, t, c, g, other or unknown
  misc_feature (223)..(223): "n" may be a, t, c, g, other or unknown
  misc_feature (227)..(227): "n" may be a, t, c, g, other or unknown
  misc_feature (264)..(264): "n" may be a, t, c, g, other or unknown
  misc_feature (267)..(267): "n" may be a, t, c, g, other or unknown
  misc_feature (289)..(289): "n" may be a, t, c, g, other or unknown
  misc_feature (403)..(403): "n" may be a, t, c, g, other or unknown
  misc_feature (436)..(436): "n" may be a, t, c, g, other or unknown
  misc_feature (469)..(469): "n" may be a, t, c, g, other or unknown
  misc_feature (472)..(472): "n" may be a, t, c, g, other or unknown
  misc_feature (483)..(483): "n" may be a, t, c, g, other or unknown
gtagaggcaaggttttgccatattgcccaggttggtctcaaactcctaggctcaagtgatcctcctgcttcagcctcccaaagtgcggggattacaggtgtgagccattgtgcctggtcttaaaatgttaaacatggagttttaacccaacaattctactcttttatatcccaganagctgaaaacacatatccactctaaagctcatgtatgaatgtatgtngcancattattcatagtagccaaaaagtggaaataaccccnatntccatcagttgatgaaggtggnatatccataaaatggaatgttatttggccataatacatgctatatatgaagtacttaacgtggataaaccttgaaaacattaagtgaaagaagctcatcacaaaacttcacgtnatatgattcatcccatttatagaaaatgcccanaacagacaacctataaaaacaaaaaatgggtcnttngccaaaataangggggaaggtggtt

SEQ ID NO: 7728 - DNA, 574 bp, Homo sapiens
  misc_feature (86)..(86): "n" may be a, t, c, g, other or unknown
  misc_feature (289)..(289): "n" may be a, t, c, g, other or unknown
  misc_feature (291)..(291): "n" may be a, t, c, g, other or unknown
  misc_feature (361)..(361): "n" may be a, t, c, g, other or unknown
  misc_feature (368)..(368): "n" may be a, t, c, g, other or unknown
  misc_feature (415)..(415): "n" may be a, t, c, g, other or unknown
  misc_feature (456)..(456): "n" may be a, t, c, g, other or unknown
  misc_feature (461)..(461): "n" may be a, t, c, g, other or unknown
  misc_feature (482)..(482): "n" may be a, t, c, g, other or unknown
  misc_feature (540)..(540): "n" may be a, t, c, g, other or unknown
  misc_feature (557)..(557): "n" may be a, t, c, g, other or unknown
  misc_feature (563)..(563): "n" may be a, t, c, g, other or unknown
  misc_feature (569)..(569): "n" may be a, t, c, g, other or unknown
aggaagatttcttctttattcctatttgatttaaaagaaaaagatttgccaagggatgggtagggttaaattaaaaacattttaanaaacatttctttatatggagcatacttactgtttttgctttgagtgcattctgatgaaatatagattccaaattccccttggatctcacccttctgtctagtgctttgccctctatttggggcagtaattctatacatatcctgtaaatgtctgtcctgatgatcaggatgcccaagctctgaatccaactgctgccaccaananaacggctcctttttggagccattacacacagatcatcactcaaatcagtagtttctctttagaaaactancaatttnctggtagtctgtcaattaagaaaagaaaatgaaattcagttacttantaagggaaaactggataaacaggaggctggtccaaacgganatttntatttagacattccccttttncctggcctcatcctttccacagctatttcccttcctttaacacaccaagttctttttnttttccaatacaaaacntaaatncctganggggg

SEQ ID NO: 7729 - DNA, 542 bp, Homo sapiens
  misc_feature (193)..(193): "n" may be a, t, c, g, other or unknown
  misc_feature (411)..(411): "n" may be a, t, c, g, other or unknown
  misc_feature (449)..(449): "n" may be a, t, c, g, other or unknown
  misc_feature (499)..(499): "n" may be a, t, c, g, other or unknown
  misc_feature (511)..(511): "n" may be a, t, c, g, other or unknown
  misc_feature (524)..(524): "n" may be a, t, c, g, other or unknown
  misc_feature (531)..(531): "n" may be a, t, c, g, other or unknown
ggaatttttaatttatttatcatgtttgtaagttacagacatttatgtttttcagcaacagtttataatagttacatctcatacttcaactattagaacagagagaacattaaagtacaaagaaagacttcaaaaatgaggttactgtgatgtatcataaaaggagttaaaattcaaaatatcaaagacctcncctatcggactaaacataaatcttaaaacctcctatggtcctctgagcctaaaattacaaaacttagcaactgcttaaaccaaggaattaacggttctgtgttttcaaggtaagaaaacaaaaaatgctttggtaaactacctttaatactagtttaaatgtttctgccttgtttgtatctctcttgaaagactgtatataagtacaggcacagcatntatttgagaaaacatctcacaaatttcatttactatangtttctcaataatctttacatttaatcaatgaaaaaaattgatccatccncttgaattttangttaaaaaaattnaaaagtnttccaagggac

SEQ ID NO: 7730 - DNA, 523 bp, Homo sapiens
  misc_feature (1)..(523): "n" may be a, t, c, g, other or unknown
nnnnnnnnnnnnnnnnnnnnnnnnnnnnnnnnnnnnnnnnnnnnnnnnnnnnnnnnnnnnnnnnnnnnnnnnnnnnnnnnnnnnnnnnnnnnnnnnnnnnnnnnnnnnnnnnnnnnnnnnnnnnnnnnnnnnnnnnnnnnnnnnnnnnnnnnnnnnnnnnnnnnnnnnnnnnnnnnnnnnnnnnnnnnnnnnnnnnnnnnnnnnnnnnnnnnnnnnnnnnnnnnnnnnnnnnnnnnnnnnnnnnnnnnnnnnnnnnnnnnnnnnnnnnnnnnnnnnnnnnnnnnnnnnnnnnnnnnnnnnnnnnnnnnnnnnnnnnnnnnnnnnnnnnnnnnnnnnnnnnnnnnnnnnnnnnnnnnnnnnnnnnnnnnnnnnnnnnnnnnnnnnnnnnnnnnnnnnnnnnnnnnnnnnnnnnnnnnnnnnnnnnnnnnnnnnnnnnnnnnnnnnnnnnnnnnnnnnnnnnnnnnnnnnnnnnnnnnnnnnnnnnnnnnnnnnnnnnnnnnnnnnnnnnnnnnnnnnnnnnnnn

SEQ ID NO: 7731 - DNA, 317 bp, Homo sapiens
  misc_feature (100)..(100): "n" may be a, t, c, g, other or unknown
  misc_feature (156)..(156): "n" may be a, t, c, g, other or unknown
  misc_feature (234)..(234): "n" may be a, t, c, g, other or unknown
  misc_feature (244)..(244): "n" may be a, t, c, g, other or unknown
  misc_feature (257)..(257): "n" may be a, t, c, g, other or unknown
  misc_feature (289)..(289): "n" may be a, t, c, g, other or unknown
  misc_feature (302)..(302): "n" may be a, t, c, g, other or unknown
ctgttgccaaaaatacctgtccttacaaaaccacaattataaaggtaaaagtgaattattagcacccagtgcagaggcatttccaaaccagaaacaccanatcttcaccctggagtggacagaggggaggatgccacctttgataggactctgcanagcccagcctggaactgggaaaattctggctggggaagccacaggcatcagctgaggggtcatgtccggaccccaganaggcccaganagaggctgagaanaggagcaccccgggagtgggggagcaggggancctgtcggggganctaaggaggggctca

SEQ ID NO: 7732 - DNA, 515 bp, Homo sapiens
  misc_feature (54)..(54): "n" may be a, t, c, g, other or unknown
  misc_feature (392)..(393): "n" may be a, t, c, g, other or unknown
  misc_feature (470)..(470): "n" may be a, t, c, g, other or unknown
  misc_feature (473)..(473): "n" may be a, t, c, g, other or unknown
  misc_feature (490)..(490): "n" may be a, t, c, g, other or unknown
  misc_feature (500)..(500): "n" may be a, t, c, g, other or unknown
  misc_feature (504)..(504): "n" may be a, t, c, g, other or unknown
aaatctgtagaattctagcaaattggttaaaagtcaagttcatgggagatgaangctcagtggatgacacatccagcgatgctggtgggattcagacgctttcgcttttcaactcacttagcagcaaaggggatcagatgatttctgttaacgtgtgtataaaggtgaactataattactttgtgtttacttctgtgttttcattactttcacttactcccagatatcactggaaccatgcaaatactgcttattccctaatgtggttttgaaagactgggaggctcagaagcaagtattatgtctgtccgtacatgtcgtttaaaaaattatttttttaagccagtcaaattgagtagtgggcaccaagcccagcctgcttctttactttnnctgttttaatactatatattggattcctaaatgttatatgttcacaaaacttttaaaaaatgaggaaatgtttaaanaanttttgaggatgaatgantaagagcccncccnggtccttgcca

SEQ ID NO: 7733 - DNA, 539 bp, Homo sapiens
  misc_feature (209)..(209): "n" may be a, t, c, g, other or unknown
  misc_feature (307)..(307): "n" may be a, t, c, g, other or unknown
  misc_feature (500)..(500): "n" may be a, t, c, g, other or unknown
  misc_feature (515)..(515): "n" may be a, t, c, g, other or unknown
  misc_feature (517)..(517): "n" may be a, t, c, g, other or unknown
  misc_feature (524)..(524): "n" may be a, t, c, g, other or unknown
  misc_feature (536)..(536): "n" may be a, t, c, g, other or unknown
atcatcctgcccatgtcagtatacactctctttattatgggaatgaaaccaaataataagcaaaatacatcaggaatttcaaattgtactgcaaagaaagtcccagctggtctcttctgggagtgatctaactaacttaagctgaccctgcgactggctgaggataatcccttctgtccactgcaccgtgcaatgccacaggtcatganatggtcagttcctcttgctctgtgtcgtctgaagcaagtcgaggccctacttctggttccgcccttcttccttgggcttagatttgctgggttagtantttgctactattgtcaagactgtactgtccctttaaggtaccacatgccaccatagcttacacagcagtcctttagtactttatccacctcctgtttactgagatcttctccacactcttgagtcaaccgagactggatcatgtttcggcgtacccggtaattttgggaaaaaatttcaagcaaaacctgtcnatgctgatactcatntntccaaantccccaaaaggnaaa

SEQ ID NO: 7734 - DNA, 335 bp, Homo sapiens
  misc_feature (28)..(28): "n" may be a, t, c, g, other or unknown
  misc_feature (251)..(252): "n" may be a, t, c, g, other or unknown
  misc_feature (306)..(306): "n" may be a, t, c, g, other or unknown
  misc_feature (325)..(325): "n" may be a, t, c, g, other or unknown
  misc_feature (329)..(329): "n" may be a, t, c, g, other or unknown
agatgaaagttatttattggtgtgactnttttcctttagtgagcttcctttacacagcatggtgtaaatagcatcagattgaatgaaaagtttgttaaatgcaaccataaataattataataaatatacatcaagtaactttacagcacacattttttagggccaaggtttggatctgtctggacctcaatgtgctctcggagaggcagccacgttagcagcagataccttacagcttgtcatctactcanntgatggccaacaaaagcttctgaactcctcctggggaggtagctgacaattccnttccagggatgaggactanaaanaaccaa

SEQ ID NO: 7735 - DNA, 422 bp, Homo sapiens
  misc_feature (117)..(117): "n" may be a, t, c, g, other or unknown
  misc_feature (169)..(169): "n" may be a, t, c, g, other or unknown
  misc_feature (229)..(229): "n" may be a, t, c, g, other or unknown
  misc_feature (244)..(244): "n" may be a, t, c, g, other or unknown
  misc_feature (287)..(287): "n" may be a, t, c, g, other or unknown
  misc_feature (367)..(367): "n" may be a, t, c, g, other or unknown
  misc_feature (370)..(370): "n" may be a, t, c, g, other or unknown
  misc_feature (373)..(373): "n" may be a, t, c, g, other or unknown
  misc_feature (396)..(396): "n" may be a, t, c, g, other or unknown
  misc_feature (401)..(401): "n" may be a, t, c, g, other or unknown
aacttattaaaaagattttatttagcacttggttctgttggctgggaaattcaggatcaggcagctgtatctggtgggttctcatgactgcctcatgctgcatcaaaacatcgtagnagaaacagaaggggaccgagtttgtgcaaacaaaaagcgcaaaatagaagangcagcattgttttataacaactcactctcttgggaactaaccattcccaggagaacccantctcagtgtcaaganaaagatgttaatccatcttagcaacctaattacctcttaaaanttccatctccaacactattacatttggcaattgaactacaacatgagttttggaggggccaaacaacatgcaaaccatancancangtttaaaggtaaaaagatggganaaaantcccagaaagatttcctggaa

SEQ ID NO: 7736 - DNA, 278 bp, Homo sapiens
  misc_feature (225)..(225): "n" may be a, t, c, g, other or unknown
  misc_feature (262)..(262): "n" may be a, t, c, g, other or unknown
  misc_feature (270)..(270): "n" may be a, t, c, g, other or unknown
  misc_feature (275)..(276): "n" may be a, t, c, g, other or unknown
aagtgatcaatgctggctttatttcttcataagcagtaatttgggtctttttcattcaacacaacgcagcattttcataataaattcacaaaagacaatacaaggaaacacctactgaatagaactctgtcgagcaattcatgttttaaagttggactctataccaaactggcattatggtattataggcatttgatttttgttttcttattttcagtttgtcantttctttactaccattatttttttctagccgggaaanaacgtttnatccnnaa

SEQ ID NO: 7737 - DNA, 565 bp, Homo sapiens
  misc_feature (292)..(292): "n" may be a, t, c, g, other or unknown
  misc_feature (298)..(298): "n" may be a, t, c, g, other or unknown
  misc_feature (410)..(410): "n" may be a, t, c, g, other or unknown
  misc_feature (414)..(414): "n" may be a, t, c, g, other or unknown
  misc_feature (429)..(429): "n" may be a, t, c, g, other or unknown
  misc_feature (486)..(486): "n" may be a, t, c, g, other or unknown
  misc_feature (509)..(509): "n" may be a, t, c, g, other or unknown
  misc_feature (530)..(530): "n" may be a, t, c, g, other or unknown
  misc_feature (546)..(546): "n" may be a, t, c, g, other or unknown
  misc_feature (549)..(549): "n" may be a, t, c, g, other or unknown
gttggaacttgtccagatctttaggcttttacaatatagacttctgtaatatggttaccaagagccagaattctaagatatagccaagattctaagatttaaccagtatttaaaatacatgcatttaaaagaaatccagaacaaacagcatatgaatgttctggcatcaaaacagggccactactttacagcttaacctcttcctcttaaggggatctgacaacatgccaaacttttgtttctcaactgtttggttaaaatttttttaaaaacagaattataatcttgagtnatgaangaaaatgcatggattgaaacctccctgtggtttataaaagttacagaagagatttatgctttttattactaaactcagttttaagcattccctttgtgtccgaaaataaccnaganggaaaattaaacccncctgggaacttggtcttgctttccatgtccaacttctcaagttagtccaagctcttnccttatatattccccgtgaatanccaggtgacaaaaattctttntaaaaaaaaaactggnttntaattaacaaaaagaa

SEQ ID NO: 7738 - DNA, 255 bp, Homo sapiens
  misc_feature (12)..(12): "n" may be a, t, c, g, other or unknown
  misc_feature (36)..(36): "n" may be a, t, c, g, other or unknown
  misc_feature (60)..(60): "n" may be a, t, c, g, other or unknown
  misc_feature (71)..(71): "n" may be a, t, c, g, other or unknown
  misc_feature (96)..(96): "n" may be a, t, c, g, other or unknown
  misc_feature (131)..(131): "n" may be a, t, c, g, other or unknown
  misc_feature (169)..(169): "n" may be a, t, c, g, other or unknown
  misc_feature (185)..(185): "n" may be a, t, c, g, other or unknown
  misc_feature (209)..(209): "n" may be a, t, c, g, other or unknown
  misc_feature (232)..(232): "n" may be a, t, c, g, other or unknown
  misc_feature (249)..(249): "n" may be a, t, c, g, other or unknown
agcaaaaagtanacttttattacagcagcaactgangcgaatcgaatggccccccagggncaccactgcancaccacctttctctcccgccccggncgccccagcgggattgtaaaattcggctcccctantgcccgtgggcctcctttccacacaggctgggcggganccggcaaatcaacgantaacccccaactaaaaagggggtngctgaaaaaggcccaggcccacntctgtgcaaaacaagtnaacaaa

SEQ ID NO: 7739 - DNA, 271 bp, Homo sapiens
  misc_feature (124)..(124): "n" may be a, t, c, g, other or unknown
  misc_feature (240)..(240): "n" may be a, t, c, g, other or unknown
  misc_feature (242)..(242): "n" may be a, t, c, g, other or unknown
  misc_feature (244)..(244): "n" may be a, t, c, g, other or unknown
  misc_feature (247)..(247): "n" may be a, t, c, g, other or unknown
  misc_feature (268)..(268): "n" may be a, t, c, g, other or unknown
aaaacaacacacatttattacctaaaagtttttgtgaatcaataattcaagagcagcttcggtgggcttagaatcgctcatgagttgcagtcaagatgccagctggggctgcagttgtctgaangttctgtttgggctggcggatctgtctctaacatgggtcactcacacggccactgacaggaagtcttagctcttcatcacagtcacatgggcatctccatggagctatgtggtatntncnccncaacatggcagctggcttgtncta

SEQ ID NO: 7740 - DNA, 545 bp, Homo sapiens
  misc_feature (7)..(7): "n" may be a, t, c, g, other or unknown
  misc_feature (296)..(296): "n" may be a, t, c, g, other or unknown
  misc_feature (479)..(479): "n" may be a, t, c, g, other or unknown
  misc_feature (501)..(501): "n" may be a, t, c, g, other or unknown
  misc_feature (538)..(538): "n" may be a, t, c, g, other or unknown
agttttncaaagtacttttattcactttatcttccatatatgttatctcctctgattccagcaataacagcccggtgaggtagccagggcaagtatgtattttacacattagcaggaagggaggctaaacgaggtttatgtaacttactcaggctgaaacactgaagaaaaatttgtgactctcatttcagtgatgttttctgcattattaaaaaatattatgctactcctcactatattatgttgatggttgaaatgtcattataaagcttaatttatatgattctcttgatganggatgatgaagcaaatgctccatcaactcactagtttacaggggcaagcattttcctacatttcacacataatttgattacctctgtcctaagtgaataatctactatctgggtatgagaaacatgatttgaaaaacactaaaccactatattatttcaacaaagaaccacttcacacctaanttaaaaggaacttcaaaaaaantcctaaccaaaaaaaatccaatgatgctgaaatccantcaaaat

SEQ ID NO: 7741 - DNA, 557 bp, Homo sapiens
  misc_feature (410)..(410): "n" may be a, t, c, g, other or unknown
  misc_feature (467)..(467): "n" may be a, t, c, g, other or unknown
  misc_feature (491)..(491): "n" may be a, t, c, g, other or unknown
  misc_feature (508)..(508): "n" may be a, t, c, g, other or unknown
  misc_feature (537)..(537): "n" may be a, t, c, g, other or unknown
  misc_feature (552)..(552): "n" may be a, t, c, g, other or unknown
gaacttggcacctttattcaaaacagccccaaactggaaatagcccaaatgttcaactggtcaatgggataaacaaatgatgatatatacaatgaaataccacagtgcgatacaatgctaaaaactactgataaatacaacatgaatgaatttcgaaaacattatgctaagtgaaaaaaatttagacataggagcatatattgtgcaattccatgtatttgaaatctgaacacagacaacactcgtctatatgacggggagcagacctgtggttgcctggggcatggggaatcaagagtggggactgactacaaaaatcacaaaggaactttttgggttgatagaaatatttgatatcctgattgcgatagtgatggttacttaggtgtatgtgtctgtatatgcattantctgttttcatactgctataaagaactgtccgagactgggtaatttataaaggaaanaagtttaattgactcccagttccncaggactggggaagccncaggaaacttccatcctttttaaaaaccnaaggggaaccaaaanccccc

SEQ ID NO: 7742 - DNA, 517 bp, Homo sapiens
  misc_feature (40)..(40): "n" may be a, t, c, g, other or unknown
  misc_feature (42)..(42): "n" may be a, t, c, g, other or unknown
  misc_feature (56)..(56): "n" may be a, t, c, g, other or unknown
  misc_feature (70)..(70): "n" may be a, t, c, g, other or unknown
  misc_feature (163)..(163): "n" may be a, t, c, g, other or unknown
  misc_feature (197)..(197): "n" may be a, t, c, g, other or unknown
  misc_feature (457)..(457): "n" may be a, t, c, g, other or unknown
  misc_feature (480)..(480): "n" may be a, t, c, g, other or unknown
  misc_feature (495)..(496): "n" may be a, t, c, g, other or unknown
  misc_feature (509)..(509): "n" may be a, t, c, g, other or unknown
gggttcacaaaggattatttatcaaattattgcaaacggnanatagcttgtgacanaaaatttccttggntctggaaaataaaacatttacgtcataaaaacatccttataaattaattttacgtaattaattttgtttggcttgatcttaattagcaatttnggactatagctgattgcgaacgcttccaaagaanaaattaaaataataactgtgaatgacaaaaacccagaacagccataggtaaagatctgattaacattaccaattaaccaggaaatttaagtgcttctgtggcatacaatcatccaacataaaaattgcaattattacaggtatctcagcatgtcagtatcttaggaatctcataaaatttcacatttctataaatgatgaacttacacaaacacagcttaaagaaaggtaaaacaccatttcttatttgacaatgcttcnagcagtatttgccaaataaaccnaatcattaataactnntccaaaaaaaaancccttggg

SEQ ID NO: 7743 - DNA, 412 bp, Homo sapiens
  misc_feature (110)..(110): "n" may be a, t, c, g, other or unknown
  misc_feature (132)..(132): "n" may be a, t, c, g, other or unknown
  misc_feature (159)..(159): "n" may be a, t, c, g, other or unknown
  misc_feature (196)..(196): "n" may be a, t, c, g, other or unknown
  misc_feature (342)..(342): "n" may be a, t, c, g, other or unknown
  misc_feature (359)..(359): "n" may be a, t, c, g, other or unknown
  misc_feature (386)..(386): "n" may be a, t, c, g, other or unknown
  misc_feature (408)..(408): "n" may be a, t, c, g, other or unknown
  misc_feature (411)..(411): "n" may be a, t, c, g, other or unknown
aaatgacttacatcttttgtattatccaatacacagtagatactcagaatttactccaatgaatgcatgttaaaaggatttgtacagacacaacactcttactttcaaanagcagaggaacattttatatantgaacacatacacactgtggcaatgtnaaactacttaaggaaggaaaaatatccccctccccanccaggtactgagacctggggctaaaattttttgtcagtcagcccccatccccatcccttatcttcgagtgaccttaccaggaaacctggctttggtggaaaggaaagctgtggggcttggggacctgatgccttttcttttgggangaaagggcacctgcacnatccacaggacagggagtggccagcanctatcctgagctgaggctcccnaana

SEQ ID NO: 7744 - DNA, 529 bp, Homo sapiens
  misc_feature (238)..(238): "n" may be a, t, c, g, other or unknown
  misc_feature (266)..(266): "n" may be a, t, c, g, other or unknown
  misc_feature (350)..(350): "n" may be a, t, c, g, other or unknown
  misc_feature (396)..(396): "n" may be a, t, c, g, other or unknown
  misc_feature (492)..(493): "n" may be a, t, c, g, other or unknown
  misc_feature (502)..(502): "n" may be a, t, c, g, other or unknown
  misc_feature (518)..(518): "n" may be a, t, c, g, other or unknown
  misc_feature (529)..(529): "n" may be a, t, c, g, other or unknown
cgggcactgaaatcttttattcgttaatttagtttctggcaagtgtttcctcaaaatcatcatgtagttccttgaacgtaaaaccacacattaaaaatgttattccactgaaaatgactcctatgcaaatatcgacatgtgatgtgtgtccaaatgccagagcattttgagaaaagaatcctctacaaataaaattaaggtataagctgagtcagggatgatccgattcccaccccangaaatggcccggagctgcaccaactcancgaggttggagctgaaaccctgagttaatgatcaaaagggacaagacaggaagcctggggaccgtggacagggaaagtgcgcanccctgattgccagtgggcggaacagggtcaggctcggggaaaacangaagggtggtgggcggtgggccctgaacaaaacaggcctggccgaagctgggggccactgtgcactgaggccaaaagaacagggtggtgggggcanntttggaaangaacaaaaaagggccnaaaaaaaaccn

SEQ ID NO: 7745 - DNA, 428 bp, Homo sapiens
  misc_feature (331)..(331): "n" may be a, t, c, g, other or unknown
  misc_feature (359)..(359): "n" may be a, t, c, g, other or unknown
  misc_feature (391)..(391): "n" may be a, t, c, g, other or unknown
  misc_feature (402)..(402): "n" may be a, t, c, g, other or unknown
  misc_feature (405)..(405): "n" may be a, t, c, g, other or unknown
ggcatgaacatggactacagcgtttaatgcagacccaaagccacacatttttggggagtaggttttacttgcagtacagattcttttcattacagatcacaaaaatacaatacaatgtgacaagcccagtttaagaattacatgcagtagctcatattaacacaaacagctccccacgaaggccgacaagagctaaatccggtgtcaacagggttcattgcaggagtagaataatccggtacaaggaacgagaacagattgaaaccagaaacaaagccatgcctgacagtcaatcaaggtcaatctgatcatttccatgaccaattacccntgtgaacaattcaaaatgacggtggaanactgagcaccctgtacccacacacgatgcccncagcttggcanaangtgcaccaaccttgtttgaaaaa

SEQ ID NO: 7746 - DNA, 247 bp, Homo sapiens
  misc_feature (11)..(11): "n" may be a, t, c, g, other or unknown
  misc_feature (161)..(161): "n" may be a, t, c, g, other or unknown
  misc_feature (177)..(177): "n" may be a, t, c, g, other or unknown
  misc_feature (216)..(216): "n" may be a, t, c, g, other or unknown
  misc_feature (238)..(238): "n" may be a, t, c, g, other or unknown
  misc_feature (247)..(247): "n" may be a, t, c, g, other or unknown
ctttttttttntttttttacgtactcatgattggctttaatatttctttacactatacatactgaaaatgtttacatttactaataaggaatgccaagcgtatccatcaccatttgaatagcttgcaggggatttgtgatttcttccatgttatctcttcncaaaacccaatctggnttaagtcttgaaactattctggtccttacaggtgtttcngggataaaaggaatgcttatanaaaaattcn

SEQ ID NO: 7747 - DNA, 515 bp, Homo sapiens
  misc_feature (1)..(515): "n" may be a, t, c, g, other or unknown
nnnnnnnnnnnnnnnnnnnnnnnnnnnnnnnnnnnnnnnnnnnnnnnnnnnnnnnnnnnnnnnnnnnnnnnnnnnnnnnnnnnnnnnnnnnnnnnnnnnnnnnnnnnnnnnnnnnnnnnnnnnnnnnnnnnnnnnnnnnnnnnnnnnnnnnnnnnnnnnnnnnnnnnnnnnnnnnnnnnnnnnnnnnnnnnnnnnnnnnnnnnnnnnnnnnnnnnnnnnnnnnnnnnnnnnnnnnnnnnnnnnnnnnnnnnnnnnnnnnnnnnnnnnnnnnnnnnnnnnnnnnnnnnnnnnnnnnnnnnnnnnnnnnnnnnnnnnnnnnnnnnnnnnnnnnnnnnnnnnnnnnnnnnnnnnnnnnnnnnnnnnnnnnnnnnnnnnnnnnnnnnnnnnnnnnnnnnnnnnnnnnnnnnnnnnnnnnnnnnnnnnnnnnnnnnnnnnnnnnnnnnnnnnnnnnnnnnnnnnnnnnnnnnnnnnnnnnnnnnnnnnnnnnnnnnnnnnnnnnnnnnnnnnnnnnnnnn

SEQ ID NO: 7748 - DNA, 156 bp, Homo sapiens
  misc_feature (145)..(145): "n" may be a, t, c, g, other or unknown
  misc_feature (152)..(152): "n" may be a, t, c, g, other or unknown
  misc_feature (155)..(155): "n" may be a, t, c, g, other or unknown
aaaggttgggagatatttattttctttaaacaaggtcataaataacaaaaaacaaagtaggtcccagactccggaccatgcagcaggacaggggtgggaggttgttgagtggaaaggtggaaggggctacacatcacctaagacnttcacanaana

SEQ ID NO: 7749 - DNA, 501 bp, Homo sapiens
  misc_feature (180)..(180): "n" may be a, t, c, g, other or unknown
  misc_feature (224)..(224): "n" may be a, t, c, g, other or unknown
  misc_feature (240)..(240): "n" may be a, t, c, g, other or unknown
  misc_feature (412)..(412): "n" may be a, t, c, g, other or unknown
  misc_feature (455)..(455): "n" may be a, t, c, g, other or unknown
  misc_feature (461)..(461): "n" may be a, t, c, g, other or unknown
  misc_feature (491)..(491): "n" may be a, t, c, g, other or unknown
  misc_feature (494)..(494): "n" may be a, t, c, g, other or unknown
ctgaggaattggctttatttagataggaactctcaaaatgggagacaagttcttctcatgttttcaatagcagtctgaatagcttttgtaaattctcttatgtcttttctcctgatctctgacactaggggagactcaagtaaaagctttgacctatcactcatcttttcctagcaaganatagtgttcttcaaagcactagcttggataaaaccaatcctganatcctaagctggctanaaaaaacaaaatcttccccaccgctcaaacaactggcctctttccttacctttcgcaaagcaatgaacttaatgcactaggcattagcaaagggaatcgttcactagctgcttccatcactgggcctgccaatgtcccagcacttcacacctgggaacacaagtgttattgncacaaaacacacccaagtgtgctatcaacacttgtgtggaaangaaaanaatttctaaaaaaatgtcaccctcccaggnccnaaattaa

SEQ ID NO: 7750 - DNA, 587 bp, Homo sapiens
  misc_feature (39)..(39): "n" may be a, t, c, g, other or unknown
  misc_feature (262)..(262): "n" may be a, t, c, g, other or unknown
  misc_feature (276)..(276): "n" may be a, t, c, g, other or unknown
  misc_feature (387)..(387): "n" may be a, t, c, g, other or unknown
  misc_feature (428)..(428): "n" may be a, t, c, g, other or unknown
  misc_feature (465)..(465): "n" may be a, t, c, g, other or unknown
  misc_feature (495)..(495): "n" may be a, t, c, g, other or unknown
  misc_feature (500)..(500): "n" may be a, t, c, g, other or unknown
  misc_feature (547)..(547): "n" may be a, t, c, g, other or unknown
  misc_feature (557)..(557): "n" may be a, t, c, g, other or unknown
  misc_feature (568)..(568): "n" may be a, t, c, g, other or unknown
ccagatgtaactcttgtcttttattccagcatctcccanagctccaatatgtacagactttatttatacacatataatatacaccatatatacttatttatagatattcacacaccagcccacacactcgcacacactcacacgcacacacccttccaggaggggcgtgtggctgccttggagtcccgctagggcccaaacaagtgatactgggcttgccaggcagttgtgaggttttgtgttttttgcttttaaaaagaangccatttcctccanatgtgtcctccctctccccaagccctaaaactcctccccaaaacactctgaaaaaaatttttttaaaacaagaggttttcctttgctctggcccaagtagtttctggagantccaggcccatccacaagtcccgtgcaggtcctaaaacacnaaaaccgggcgtggccttggtcaggcctgcaactgtnccctctgaagggaaaaagggaagcctatancatcnaaggcacctgccaaaataaagaaaggtgttgttcctctccccccaanggggctgccnccccctggttnccaaaaccctccaaaattt

SEQ ID NO: 7751 - DNA, 573 bp, Homo sapiens
  misc_feature (414)..(414): "n" may be a, t, c, g, other or unknown
  misc_feature (465)..(465): "n" may be a, t, c, g, other or unknown
  misc_feature (497)..(497): "n" may be a, t, c, g, other or unknown
  misc_feature (551)..(551): "n" may be a, t, c, g, other or unknown
acaccaaatttctgcaactttataataatgaaaattagaaacaacctaaatagttaacaacatgggaatggttaaataaactgagttgcatccattaaatggaatataatatagccattaaaattatgtttttgtaaaatttttaatgccataagaaaatgtggcaattttgcaatgaaaaagatctacttataaaactgtttacagtatgactccaattatgtaaaaaaagtatacaatacacatataggcatacatgggggttgctttttaaaggtggttacttctgggttgtgatattatcagtaatcatttttgcttttttatacatttctgcatttttcaagttttctatgatgagtatattattttacaaagactacgaaaattttcctctgatatactggtaattanaatgtacttggggtattttaaatatatgggaacaatattataatgctccanctccaagactttttgggaatacatatcacttnggtaataaactacatccccgttttatctgttaacaaattttaattaaacagttnatattgtgataaaacatgttgc

SEQ ID NO: 7752 - DNA, 531 bp, Homo sapiens
  misc_feature (222)..(222): "n" may be a, t, c, g, other or unknown
  misc_feature (300)..(300): "n" may be a, t, c, g, other or unknown
  misc_feature (362)..(362): "n" may be a, t, c, g, other or unknown
  misc_feature (374)..(374): "n" may be a, t, c, g, other or unknown
  misc_feature (400)..(400): "n" may be a, t, c, g, other or unknown
  misc_feature (470)..(470): "n" may be a, t, c, g, other or unknown
  misc_feature (479)..(479): "n" may be a, t, c, g, other or unknown
  misc_feature (507)..(507): "n" may be a, t, c, g, other or unknown
  misc_feature (526)..(526): "n" may be a, t, c, g, other or unknown
  misc_feature (530)..(530): "n" may be a, t, c, g, other or unknown
ataaataaaatatacaatgccatttattgtaattctagaaaagttttttacagaatgcttttgttgatttttgctgactcttctatccaacctgtttgcaattcaaccatgatatgacacaaccagactacaaataaatgtttgttactatctgattcaacaaagcagtcactcatttcatggaatggatatgggctgttactcagtgaaaagacacatganatggttcagtgctaactcacccttctgacagaaaatgccagaaagtttccaccccattgacaggcttggagtcttgantaccatctgggtgggtggagctggcactggcacgaaacctctccactgctatcctgacaganatggggcatgtncttcccagggccacttgccaacccanggaggttttccatcttgctggtttggtgaaggaagctgctttcaaatttcaagtggacctgctggcctgnataaggctnaagggcctgcctccaaaaagtttctccncttgttggcattacccccngaant

SEQ ID NO: 7753 - DNA, 557 bp, Homo sapiens
  misc_feature (253)..(253): "n" may be a, t, c, g, other or unknown
  misc_feature (303)..(303): "n" may be a, t, c, g, other or unknown
  misc_feature (337)..(337): "n" may be a, t, c, g, other or unknown
  misc_feature (373)..(373): "n" may be a, t, c, g, other or unknown
  misc_feature (406)..(406): "n" may be a, t, c, g, other or unknown
  misc_feature (418)..(418): "n" may be a, t, c, g, other or unknown
  misc_feature (465)..(465): "n" may be a, t, c, g, other or unknown
  misc_feature (492)..(492): "n" may be a, t, c, g, other or unknown
  misc_feature (518)..(518): "n" may be a, t, c, g, other or unknown
  misc_feature (530)..(530): "n" may be a, t, c, g, other or unknown
  misc_feature (541)..(541): "n" may be a, t, c, g, other or unknown
atcagttgtccacctttaatttccaatactgtactttcttaacaagcatacaaaatatcaaacttctctttagaaaaagtgccgttctttgacatcctttacacaaaaacagtctgagcctgtggcatgttaatgcagttgagaggcaaagcatacgaacttttacaaattctaccttccataaaaagcctcccgaaaaggagattacacgccactataaaaatatcaacctcttgtggtagctgcattaganaaccaaggcttgaagactattttcatatagcatagaaaaaccactatganagcatattaactgcattggtggcttgggagtgtnctgtgccacaggattatgcatagctactgttaggtnccaagactgttatacagttttaaattgattgtnactgagagcatnacagaagtactaccagcccatgcaaaataactaaaaatactgaatcnctgtgctgaatacttcctcccgggaanaaaaccaaagggcgccgttacttaantccaacccaacnggggaccaaanttccccccccaaaatt

SEQ ID NO: 7754 - DNA, 560 bp, Homo sapiens
  misc_feature (236)..(236): "n" may be a, t, c, g, other or unknown
  misc_feature (284)..(284): "n" may be a, t, c, g, other or unknown
  misc_feature (334)..(334): "n" may be a, t, c, g, other or unknown
  misc_feature (404)..(404): "n" may be a, t, c, g, other or unknown
  misc_feature (487)..(487): "n" may be a, t, c, g, other or unknown
  misc_feature (510)..(510): "n" may be a, t, c, g, other or unknown
  misc_feature (536)..(536): "n" may be a, t, c, g, other or unknown
  misc_feature (543)..(543): "n" may be a, t, c, g, other or unknown
  misc_feature (560)..(560): "n" may be a, t, c, g, other or unknown
actggtggatgtctgttttctttattggtagtttggtttagaattgtgatgattacaatggactcgtgactacacaagcagtaaaaagcagccagctgtgcttttacaccatggtttcacacaaagcagctaaagaaatatcagaatgcctaattttctattttataaaagccctaaaggcatatggcagaagaatgctggaaaaatcactgtgggaagaatatgcataaataaanaagtatttcttacgtcaaaaaagtcccaagaaatcacaaaatctgcanaagcttggttaatcaaatactgcagtactgatttaatcagtataaaatcnaaagagctttagatctgtaataaaaatccaaatttggggaagggcaaactttaaaacagcagccaattanaaaagggttggggaaaggaaaagtaattgaacagcccattggaactgtggggacatgtactgaccactgtcaaaccatgttantttcttggttcccctggaaaacntttatacccctattttcctccctccntcttaantccaccatgtccaattn

SEQ ID NO: 7755 - DNA, 258 bp, Homo sapiens
  misc_feature (33)..(33): "n" may be a, t, c, g, other or unknown
  misc_feature (180)..(181): "n" may be a, t, c, g, other or unknown
  misc_feature (220)..(220): "n" may be a, t, c, g, other or unknown
  misc_feature (243)..(243): "n" may be a, t, c, g, other or unknown
  misc_feature (245)..(245): "n" may be a, t, c, g, other or unknown
acttaacattatagtcattttattgctctaganagtttagtttctaaaaccattggattacttacatagtgacaataagactagccacatacacaaaatcaactgtatgaggctgcttctccagcttagtggacaaatattacaaaaatacaaaaatagctgattatagttaagctatcnngtataatatttcatgtatttatcctaagaatatcccctntttatagataaggagatgaacangngtaaaactaatgt

SEQ ID NO: 7756 - DNA, 295 bp, Homo sapiens
  misc_feature (2)..(3): "n" may be a, t, c, g, other or unknown
  misc_feature (5)..(5): "n" may be a, t, c, g, other or unknown
  misc_feature (11)..(11): "n" may be a, t, c, g, other or unknown
  misc_feature (40)..(40): "n" may be a, t, c, g, other or unknown
  misc_feature (154)..(154): "n" may be a, t, c, g, other or unknown
  misc_feature (208)..(208): "n" may be a, t, c, g, other or unknown
  misc_feature (245)..(245): "n" may be a, t, c, g, other or unknown
  misc_feature (249)..(249): "n" may be a, t, c, g, other or unknown
  misc_feature (251)..(251): "n" may be a, t, c, g, other or unknown
  misc_feature (274)..(274): "n" may be a, t, c, g, other or unknown
gnngnggtatncacttcagtaacttgaatccacagatatnagcagtatataaccagaaagttacaagtaaacacaaattatacatgcaaatttctgttcacaaaggtcacatgtgcaggtacatgaattagaagcgtgcatctaggattatggncaaactgttttaaaaatgcagaaatgttaaattacatcttgaaaatatgaaganatggtctacacacttcaaaaatcaaatgttgcttatnccananatgtttgacaatcacgggattcnagtgacaagcagtaagatctc

SEQ ID NO: 7757 - DNA, 217 bp, Homo sapiens
  misc_feature (4)..(4): "n" may be a, t, c, g, other or unknown
  misc_feature (16)..(16): "n" may be a, t, c, g, other or unknown
  misc_feature (65)..(65): "n" may be a, t, c, g, other or unknown
  misc_feature (100)..(100): "n" may be a, t, c, g, other or unknown
  misc_feature (106)..(106): "n" may be a, t, c, g, other or unknown
  misc_feature (153)..(153): "n" may be a, t, c, g, other or unknown
  misc_feature (188)..(188): "n" may be a, t, c, g, other or unknown
  misc_feature (200)..(200): "n" may be a, t, c, g, other or unknown
  misc_feature (203)..(203): "n" may be a, t, c, g, other or unknown
  misc_feature (211)..(211): "n" may be a, t, c, g, other or unknown
gatntttttatttttntcaacactgttaaaaacatttattctgatacattctatcataagttagnacaagatccactctgctacagatgcgtctgtgaanagcctngtgccatccaactagtgactgaatgatgtcccatctcttatccgagncagagcacacatcttccatgctgtccgctgattgnctccaaatccanaanaccaaatnatcctt

SEQ ID NO: 7758 - DNA, 493 bp, Homo sapiens
  misc_feature (287)..(287): "n" may be a, t, c, g, other or unknown
  misc_feature (348)..(348): "n" may be a, t, c, g, other or unknown
  misc_feature (425)..(425): "n" may be a, t, c, g, other or unknown
  misc_feature (440)..(440): "n" may be a, t, c, g, other or unknown
  misc_feature (453)..(453): "n" may be a, t, c, g, other or unknown
  misc_feature (460)..(460): "n" may be a, t, c, g, other or unknown
  misc_feature (473)..(473): "n" may be a, t, c, g, other or unknown
aagattatacgaagtgatttattgatactggttaacatccattatatacaggtagaaactttcaaaattgtacaaagaacattaagcatattgataaagacagttttacagacaaaacaactggaaaatagttttaacatacacaatatataattatgaaaaaaatgtagaacacatattgttctaccagataaatcccaaggttattaaaagtctgctatgcagaccttaagttgaaaaatgtgttcaatggagttacatggttttagaaaattaagtataatgtnaaaattaagcttttttttctcattgcaattgggagaggaactgagacaactttttaccccnaatctatacagtttgaaaaataatttatatgtctagcataaagaaaattgagaatgtttatggttctgtgaacttgncttttatgaaatgcnacccctccgtttnaaaaatnagaaacctgtgcntccgaaaccgaatggtcccc

SEQ ID NO: 7759 - DNA, 385 bp, Homo sapiens
  misc_feature (66)..(66): "n" may be a, t, c, g, other or unknown
  misc_feature (109)..(109): "n" may be a, t, c, g, other or unknown
  misc_feature (127)..(127): "n" may be a, t, c, g, other or unknown
  misc_feature (132)..(132): "n" may be a, t, c, g, other or unknown
  misc_feature (229)..(229): "n" may be a, t, c, g, other or unknown
  misc_feature (308)..(309): "n" may be a, t, c, g, other or unknown
  misc_feature (316)..(316): "n" may be a, t, c, g, other or unknown
  misc_feature (354)..(354): "n" may be a, t, c, g, other or unknown
  misc_feature (381)..(381): "n" may be a, t, c, g, other or unknown
agggatttaactatctttattttctggttaaaatttttaaaaaaagtggggagagggtgagagtcntaaggggcaatagcaatagagattacactgtgctgacacaganactaaattctagtcagantgaanaccatataaaagggcggctgatggtttaaaggaaataactacatggaatctaatccgaagacatccatgaagtttacatctccattattaagccctnaagtaatgttaagaaaaacaattctccaacaaaactgggagtccacagttgtcaagtatgctttctcaggcacggggtnngtaaaantctggagaaatgggttctctccatgcccaatgacaaancaagacggtcctaagtttgaggttaanaaca

SEQ ID NO: 7760 - DNA, 440 bp, Homo sapiens
  misc_feature (413)..(413): "n" may be a, t, c, g, other or unknown
  misc_feature (424)..(424): "n" may be a, t, c, g, other or unknown
  misc_feature (427)..(427): "n" may be a, t, c, g, other or unknown
  misc_feature (435)..(435): "n" may be a, t, c, g, other or unknown
  misc_feature (439)..(439): "n" may be a, t, c, g, other or unknown
acagtcatgtgtacaatttgttacaaaaccatagaagactacaacttgttttaaatcatttttggtctgcaaatatgtaaaatctgtgtgcaattatcatgtatttacagggtcttgtgttagtcattttcaatgattattccaacaatgtcacactctcaacataagacatggcttaagataaatatattagcaaataaatattctgagaacatatttccataaatgaaatgtgctgctatacatatacagaatatacataagttgtcttctagcttttaaaacattttttaaaaatggtaatgttggaaaaagacccttagaccattttattacaaaatctttacagcaaggtctttacaaaatctcttttaagtgctatgggaaaaattaaaaaattttaaaaataatgnccttgttaganccnccccatanaaana

SEQ ID NO: 7761 - DNA, 481 bp, Homo sapiens
  misc_feature (246)..(246): "n" may be a, t, c, g, other or unknown
  misc_feature (363)..(363): "n" may be a, t, c, g, other or unknown
  misc_feature (405)..(405): "n" may be a, t, c, g, other or unknown
  misc_feature (410)..(410): "n" may be a, t, c, g, other or unknown
  misc_feature (448)..(448): "n" may be a, t, c, g, other or unknown
  misc_feature (455)..(455): "n" may be a, t, c, g, other or unknown
  misc_feature (465)..(465): "n" may be a, t, c, g, other or unknown
gcaaactcaatctttattgcagctgaaatactattttcgttaagtctcggacacttagacccactgatcctgttactctgcttgtctctggtgtgcagggaatcattttgctggattagaggaaaggtgccgccgtctgtttccatgacttctttaaaaactgccttgaaatgaaattagttcatctgcttgcttccgtgtggcagcctcctggcccgcagctgtgccaggcaccagtcctaagangcatctatagactagtgcttatgtgggaccccaagcctcggcacagctccataccacctatcctgagctgcctcctgggggaccgtgctcttcagcttctaccagcaaggaaggcanatacgggtgcgtgcgtggggcaaaaaaacacagccttctganttcanggtctcccagatcttcactgggctctgaacttctgggnctgtggncccctgtttnggccgcttctgctaag

SEQ ID NO: 7762 - DNA, 423 bp, Homo sapiens
  misc_feature (167)..(167): "n" may be a, t, c, g, other or unknown
  misc_feature (280)..(280): "n" may be a, t, c, g, other or unknown
  misc_feature (328)..(328): "n" may be a, t, c, g, other or unknown
  misc_feature (368)..(368): "n" may be a, t, c, g, other or unknown
  misc_feature (403)..(403): "n" may be a, t, c, g, other or unknown
  misc_feature (410)..(410): "n" may be a, t, c, g, other or unknown
  misc_feature (420)..(420): "n" may be a, t, c, g, other or unknown
ggtgatgaaaaaatgtttagtttatttaaaattcctgtttagagtcaactttatttactggctcctgtaaccagtgaaacattctgaaatgtattagataatggttgtatgttttatatatttcatatcgaatatagtaagtgatttaatcaattaacaaaagtccnttatttgtgaacaatgagagagactgacactagctttgtatggttttactttggaaaattttacaaatttaaagtaataaatgtattcattttctcactctgcagaagttcanttttaaaaagaacattactgttctaaaatttcacaacatacaacatantctgtgcttgtgacatttcccaatttgtctgtgacagctngatgttttgaaaaaaaaagaaggagaatggctgtnattgganaaaaaaaccnaaa

SEQ ID NO: 7763 - DNA, 500 bp, Homo sapiens
  misc_feature (66)..(66): "n" may be a, t, c, g, other or unknown
  misc_feature (78)..(78): "n" may be a, t, c, g, other or unknown
  misc_feature (85)..(85): "n" may be a, t, c, g, other or unknown
  misc_feature (154)..(154): "n" may be a, t, c, g, other or unknown
  misc_feature (175)..(175): "n" may be a, t, c, g, other or unknown
  misc_feature (185)..(185): "n" may be a, t, c, g, other or unknown
  misc_feature (280)..(280): "n" may be a, t, c, g, other or unknown
  misc_feature (287)..(287): "n" may be a, t, c, g, other or unknown
  misc_feature (370)..(370): "n" may be a, t, c, g, other or unknown
  misc_feature (410)..(410): "n" may be a, t, c, g, other or unknown
  misc_feature (413)..(413): "n" may be a, t, c, g, other or unknown
  misc_feature (426)..(426): "n" may be a, t, c, g, other or unknown
  misc_feature (441)..(441): "n" may be a, t, c, g, other or unknown
  misc_feature (499)..(499): "n" may be a, t, c, g, other or unknown
attgtatgattgtgtttatgtgaaatgccctgaagaggcaaatccacagacacacaggaagattancggttgcccgangatgacngtgggggaaggggaactgctattggacatggggattctttttaagatgatggaaatgctttgtaagtanataggagtgatagttgcacancactgtgaanatactagaatccattgaattgcacacttgaatggggtgaatgttggctgggcacagtggctcacatctgtaatcctaacactttgggaggctgangtggcangatcgcttgaacccaggagtttgagaccagcctaagcaacatagccagaccctgtctctacaaaaaataaaaaaaaacattanctgggcgtggtggcatgcacctgtggtcccagctactcangangctgaagcgcgangacccttgagtccangaagtcgatgctacagtgaactgtgatcatgccacctgcattccactgggggtgacant

SEQ ID NO: 7764 - DNA, 494 bp, Homo sapiens
  misc_feature (331)..(331): "n" may be a, t, c, g, other or unknown
  misc_feature (442)..(442): "n" may be a, t, c, g, other or unknown
  misc_feature (447)..(447): "n" may be a, t, c, g, other or unknown
  misc_feature (464)..(464): "n" may be a, t, c, g, other or unknown
  misc_feature (476)..(476): "n" may be a, t, c, g, other or unknown
  misc_feature (492)..(492): "n" may be a, t, c, g, other or unknown
aaccaaatgttatttaatatcttaaaaagtaacacaatccaaaatggatatttcacacaacactacataaacaacatgaaacacagtatcaccatagggagggactttcaaatatagacttacaaaaatccctgtccttttttttcttttaagttattatactaagcatgacaagtaatcatcatttacagtatggtacactgacacgataaaaaccatgttacaaatgtgctgttataaatcagtaacattagggaagacatttcatgaactgtaattatttcatatgaaatactatacaatataaacagaacatccatcttgggatganctttacagcaaccagagaccaagtaatttaaaattttttttcagtgcaaacacattttattccaagggcagtcctgggtgcaaaaccccttctaacattcagtaaatcccncttgnccgtcttaatcccttancccaatgcaatntccccttcccgtcccncc

SEQ ID NO: 7765 - DNA, 493 bp, Homo sapiens
  misc_feature (3)..(3): "n" may be a, t, c, g, other or unknown
  misc_feature (39)..(39): "n" may be a, t, c, g, other or unknown
  misc_feature (65)..(65): "n" may be a, t, c, g, other or unknown
  misc_feature (70)..(70): "n" may be a, t, c, g, other or unknown
  misc_feature (129)..(129): "n" may be a, t, c, g, other or unknown
  misc_feature (267)..(267): "n" may be a, t, c, g, other or unknown
  misc_feature (298)..(298): "n" may be a, t, c, g, other or unknown
  misc_feature (385)..(385): "n" may be a, t, c, g, other or unknown
  misc_feature (406)..(406): "n" may be a, t, c, g, other or unknown
  misc_feature (449)..(450): "n" may be a, t, c, g, other or unknown
  misc_feature (467)..(467): "n" may be a, t, c, g, other or unknown
  misc_feature (490)..(490): "n" may be a, t, c, g, other or unknown
atntcattaagatttaatagttttttttggactaagtantggaaaaacttttatacttaactganacatnttgtcaaggctaaaaaaaagtcttgcaaaatggggcagtggactgacaggctgacatanaaaataaactttgcccaatcacaacttgtgcctcccatccctggagtactgactggcaccggtaggacagaatctctttgaatccattactccatgcccccttgaggcactgttgaagaaatctcacttttcagccanggtactggttctggtacatatggatcataantccatttggggaagactcgtttatacaggttcatcagtactgtgtcttgagattttagcttcccatcaaagctgcatttcatgtggncatgggtacctaaaggttccntgatatgtcctctccgggcccactccgtctcagttccctgggnntaaaacacaacacaccncctctgttgaaaaaaattttacnttt

SEQ ID NO: 7766 - DNA, 309 bp, Homo sapiens
  misc_feature (192)..(192): "n" may be a, t, c, g, other or unknown
  misc_feature (235)..(235): "n" may be a, t, c, g, other or unknown
  misc_feature (254)..(254): "n" may be a, t, c, g, other or unknown
  misc_feature (260)..(260): "n" may be a, t, c, g, other or unknown
  misc_feature (294)..(294): "n" may be a, t, c, g, other or unknown
  misc_feature (305)..(305): "n" may be a, t, c, g, other or unknown
agtctgaaaaacataatctctataatcatttaatttttctttttggaaaatgtatgtatacatacacacagtttccataaaaaaacatagatagtaaagctgattaaaatcttcctgtcctattggtaccagcacatgaagcccttctacaaaattcctgacggactgggaataaaaattcctagtgacagnccactccttctcaggcaggtgtgattgtttgaaatccctcccnatattgaaatgaaacctgnttcccngtaacttccctgtaattccgtgggtcccttgttnccacagaaaangcag

SEQ ID NO: 7767 - DNA, 499 bp, Homo sapiens
  misc_feature (94)..(94): "n" may be a, t, c, g, other or unknown
  misc_feature (250)..(250): "n" may be a, t, c, g, other or unknown
  misc_feature (417)..(417): "n" may be a, t, c, g, other or unknown
  misc_feature (466)..(466): "n" may be a, t, c, g, other or unknown
  misc_feature (482)..(482): "n" may be a, t, c, g, other or unknown
  misc_feature (493)..(493): "n" may be a, t, c, g, other or unknown
  misc_feature (498)..(498): "n" may be a, t, c, g, other or unknown
acagatgtgaaaaaagtttattttctccttgtcatatttccgattgtcattttgactcaaaattgttccgggtattgttttctttatccataanaaatctcatctaacactgccatttggaaagggaaagaatatgtcacaataggggaaggtacttcatcaacatgattgcacacattccattttctgtacataaccaaagtataatatttagtgctaataaacctattccagatcttgctaatagtangaaatggaattttaaaaaaggcttttaatacaaaggaaaaacttttccttttttaggtgttgctgttagtttatacggccaaatcctctcatctgacataatcaggcctaaggcaattaatggtaaaagctgattaaagcaaaaaatccttttgaaaacaatacatnaaaaaatacttaaacttaaacaagaccttacaacattttgaactcccanctatggtggcaaaacntgccggtctanccgtna

SEQ ID NO: 7768 - DNA, 472 bp, Homo sapiens
  misc_feature (378)..(378): "n" may be a, t, c, g, other or unknown
  misc_feature (389)..(389): "n" may be a, t, c, g, other or unknown
  misc_feature (391)..(391): "n" may be a, t, c, g, other or unknown
  misc_feature (455)..(455): "n" may be a, t, c, g, other or unknown
  misc_feature (466)..(466): "n" may be a, t, c, g, other or unknown
gtttttttgcctgtgttaagtcctgttgatgttaagtcctgttgagagcaccaggtaaacactctgcaccccttctcttagtagtaataggtttttcactccttggcctcagctgtcctcacaggacagtgggggcagatcagagaacacatcagaaatacatacaaagaaatcgtacaaactggacaggttcccctccccctgccacaactggcatcccaacagagggaacaagtactaaatcatttttgacgacgtaaataagactgaaaacaggttaaacagttgctgaacttaagggcatgacaaaaaggactcctctctctgacccaggtaggcaaaatgctttgggtgtgaggtaaaaaaaatgggtaagancagctgtacanantggggtgaaatgttaaacagggtgcaatgcccaagggctaaaaaccaagtccagcgcaagcctnaaacacaggangcctcc

SEQ ID NO: 7769 - DNA, 301 bp, Homo sapiens
  misc_feature (85)..(85): "n" may be a, t, c, g, other or unknown
  misc_feature (208)..(208): "n" may be a, t, c, g, other or unknown
  misc_feature (219)..(219): "n" may be a, t, c, g, other or unknown
  misc_feature (291)..(291): "n" may be a, t, c, g, other or unknown
gggggtccgcattttcttaactcgttcccaccgctcactggagaagcctctctttccaggcgtctcttcagttttctctcaagantgttaattccatctcgcttccctcggcaacagtcattcttctcactgctgggtctcactggtgaacttcggtcaatctgctgaacaaggcttggctttgcaagtaaagtctggtaaagttccngaatttcaagnaaggatacctggaacaactgggcttccatcaataattcattcacttctggactaacacatggaggggatacnacttcctcca

SEQ ID NO: 7770 - DNA, 288 bp, Homo sapiens
  misc_feature (176)..(176): "n" may be a, t, c, g, other or unknown
  misc_feature (184)..(184): "n" may be a, t, c, g, other or unknown
  misc_feature (246)..(246): "n" may be a, t, c, g, other or unknown
  misc_feature (261)..(261): "n" may be a, t, c, g, other or unknown
  misc_feature (277)..(277): "n" may be a, t, c, g, other or unknown
  misc_feature (285)..(285): "n" may be a, t, c, g, other or unknown
  misc_feature (288)..(288): "n" may be a, t, c, g, other or unknown
gagaagaccgtgcttataatttaagaaactgaaactacatttttgcattttagtaaaatctgagattgtacagtttttaatctcatttccacagacacccagcaggcagcctcttttctcttagaaaaatcaaacatgcaagccgtgaagtcaggaatagctgaaccccttggatnagcacacnctttgggcttctttaaagcgagcctctcatcaagagcatttcctttgctggcatgaaggganggctgtgcctgccanggctagcacctggganggacgctnacn

SEQ ID NO: 7771 - DNA, 324 bp, Homo sapiens
  misc_feature (190)..(190): "n" may be a, t, c, g, other or unknown
  misc_feature (270)..(270): "n" may be a, t, c, g, other or unknown
  misc_feature (276)..(276): "n" may be a, t, c, g, other or unknown
  misc_feature (290)..(290): "n" may be a, t, c, g, other or unknown
  misc_feature (292)..(292): "n" may be a, t, c, g, other or unknown
  misc_feature (318)..(318): "n" may be a, t, c, g, other or unknown
ggagttcattcaaaatttattgagctgcaactgtgtgctcagcaatgagaatatagcagtgagcaagatgtgaacaagatctctgccctcgtgagcttacaatctagcagcgcagccagcctattacagccataattttacaattgtaataaaaactctggaaaatgcatggtgctaactgatttatcanaaagtcttgacccaccaagaaatcagaaaagacctccctgaggaaggaacatttaggatcagctaggtggaaagtgaaangaagantgttgcaggcaganangacagtgtgtgagggtctgaggcaanacatgt

SEQ ID NO: 7772 - DNA, 538 bp, Homo sapiens
  misc_feature (75)..(75): "n" may be a, t, c, g, other or unknown
  misc_feature (253)..(253): "n" may be a, t, c, g, other or unknown
  misc_feature (291)..(291): "n" may be a, t, c, g, other or unknown
  misc_feature (293)..(293): "n" may be a, t, c, g, other or unknown
  misc_feature (310)..(310): "n" may be a, t, c, g, other or unknown
  misc_feature (336)..(336): "n" may be a, t, c, g, other or unknown
  misc_feature (446)..(446): "n" may be a, t, c, g, other or unknown
  misc_feature (471)..(471): "n" may be a, t, c, g, other or unknown
  misc_feature (486)..(486): "n" may be a, t, c, g, other or unknown
  misc_feature (492)..(492): "n" may be a, t, c, g, other or unknown
  misc_feature (530)..(530): "n" may be a, t, c, g, other or unknown
aataattctctatttattaaaaagggtcctacagctttacagccacagcaccggacacggccctggacagcgacngcgaaccggccaggggccgctttgcaacttcaatgccaagctcacgtctggctgcgaccgtggcaggctgtggcatccccgacagcggccggtggcggaagtatgggggcgggtggcaccgctcactcgagattcacagaacatggcaagcccgcctgactggcatggcagtgaatcntcctgtacagcttcatttcaagaaaacagttacagtananttcaagtccgagagcangaatgtatggtcactgaggacaaaangcaatggcctggcccgtggcccaaaccccgcttcagttctgccttctgtcaccctggcggctaagcacaagtcggggccctggatccccacaagttacaagggaagggcnggccaaaaagtccccttggttaacncctccgccttttccntcacangttccactgccccctgcttgggccctggggcctccacncactttgc

SEQ ID NO: 7773 - DNA, 490 bp, Homo sapiens
  misc_feature (395)..(395): "n" may be a, t, c, g, other or unknown
  misc_feature (445)..(445): "n" may be a, t, c, g, other or unknown
  misc_feature (459)..(459): "n" may be a, t, c, g, other or unknown
  misc_feature (461)..(461): "n" may be a, t, c, g, other or unknown
  misc_feature (467)..(467): "n" may be a, t, c, g, other or unknown
ctggagtcataatttcagaaagagtaaagataaactttcttattaaaaactggttttaggtccaaataatgaagatgtagaaaaacaacctacagtcccattataacattttgaaattcatttataaaaaatttacagcagctgtaaagtttcagtatcgtaaggacaacgtgatcctacaaacagccaaaggatgtagacaagatgtttttctgtcttccaaataacacaaactgaaaagaaaagcctttgcttttccttggccacataaaactagtatttccacactactggttaataaccccaagaaacctttgcttctcttagtcaatttgctcattatggctacaagactacagctcaacatcacaagcccagaaaaaatgctggtaganatccatcctgagcatttcccgaaaacccatcacaacatttccagtgcttncctatttggtccananctatcntaccagtccttggggcaaaatgc

SEQ ID NO: 7774 - DNA, 425 bp, Homo sapiens
  misc_feature (339)..(339): "n" may be a, t, c, g, other or unknown
  misc_feature (347)..(347): "n" may be a, t, c, g, other or unknown
  misc_feature (393)..(393): "n" may be a, t, c, g, other or unknown
  misc_feature (408)..(408): "n" may be a, t, c, g, other or unknown
  misc_feature (418)..(418): "n" may be a, t, c, g, other or unknown
accaagtgtgtatttcaatttactgtatgcaatctaacaaaaatttggtcataatttaccagatatacataaatgatttaagtagtaaaagaaaattcagcttcaagagagtaagttcatatcttgaggaaaagtaaaagtacattaagaatgtaaagccaagtccagtttctatgcaataagtgaactgtagtctaataaagcagatttaggtgatttttagatatatatctttgttctttaatatatatttatatatagacagatctaccaattgtaaactagtttatttaaaggaaggggataaatgggatgaaagaaatctttatactatacttncatattcncaaagaacatttacgtttaaaatacttttccatccatagtatcttnggccactaattcctncaaaaattcnttttacc

SEQ ID NO: 7775 - DNA, 478 bp, Homo sapiens
  misc_feature (258)..(258): "n" may be a, t, c, g, other or unknown
  misc_feature (270)..(270): "n" may be a, t, c, g, other or unknown
  misc_feature (279)..(279): "n" may be a, t, c, g, other or unknown
  misc_feature (359)..(359): "n" may be a, t, c, g, other or unknown
  misc_feature (414)..(414): "n" may be a, t, c, g, other or unknown
  misc_feature (416)..(416): "n" may be a, t, c, g, other or unknown
  misc_feature (447)..(447): "n" may be a, t, c, g, other or unknown
  misc_feature (453)..(453): "n" may be a, t, c, g, other or unknown
  misc_feature (466)..(466): "n" may be a, t, c, g, other or unknown
gatttgataaatgtttaataatttatcaagctcagaaaattttgggacaaagtaccatttaaagataaagcaaataagtacagctaaatattgtagtagtgtataggtgttacactgaagcctgtgtataagcattaactatgtaccaataaatgcaaagaaaataaactttggttatagcttatctaaattaatctcagaatttgacaattaaacatatgaatttgtaataaacattctgcatttttttaaaattcntccatatttgtnacagtggcnaaataatctaaaatcagaacgctttcctgaagtatattattataattccccacccctgacagatgacaattttagaacancccaaatcaattctagtttatgccctaaaaataaaatgttaccagatagacaacncnccataagtataagttaccccttccaaatttnagtaantttattttcccangtgggaaaacca

SEQ ID NO: 7776 - DNA, 546 bp, Homo sapiens
  misc_feature (435)..(435): "n" may be a, t, c, g, other or unknown
  misc_feature (448)..(448): "n" may be a, t, c, g, other or unknown
  misc_feature (514)..(514): "n" may be a, t, c, g, other or unknown
  misc_feature (517)..(517): "n" may be a, t, c, g, other or unknown
  misc_feature (520)..(520): "n" may be a, t, c, g, other or unknown
  misc_feature (538)..(538): "n" may be a, t, c, g, other or unknown
gtacacaaatgttcataacagctttatttataacagccccaaactggaaacaacccaggtgtccatcgagaggtcaatgaacaaatctattcaatgaagcagtactcagcaatgaaaaacataaaaacaaaaactcgtgacacatgctaccacatggatgaatctcaaaataactatactgagtaaaatatgcctgaccaaaaaagggatacatattgtatgattcaatttacatagaattctaggacatgcaaactaataacagggcacaagggcacttgggaatgatgggtccgttcctcacttcagttgtggtgatagttttacgcagggtatacatacgccaacacattgtacacttttgatacgtgcagtttattgggtgtcaagtacacctcctaaaataaaaatattgatgggctctacattctgganacacgggcagtanaactattatttccacttgaaatttttacctaccctttggtaaaaattcttttggaacttttctccncanccncggcaaggaaaacaaaangttttaac

SEQ ID NO: 7777 - DNA, 493 bp, Homo sapiens
  misc_feature (357)..(357): "n" may be a, t, c, g, other or unknown
  misc_feature (397)..(397): "n" may be a, t, c, g, other or unknown
  misc_feature (415)..(415): "n" may be a, t, c, g, other or unknown
  misc_feature (458)..(458): "n" may be a, t, c, g, other or unknown
  misc_feature (465)..(465): "n" may be a, t, c, g, other or unknown
  misc_feature (479)..(479): "n" may be a, t, c, g, other or unknown
aactttagaatttcattttattaaacatacttttaaaacaagcacctcttggcaataaaagcaaaaacaaaaaacaaacaaacaaaaacccaaccaaacaatagtactccttccactctatgctaacggaagacttctcacaccagccagttaaacaatgaaattcttaaacacgcagcctgctggggctgcatgcagagctaaaatgcaggtgtgctgacttcttggagctggagcagaggaaaacatcaaaaagcatatctggaatctatcacagctttctttcttaagcaaataaaaatgcaaattagtttcataaccacaattcaatttatcaaactttttctgaagaatttncatttaattatgttatacataacaggaaataaaacttttncacaaacactctcaaggnttacgattatcaagaaaatgacaaagttaaagcaggaggaatntttgacncatgggggggaagncaattccggttctg

SEQ ID NO: 7778 - DNA, 564 bp, Homo sapiens
  misc_feature (166)..(166): "n" may be a, t, c, g, other or unknown
  misc_feature (462)..(462): "n" may be a, t, c, g, other or unknown
  misc_feature (510)..(510): "n" may be a, t, c, g, other or unknown
  misc_feature (524)..(524): "n" may be a, t, c, g, other or unknown
  misc_feature (553)..(553): "n" may be a, t, c, g, other or unknown
  misc_feature (557)..(557): "n" may be a, t, c, g, other or unknown
  misc_feature (563)..(563): "n" may be a, t, c, g, other or unknown
aatacatgacaccaatggatattttattatagcttcttaattatttaaaaagaataacatttgttagtatacagttattataaacagttaattgtttacattcattatttgtattcaaagaatcctagccgatctgaaggctttcccatactgcttacattcatanagtttctgccaagtgtgagtgcttccatgcatttgaagtcttgaggctgatctgacggctttcccacattgcttacattgatacggtttctccccagtgtgagtcctttcatgatattgaaaagaactggaagaagtgaaagcttttgccacattacttacattcatagggtttccttctggtgtgtctttacatgtctatgaaagcaattaagcaagctgaaatgctttcccacaatccttacattcatacggattctctctcgtatgagtcctttcatgttatatgcaaggaanaaaaataattgaatgcttgtttggcattccttaacattccataggttnctctcccgtgtttntttttggcctgttttcccaaccaatcttngggnaaaatnt

SEQ ID NO: 7779 - DNA, 447 bp, Homo sapiens
  misc_feature (363)..(363): "n" may be a, t, c, g, other or unknown
  misc_feature (365)..(365): "n" may be a, t, c, g, other or unknown
  misc_feature (386)..(386): "n" may be a, t, c, g, other or unknown
  misc_feature (403)..(403): "n" may be a, t, c, g, other or unknown
  misc_feature (415)..(415): "n" may be a, t, c, g, other or unknown
aaaacattaaataattttattcttttctcatttacagtagcccagtggtaagcatgttagaaaacctgaagaaatttaaaagtttttggtttacaaaaagcatgtataaaaatacctgttcagacaaacaaagatctgatcattacattgcccagctttaagaatgccaaaaataactaaaatactgtcaatcaaatgagagggctacatgggtttattaaagtttattttaacaattttagctaagcagaatgtgctaatgtaattcaagttacagttactgccagataacataagagaaaacattgtgtgtggccacttaagattatgcctcaaacagatactgtttcgtgcgcagaacananttggggaacacagctgggttnagtttcaatggtaagcncaataaagatcnagaaaatcccccacttttctaataaccgctat

SEQ ID NO: 7780 - DNA, 548 bp, Homo sapiens
  misc_feature (465)..(465): "n" may be a, t, c, g, other or unknown
  misc_feature (499)..(499): "n" may be a, t, c, g, other or unknown
  misc_feature (523)..(523): "n" may be a, t, c, g, other or unknown
  misc_feature (525)..(525): "n" may be a, t, c, g, other or unknown
  misc_feature (545)..(545): "n" may be a, t, c, g, other or unknown
cccttttaaaaattaaaactctttatttaaacctcttaatagcatcttatcaatttggtggcagcagcagaagcactaccaaagacagatattttgaaaagcatttacaaaaatacattgcacaaagtcctatcttgcatctttaaaaataaattaatattcaaaatatttccaccccaaatcccaaatcagttttatataggaaattttgatttatatatgtaacctgtaatatatgaaacatctgtacattttatctgccttaactgcatagttccaattctaaggagagtgaaaaaaatgctgcttgatgtatgaatagtttcatacatcagtgtatttgaggactgttgtgcaatatacagaaaaccagtcagcaccatcgttttgtctttttctgaaaacacaacatttacggtacactgaaaaactgtcttaacccaacacaacttaaataattcttanggtaaaacatctgttacactttaagtgcctggtnaattctcatttataaagtccggcncngtaaaatatcctaattttanttg

SEQ ID NO: 7781 - DNA, 560 bp, Homo sapiens
  misc_feature (289)..(289): "n" may be a, t, c, g, other or unknown
  misc_feature (439)..(439): "n" may be a, t, c, g, other or unknown
  misc_feature (449)..(449): "n" may be a, t, c, g, other or unknown
  misc_feature (499)..(499): "n" may be a, t, c, g, other or unknown
  misc_feature (509)..(509): "n" may be a, t, c, g, other or unknown
  misc_feature (533)..(533): "n" may be a, t, c, g, other or unknown
  misc_feature (553)..(553): "n" may be a, t, c, g, other or unknown
  misc_feature (559)..(559): "n" may be a, t, c, g, other or unknown
aaggaaaaacacatttaataaatacaacttggaaacgtctttttctttaaattaggttcaaatactgggagacaaacactgaaacaaaagtcttaacaacgcacttacaagccatcataacatgcagtgatcctgcgagacactgtgtccactcacagccatgttaactgggggccactccctgctgccgtaccatcatatgaatatacatttgtcagtaaaaatgtgacaaaaatgtgatgtttttccaggtttgtgtgttttcataaagttactcaggtttttaganaatgaacataggaacatgtaggatccacaatttttaatgtcctcaggttagtttgtatttacaaaactctaagaaaataaatgtgtgttatgtttggaactgctgctttgaatgcaatacatccaaataatgaagctgaacataaccaanacgggaaaanttatccaaactttcccaaaagcctatttgggaataccaccccttggcttnaaaaaaaaanatggaattttttaaccatttccanaattaaaaaaaaaatttatnggaagna

SEQ ID NO: 7782 - DNA, 555 bp, Homo sapiens
  misc_feature (393)..(393): "n" may be a, t, c, g, other or unknown
  misc_feature (405)..(405): "n" may be a, t, c, g, other or unknown
  misc_feature (424)..(424): "n" may be a, t, c, g, other or unknown
  misc_feature (471)..(471): "n" may be a, t, c, g, other or unknown
  misc_feature (495)..(495): "n" may be a, t, c, g, other or unknown
  misc_feature (524)..(524): "n" may be a, t, c, g, other or unknown
  misc_feature (533)..(533): "n" may be a, t, c, g, other or unknown
  misc_feature (549)..(549): "n" may be a, t, c, g, other or unknown
gctaaggtagatttattgttacacatggttagttttcataacataatcccctgccccagagcaactcaggactccatggagcaggaagcctgctcttggtcatagctcataccacagcaggcaggtcacgggggcatgctgtgctgccaagtcctccaaaggaagtcacaaaggtttgcatttgggacatttaaatccacaaaatcaggagaaacaataaatgcacaagggctggtgcatatactttggttacagtgacgccaccacacacggtcacgactgtgcaaaaatgctttcaaatcattaaataaaaaagaactcacacaagctataaaaatgttgccacaaaaagctaaactttcctctaaaaaatattaactgactttgactatnaactaactccanatttgctaaagtacaagtnttgttaccataaattaattatttttgttccataaattacatcctatnaatccttgaaaaaccaactcacanggctcttgaaaaaatgggactgtcctccntcctggganatttaaaggaaattanttttgc

SEQ ID NO: 7783 - DNA, 506 bp, Homo sapiens
  misc_feature (33)..(33): "n" may be a, t, c, g, other or unknown
  misc_feature (262)..(262): "n" may be a, t, c, g, other or unknown
  misc_feature (399)..(399): "n" may be a, t, c, g, other or unknown
  misc_feature (412)..(412): "n" may be a, t, c, g, other or unknown
  misc_feature (415)..(415): "n" may be a, t, c, g, other or unknown
  misc_feature (446)..(446): "n" may be a, t, c, g, other or unknown
  misc_feature (499)..(499): "n" may be a, t, c, g, other or unknown
  misc_feature (504)..(504): "n" may be a, t, c, g, other or unknown
aatgtttcattctgtatttaaatttccttcaanaaagattccttgatccagtagtagggaactctgtttctgtacagttaatgtgtaatttttatccttctggcaatattacaaatactgagtcatttaatcttcattgtttattctccaggggtaattcttgagttatctcacatgatgtaagtaccatctttgcagtatttcatggattccatttgttttgtcatagccagaacatcatgaaatccagtacttaggccanacatatgttgaaagtatgcctccttttccacttgaattgttaaattgtttactccagcatctttaagtattcctgtaacctgctgtactattctttgttctagcacatcaaatgtcacctgtatatgaattgttccngccacaatactancanaatgaccccaaaatgaaggtctcggtatganattaaccctccaattttccgtttctttccaaagcaaatgttatccttttccanatccngg

SEQ ID NO: 7784 - DNA, 279 bp, Homo sapiens
  misc_feature (54)..(54): "n" may be a, t, c, g, other or unknown
  misc_feature (105)..(105): "n" may be a, t, c, g, other or unknown
  misc_feature (183)..(183): "n" may be a, t, c, g, other or unknown
  misc_feature (215)..(215): "n" may be a, t, c, g, other or unknown
  misc_feature (221)..(221): "n" may be a, t, c, g, other or unknown
  misc_feature (249)..(249): "n" may be a, t, c, g, other or unknown
  misc_feature (271)..(271): "n" may be a, t, c, g, other or unknown
ggcttgtttgatgcttttaatatcattatttgtgttacacgatacacaaccaangatgatggtcaatactgcaatgaaaatgttaaaaaaaatattatacacggntcatgtcttccacacaccttcctgggaaataaattagtgagcacggagaaactgggctgggtggcggccacagctganagaggagggagtgttaaggcagtatctacaangggaanggtggcaggagggcaagctaaggcctanattcttccctccaacctcccanacagggaa

SEQ ID NO: 7785 - DNA, 244 bp, Homo sapiens
  misc_feature (11)..(11): "n" may be a, t, c, g, other or unknown
  misc_feature (26)..(26): "n" may be a, t, c, g, other or unknown
  misc_feature (79)..(79): "n" may be a, t, c, g, other or unknown
  misc_feature (103)..(103): "n" may be a, t, c, g, other or unknown
  misc_feature (119)..(119): "n" may be a, t, c, g, other or unknown
  misc_feature (122)..(122): "n" may be a, t, c, g, other or unknown
  misc_feature (174)..(174): "n" may be a, t, c, g, other or unknown
  misc_feature (191)..(191): "n" may be a, t, c, g, other or unknown
  misc_feature (207)..(207): "n" may be a, t, c, g, other or unknown
  misc_feature (229)..(229): "n" may be a, t, c, g, other or unknown
  misc_feature (241)..(241): "n" may be a, t, c, g, other or unknown
catgattgttntaaagtttgattgtnaactttgctgttggatacaaaatgaaggcatacaactgtcacaggcagggcantaagtacaaagtctaagctgtaanaaccgtttgaaaatanaanctcgtttttggaatacatgtgtcaaaggctgcccatgttaatacctttgggnataaaacggtaacgatnccctgtgacaaacccntccatcacctgacgcacattcncatctcctggtnact

SEQ ID NO: 7786 - DNA, 556 bp, Homo sapiens
  misc_feature (151)..(151): "n" may be a, t, c, g, other or unknown
  misc_feature (204)..(204): "n" may be a, t, c, g, other or unknown
  misc_feature (269)..(269): "n" may be a, t, c, g, other or unknown
  misc_feature (415)..(415): "n" may be a, t, c, g, other or unknown
  misc_feature (417)..(417): "n" may be a, t, c, g, other or unknown
  misc_feature (507)..(507): "n" may be a, t, c, g, other or unknown
  misc_feature (514)..(515): "n" may be a, t, c, g, other or unknown
  misc_feature (540)..(540): "n" may be a, t, c, g, other or unknown
  misc_feature (553)..(553): "n" may be a, t, c, g, other or unknown
agttatacaggttttaattccagacaacagaatagtggctattaacaataaaatcagtaagtattctggacatgtttaacttgaatattcaggtaggggattttattggaaataaggatctagagctagtggaagaagttatatttaggantcatccacaaagaggcttgagaaacaaatgaaaatgtattgagaagtgcatanagaacaatgttaagggggctgtggggaaaaaacaacatttggaagataactgaaggaaatcatanaggaaaaatagtacaatctaatttctctccctaactgaaagcaaaaccacttttaatactaagaatttattatgatctctccatgatactaccattttttcaatcccaacaatcatcatcacatcccagagccatctcatgacaanancttctaaatattaattgcctgaacactgaagaaaattatttctgatctaaggtgttacttattctctttattaaaaaaaagggggccagncccggtnntcctgcctgttttcccacccttttnggaagccaagttngtt

SEQ ID NO: 7787 - DNA, 540 bp, Homo sapiens
  misc_feature (128)..(128): "n" may be a, t, c, g, other or unknown
  misc_feature (350)..(350): "n" may be a, t, c, g, other or unknown
  misc_feature (471)..(471): "n" may be a, t, c, g, other or unknown
  misc_feature (496)..(497): "n" may be a, t, c, g, other or unknown
  misc_feature (513)..(513): "n" may be a, t, c, g, other or unknown
  misc_feature (534)..(534): "n" may be a, t, c, g, other or unknown
ccacactttttggtttactcctacttgagttaagaacactaacaataaaatttgcatgcaatgaatatggttctctaaatacaacagatgaattattttacatacacatcttatttttatttatgganaatcggttaataaacacattttaaattcaatatattatgtatttatgagcgggaagcaaccttaaacattttaaactccagaaatatacaaaacaattataagtgaaataatacaaagtcccttgtgttttgatcctggagtcaaaccatagaaatctcaggttattaagagaactttgaaaaatattgtttagaatattaaaaatcatgtgtttgggggangggagggaattaacagcctttctttgccttaaaatactttacgttttatgaaattgcaattggaatgaagcagctcctaaagtagtcagtgttcagaggaagagaaaattgagcacaaganccaactaccattttactcagtccanncaatgcttaactgaanaactcacttaaaaaactgttnaaggtc

SEQ ID NO: 7788 - DNA, 450 bp, Homo sapiens
  misc_feature (101)..(101): "n" may be a, t, c, g, other or unknown
  misc_feature (203)..(203): "n" may be a, t, c, g, other or unknown
  misc_feature (260)..(260): "n" may be a, t, c, g, other or unknown
  misc_feature (374)..(374): "n" may be a, t, c, g, other or unknown
  misc_feature (381)..(381): "n" may be a, t, c, g, other or unknown
  misc_feature (386)..(386): "n" may be a, t, c, g, other or unknown
  misc_feature (426)..(426): "n" may be a, t, c, g, other or unknown
  misc_feature (437)..(437): "n" may be a, t, c, g, other or unknown
acaaaaacctctttgagtcctttattaacgtctggagatgtgtggtacatacaattaacagcatcacaccagctacagaagtacagataaccaagaatgtncttcagaacaaggatctgagagcaacttatggtgttgcctgctctgaacctccacaaaaacccagttctgacacacgcaagacagacgatataacaatttcncttgggaatggttttttttaaaaaatgacaagaactaatagttcaaaccctttagantgtgagatgtggcagctcgcttggtgccgtggcactgctggtaaaaagccaacatgggcatttgaaggtcaggcacaaagaaccaatggggtggggtggaaaaagttttatttncactgtncaaanatacagatggtccgagtggatacttccgtccaggctcatntggggctgcangaatcccctaaat

SEQ ID NO: 7789 - DNA, 533 bp, Homo sapiens
  misc_feature (31)..(31): "n" may be a, t, c, g, other or unknown
  misc_feature (37)..(37): "n" may be a, t, c, g, other or unknown
  misc_feature (103)..(103): "n" may be a, t, c, g, other or unknown
  misc_feature (140)..(140): "n" may be a, t, c, g, other or unknown
  misc_feature (507)..(507): "n" may be a, t, c, g, other or unknown
  misc_feature (513)..(513): "n" may be a, t, c, g, other or unknown
  misc_feature (516)..(516): "n" may be a, t, c, g, other or unknown
attatataaacttaaccttttaatactgttnattttnagcccattgtttaaaaaataaaagttaaaaaaatttaactgcttaaaagtaaagttttgccattgnttggagaaacttttttttccttctctgcgctgccagntgtaacacttcttctggattgctggcattcaactctgtctggccgatggatttgattgcaatttgtcttttatctgttactcctcttttatgatgaagataagtcaagtattccaaaatggtaacatcccatatgtagtcgtagtaggagtccatagcatcatgactgttttgttcttgcaaagatttaaacgctgttttgtagtcaatttctctgaggaactgacataaaatagccacctgtgtgtggcaattcagcaaagaacaacatgttatcattcgtattattacctggtctgtataaacatcaaggggcacagccttgttaaagaagtcagaacacacagctcctggctggaagtaatatnaaaaantgntgaatactgaatccttg

SEQ ID NO: 7790 - DNA, 486 bp, Homo sapiens
  misc_feature (209)..(209): "n" may be a, t, c, g, other or unknown
  misc_feature (227)..(227): "n" may be a, t, c, g, other or unknown
  misc_feature (229)..(229): "n" may be a, t, c, g, other or unknown
  misc_feature (276)..(276): "n" may be a, t, c, g, other or unknown
  misc_feature (334)..(334): "n" may be a, t, c, g, other or unknown
  misc_feature (416)..(416): "n" may be a, t, c, g, other or unknown
  misc_feature (419)..(419): "n" may be a, t, c, g, other or unknown
  misc_feature (422)..(422): "n" may be a, t, c, g, other or unknown
  misc_feature (426)..(426): "n" may be a, t, c, g, other or unknown
  misc_feature (473)..(473): "n" may be a, t, c, g, other or unknown
cagtttactaaatcaacatcttatatttctatactaaacactagccactacttgaggtttattactgttgtgattatgtttataaaacagggacatcttgcatacccctaatggtgtgaataaaatcaactgtgtcagtacctttgagcacttcataacttaaaattctaaaaaattgagatttggacctacagtttgctatttaacanaccaagtctggtcttganantaaaaccccatcaaaaactggattaaaaaacctcatccaggcagctngctgtgacaaaacttaaatcctgtcgtacgttgcctgggattccctcaaggtcttttncatttctccgaggaaataatgacttgcttcagtcccgctctgtgtgccgccagcactttgtctttaattcccccactggaanaanaanaacnctcagtgttatttctccagtcatgggtacatctgaacgttccacccncccctaaaaattg

SEQ ID NO: 7791 - DNA, 498 bp, Homo sapiens
  misc_feature (102)..(102): "n" may be a, t, c, g, other or unknown
  misc_feature (472)..(472): "n" may be a, t, c, g, other or unknown
  misc_feature (478)..(478): "n" may be a, t, c, g, other or unknown
  misc_feature (486)..(486): "n" may be a, t, c, g, other or unknown
  misc_feature (488)..(488): "n" may be a, t, c, g, other or unknown
  misc_feature (496)..(496): "n" may be a, t, c, g, other or unknown
gaatcgttgcgattaactttattaatattttaaaatatgaaaactgtaaaacatagtatttatgtaaacacctgaggactgttcaagtgggtacagcatctncatacaaacaacttgaaagaagaccaagtttaagtaagaatcttatgacatgtaaggaataacataaatgaagctattctttaaatagttgcattcatgtctaaagtacatttggttttctaaaaagaaaatgtacattcttgcccctggtgaatattttattggcatttacaacaaatggctaatacttttataactgattctcatagcttataaacattacatcaaagttacacaaagtaataacaataaacatatagcaccatttcctcttcaaagttctaacttataaaataaagccccaaacatggctggggcatggggggctcatgcctgtaatcccagcattttgcaagggccaaggtggggnggatcncctgaagncnagaatttnga

SEQ ID NO: 7792 - DNA, 475 bp, Homo sapiens
  misc_feature (31)..(31): "n" may be a, t, c, g, other or unknown
  misc_feature (66)..(66): "n" may be a, t, c, g, other or unknown
  misc_feature (78)..(78): "n" may be a, t, c, g, other or unknown
  misc_feature (166)..(166): "n" may be a, t, c, g, other or unknown
  misc_feature (247)..(247): "n" may be a, t, c, g, other or unknown
  misc_feature (409)..(409): "n" may be a, t, c, g, other or unknown
  misc_feature (419)..(419): "n" may be a, t, c, g, other or unknown
  misc_feature (449)..(449): "n" may be a, t, c, g, other or unknown
  misc_feature (464)..(464): "n" may be a, t, c, g, other or unknown
  misc_feature (474)..(474): "n" may be a, t, c, g, other or unknown
gttttttaagaaaaaccaatcgctttatttntcctcaatatatgtttagaaaactggtctgagaanaggtttcatganatagaccagaggactatgtacaaaatcaagagttctaaaccaataataaaaagggcacaatgaagcacacatccccaggggccacggnagcctaggaccttcctatcagtggggaggcaaggtctttgacggcttttgagttcagctgagggatcatgctgatcttcangagtttgctgcttgcatacttattcttgatggcgatgaatttagttaagttttcatttactttcaccacattcttggccatgtgctgcatgacttccaatacttcattctctgtgtatcctgtgtaatactgctgctttaagttccattttccttgtcctanaacttctganacaagcaggaagcagctgctgctacctttnaaggatgataatgcnccatatcatnt

SEQ ID NO: 7793 - DNA, 510 bp, Homo sapiens
  misc_feature (164)..(164): "n" may be a, t, c, g, other or unknown
  misc_feature (271)..(271): "n" may be a, t, c, g, other or unknown
  misc_feature (273)..(273): "n" may be a, t, c, g, other or unknown
  misc_feature (417)..(417): "n" may be a, t, c, g, other or unknown
  misc_feature (448)..(448): "n" may be a, t, c, g, other or unknown
  misc_feature (471)..(471): "n" may be a, t, c, g, other or unknown
  misc_feature (486)..(486): "n" may be a, t, c, g, other or unknown
  misc_feature (507)..(507): "n" may be a, t, c, g, other or unknown
gagtggagccttgctctgtcgccaggctggagtgcagtggtggaacttggctcactgcaatctccgcctcctgggtttaagcgattcccctgcctcagcctccagagtagctgggactacaggtgtgcgccaccatgcccagctaattttttgtattttagtanagacggggtttcaccatgttggccaggagggtctcaatctcctgccctcatgatctgcccgccttggcctcccaaagccccctttttaatttttttttgtagagacnangtctcgctatgttgcccaggctagtctcgaactcctgggctgcagcgatccttctgcctgggcctcccaaagtgctgggattaccagtgaacctccatacccagcccaaatatgcattcttggaattatctgcaattgcccaanaatgtacaagcaactcctgagaataaaccanaaaagataagaaactccatgaanaaaatgggcaatgcncaggaaaggaaaccaaaaagntaa

SEQ ID NO: 7794 - DNA, 512 bp, Homo sapiens
  misc_feature (276)..(276): "n" may be a, t, c, g, other or unknown
  misc_feature (448)..(448): "n" may be a, t, c, g, other or unknown
  misc_feature (467)..(467): "n" may be a, t, c, g, other or unknown
  misc_feature (486)..(486): "n" may be a, t, c, g, other or unknown
  misc_feature (491)..(491): "n" may be a, t, c, g, other or unknown
  misc_feature (503)..(503): "n" may be a, t, c, g, other or unknown
gtttaaaaaaatattttaataagcatattcagaatggcagacaagggaatgggagaagggaattattttacagtgcaaaattactatgcataaatttaacatctaatttgaaattttaaatgcctatttaaatattacttcaaatacattttaaagctcaacaaacttgtgttgaactgaattgcagatcctgaactctatttgaaaatacatcatgaaacagaaaatacccattccaaatgaaaatgatagtgctttgttgggggtgggaatgangcggggagactaaatcactattaacagacttcttttcccaatgcaatttgtcaaaagttccaaagttctgaaatgtactaaatcttaagcaaattaaattcatgatattactaaaactttttaaatagtgcaatgacttatcaagttatagtggctgcttaagaacaaattnttgtgttgaaatacctgcntaaaccacaaaattccttnaaatnttcctttacaanaagctgaac

SEQ ID NO: 7795 - DNA, 537 bp, Homo sapiens
  misc_feature (142)..(142): "n" may be a, t, c, g, other or unknown
  misc_feature (304)..(304): "n" may be a, t, c, g, other or unknown
  misc_feature (383)..(383): "n" may be a, t, c, g, other or unknown
  misc_feature (472)..(472): "n" may be a, t, c, g, other or unknown
  misc_feature (476)..(476): "n" may be a, t, c, g, other or unknown
  misc_feature (501)..(501): "n" may be a, t, c, g, other or unknown
  misc_feature (504)..(504): "n" may be a, t, c, g, other or unknown
  misc_feature (536)..(536): "n" may be a, t, c, g, other or unknown
ctggtttaaatagtatctatactgataacaatagcaacaatcaataacaaagtattaagctttgacaacactatgtatgttattgtattaaatcctcctgtcacccgccttgagctgggtgttctctcttttgatagctganaaagctgaggctgagggcgatgaaattcacatggccagtgggagccaggatggactcagggtgcccatgagaccatgccgtcattcaggctacactgttctgaactcacgtgaccaagatgtgacagaggctggattccacgtccctggcacactccaaganggattcaaggttaaaatacaacttgatactttaaatggagaaactccccacagtatgtttggtaccatctgaattcaangtcacattttccagtcttgccctggttttgaaatctattggtttatttcaatacatcacccctgtggaaaaaacttgtctcaccaaatntacnttttcctggcccgttttcctgggcnccncttccaggttaactttggaaaaccctgaaggnt

SEQ ID NO: 7796 - DNA, 579 bp, Homo sapiens
  misc_feature (203)..(203): "n" may be a, t, c, g, other or unknown
  misc_feature (481)..(481): "n" may be a, t, c, g, other or unknown
  misc_feature (523)..(523): "n" may be a, t, c, g, other or unknown
  misc_feature (525)..(525): "n" may be a, t, c, g, other or unknown
  misc_feature (542)..(542): "n" may be a, t, c, g, other or unknown
  misc_feature (570)..(570): "n" may be a, t, c, g, other or unknown
agtagaagattcttttattttaaaaaaaattacacgtggttctacaataatttttccttttaaaaagcttcaagatatacagggagatgcactagtccaagaaatccagcttgtcctttaacaaattatacagtttaactttcttcacatattgccacaatagttaattcacagtataatcttatttgtatttggaaaagaanaaataaatatacaataattgaaataggttcaagaatcaagctcgatttgtttccaagacttggaagaacttcttttgtactgttccagttccagatccttctgaattctcatctcatcgacttcattttcagcatactgaggatctctcgcagggtccttgatatctttcagcgtgttaatactctttggtggaaagagcttttcatacacttttttccacaactccataggtgagtgggcatgaactttccaatgtcattttcaggaacaggaaganatcctatttgaccgaaagaatccatcccgctgtgataaacancngtttttccgatcccccntttgaattgcttttggtcatgccaatgncacttggtg

SEQ ID NO: 7797 - DNA, 575 bp, Homo sapiens
  misc_feature (29)..(29): "n" may be a, t, c, g, other or unknown
  misc_feature (56)..(56): "n" may be a, t, c, g, other or unknown
  misc_feature (115)..(115): "n" may be a, t, c, g, other or unknown
  misc_feature (271)..(271): "n" may be a, t, c, g, other or unknown
  misc_feature (340)..(340): "n" may be a, t, c, g, other or unknown
  misc_feature (373)..(373): "n" may be a, t, c, g, other or unknown
  misc_feature (407)..(407): "n" may be a, t, c, g, other or unknown
  misc_feature (414)..(414): "n" may be a, t, c, g, other or unknown
  misc_feature (425)..(425): "n" may be a, t, c, g, other or unknown
  misc_feature (514)..(514): "n" may be a, t, c, g, other or unknown
  misc_feature (530)..(530): "n" may be a, t, c, g, other or unknown
  misc_feature (553)..(553): "n" may be a, t, c, g, other or unknown
  misc_feature (566)..(566): "n" may be a, t, c, g, other or unknown
  misc_feature (574)..(574): "n" may be a, t, c, g, other or unknown
cagatctgtaagtttatttgctcaatgtncgacagctacataatgactcacattcntgatattccatcactgaggaaactgctaaagatggtccgtgtgtgaaataattccttanagaaacacggagctggaaaaataatcactgattagaccttaaaaatagttcactgcataacatgacaaaaagcacaaaggctcattcagagaacatatttgttgttctccaacactgtaatagttataatttcaccatgacaaacaccagacattnagattaagctaacactggtgtttcttttgctcccccccttttaaaaacaaaatatataactgcatgtcnctatagcaacatccaaaacagatcaatttgttncaatcactatttggtagagcaaactttacccccnaaagganaaattaaattnaaaaaaaaaaacctttaaaaaattgaaaacttaatttttttttgtcctaggaataccttacccctccggtttaatttatccatttccancccctgttttaaaatncccccttgcctggcccattttgnttcccttaaattntgggggant

SEQ ID NO: 7798 - DNA, 516 bp, Homo sapiens
  misc_feature (386)..(386): "n" may be a, t, c, g, other or unknown
  misc_feature (450)..(450): "n" may be a, t, c, g, other or unknown
  misc_feature (479)..(479): "n" may be a, t, c, g, other or unknown
  misc_feature (481)..(481): "n" may be a, t, c, g, other or unknown
  misc_feature (484)..(484): "n" may be a, t, c, g, other or unknown
  misc_feature (512)..(512): "n" may be a, t, c, g, other or unknown
agatgctgcataatagtttattaacaaagctcaaagtttacagaaataacattaaatgcaacactttttgattattaacacatgtacaattttacactgcaaaacaattgcaactaaaagtttaggaggtaaagaattagcacacttggaagtctgtatacatttaatacaaatttgcaagatatcagaatgatctctcctgaaaattcaactttccttgtgtatatatatgcaaagagatacctatattttaaaaaagagagctacctgtatgtcatgcatcccatccaaaacatgtcacaatattttatatatattacatagtatttacaacaaagccccttccatagtatttacaataaagctccttccaaaatcaccaagangcttctttccagaatagcaagtgctttcaagttactgtaccaagtattctcactaatacagtantgtatctaaatgggggaaggtggggggantncantgcctaatattagttactgaatttccanatta

SEQ ID NO: 7799 - DNA, 257 bp, Homo sapiens
  misc_feature (125)..(125): "n" may be a, t, c, g, other or unknown
  misc_feature (240)..(240): "n" may be a, t, c, g, other or unknown
  misc_feature (246)..(247): "n" may be a, t, c, g, other or unknown
  misc_feature (250)..(250): "n" may be a, t, c, g, other or unknown
  misc_feature (254)..(254): "n" may be a, t, c, g, other or unknown
attttgccttttgtaacattgttttatctggttttccatatcaaaagtctgtaaactttgcattaacactataatctacaatagtagctttataagcatttgaaatagaatgaaatagtaattcnagtctgatattactgggttgttccacacatagttaaataagatcgatccttccaaaaatctaagggtaggctagttgtggtgattcatgcctgtaatcccagcactttgggaagnccaagnnggntgantcc

SEQ ID NO: 7800 - DNA, 601 bp, Homo sapiens
  misc_feature (179)..(179): "n" may be a, t, c, g, other or unknown
  misc_feature (216)..(216): "n" may be a, t, c, g, other or unknown
  misc_feature (240)..(240): "n" may be a, t, c, g, other or unknown
  misc_feature (341)..(341): "n" may be a, t, c, g, other or unknown
  misc_feature (349)..(349): "n" may be a, t, c, g, other or unknown
  misc_feature (443)..(443): "n" may be a, t, c, g, other or unknown
  misc_feature (460)..(460): "n" may be a, t, c, g, other or unknown
  misc_feature (470)..(470): "n" may be a, t, c, g, other or unknown
  misc_feature (481)..(481): "n" may be a, t, c, g, other or unknown
  misc_feature (508)..(508): "n" may be a, t, c, g, other or unknown
  misc_feature (565)..(565): "n" may be a, t, c, g, other or unknown
  misc_feature (569)..(569): "n" may be a, t, c, g, other or unknown
  misc_feature (601)..(601): "n" may be a, t, c, g, other or unknown
ctgaaagtgtctgatttattttcaaaataaattatatcttgattcctttcaggttcatgtggcaccggtcaggctgcctcaaatgctatcacgattcaaggtttggggtgagtttccatgatcagtgtcctcgtccagcattagagaattgtgcctcctccatctagaggtctgcaganccacacagtctgcaggacaagcagggacactgcccangtctccccgggccacctactccanggctggtctgaaaaaacctgaagggcaagggcttccgtccctctgggctgaaaatctaagggtgcagtgctggtttgcttcctgggctccaaccccggaantaggtgangctcgttaagaatcgcctcctgagcgtctcttctgaacttgcttgctgccatcttcccaccaccccatcccgcttggcctgggaacgggaagantccattgtggccttggncggctccccncaatgctaagncctcaactggtgttcgttctgttaatnaaacccttgcctgctgtctcccactctccgtgctccccaagggcaaggtccttctgncccncttcttttcccatgcattcatgggccaaaacn

SEQ ID NO: 7801 - DNA, 252 bp, Homo sapiens
  misc_feature (167)..(167): "n" may be a, t, c, g, other or unknown
  misc_feature (172)..(172): "n" may be a, t, c, g, other or unknown
  misc_feature (226)..(226): "n" may be a, t, c, g, other or unknown
  misc_feature (231)..(231): "n" may be a, t, c, g, other or unknown
  misc_feature (243)..(243): "n" may be a, t, c, g, other or unknown
gacggagtttggctctgtcactccagctggagtgcagtggcgtgatcttggctcactacaagttccgactgcctggttcaagcgattctcctgcctcagcctcccaggtagctggaactacaggcacgcaccaccacgcccagctaatttttgtatttttagtaaanatgangtttcaccatgttggccaggatggtctccatctcctgaactcatgatccacccntcccnggccccccaaantttgggaat

SEQ ID NO: 7802 - DNA, 556 bp, Homo sapiens
  misc_feature (458)..(458): "n" may be a, t, c, g, other or unknown
  misc_feature (491)..(491): "n" may be a, t, c, g, other or unknown
  misc_feature (503)..(503): "n" may be a, t, c, g, other or unknown
  misc_feature (530)..(530): "n" may be a, t, c, g, other or unknown
  misc_feature (534)..(534): "n" may be a, t, c, g, other or unknown
ccttctcctcttttttggtcaatagctggcaacaatgtgaacaatgcattaaagtactttttaaaacaatgcaatttactcggaaattctaatatctccacttttctttgagaataatcaactttgaaataagatccatcataaatgttagcctattagagaaaagatgctgtaaataatcagttttacctcaaaatcatgctcaatatttttttttcctgaaagaaaattgcccaattttgcttgacttgaaataattaaattaggagaaaaccaagggtctattagtatatatcttatcttttatgaaatgacttaataaaaataatgtatacgttaaaaacaacaaccgaaaatactctacatataataagagaacactaggaagaaaaaaataccacgtgtactttattttagagtaatgaactttaaagctaaaaaagccatagaatatcctnctatgttaaccccaaatgttggtcttgtcctangtctcccaccancgaaatacttgcgataaaattttagtncccntggggtaacctttcccgttttt

SEQ ID NO: 7803 - DNA, 237 bp, Homo sapiens
  misc_feature (2)..(4): "n" may be a, t, c, g, other or unknown
  misc_feature (106)..(106): "n" may be a, t, c, g, other or unknown
  misc_feature (119)..(119): "n" may be a, t, c, g, other or unknown
  misc_feature (219)..(219): "n" may be a, t, c, g, other or unknown
  misc_feature (226)..(226): "n" may be a, t, c, g, other or unknown
  misc_feature (231)..(231): "n" may be a, t, c, g, other or unknown
  misc_feature (236)..(237): "n" may be a, t, c, g, other or unknown
gnnnattttttaaaccatcatttactttttctttacttttttttgcaaagatagttgtgctgccaagcaacttgaggtaaaggcattaaaagggttagactacaanaaatgaaaacaanacaattgcgatacttcctataggagacgcacaaaaagcagttggctggtttcatattgcataatgatgctgtgttccttgatgaaataaacaatcttccntgtgttnacatnaggann

SEQ ID NO: 7804 - DNA, 548 bp, Homo sapiens
  misc_feature (6)..(6): "n" may be a, t, c, g, other or unknown
  misc_feature (79)..(79): "n" may be a, t, c, g, other or unknown
  misc_feature (103)..(103): "n" may be a, t, c, g, other or unknown
  misc_feature (189)..(189): "n" may be a, t, c, g, other or unknown
  misc_feature (381)..(381): "n" may be a, t, c, g, other or unknown
  misc_feature (395)..(395): "n" may be a, t, c, g, other or unknown
  misc_feature (473)..(473): "n" may be a, t, c, g, other or unknown
  misc_feature (488)..(488): "n" may be a, t, c, g, other or unknown
  misc_feature (502)..(502): "n" may be a, t, c, g, other or unknown
  misc_feature (505)..(505): "n" may be a, t, c, g, other or unknown
  misc_feature (546)..(546): "n" may be a, t, c, g, other or unknown
aatttnaatacatttatttttgtgtgattcttaataaaacactttcaaaacattctgtacatttcaagccactcagaancgcattacatttctacaaatgtgntttgttgggatgaggtgccaagatgtctctgtacaaagatgtacaatatgtacaatcactgtaagtgcaagctgtgcaaagcagantctagaacactaattcatgccaaggcttacaaaaacatttcaacacataagactaaagcttgaaacagcgttgtggttttttccctgggcaaatgattattttataaacaagtatatgtatatgtcatacagaaagaaaaattggactcctcagctcagtcagtaccatgcagctgactggatacattacanggctgctctcctangcctctttcttcaaggcgccattttgccacactcaacagttgtctcatcactgagtggctgccactgctgcctttggntgaaccacagcaacnctaggaaacttaanttncgggaaataaaggcaaattggtttcccatgccgcaacttgntg

SEQ ID NO: 7805 - DNA, 335 bp, Homo sapiens
  misc_feature (6)..(6): "n" may be a, t, c, g, other or unknown
  misc_feature (84)..(84): "n" may be a, t, c, g, other or unknown
  misc_feature (121)..(121): "n" may be a, t, c, g, other or unknown
  misc_feature (145)..(145): "n" may be a, t, c, g, other or unknown
  misc_feature (201)..(201): "n" may be a, t, c, g, other or unknown
  misc_feature (205)..(205): "n" may be a, t, c, g, other or unknown
  misc_feature (240)..(240): "n" may be a, t, c, g, other or unknown
  misc_feature (246)..(246): "n" may be a, t, c, g, other or unknown
  misc_feature (318)..(318): "n" may be a, t, c, g, other or unknown
  misc_feature (320)..(320): "n" may be a, t, c, g, other or unknown
  misc_feature (325)..(325): "n" may be a, t, c, g, other or unknown
catttnttaaaattttattactgtttaccaatggggagatgcagtttatttacaccagcagccataggggaaaggggaatacanttaatcagctatctgtataggatggactacttatgcnaaaataaaaatctccaaaacaaangacagtggtgagcttcactaccctcccccgatgatcccagcatgcgataatgccangcantggtccctgggcatgcgatggtgggaactaatgtntggaanaaaaagccacaaaccacagaaattttaaagaaccccccccttcccccataacacacacattccacacacacncnctccnattctttata

SEQ ID NO: 7806 - DNA, 108 bp, Homo sapiens
  misc_feature (95)..(95): "n" may be a, t, c, g, other or unknown
  misc_feature (97)..(97): "n" may be a, t, c, g, other or unknown
  misc_feature (99)..(99): "n" may be a, t, c, g, other or unknown
cctggaactgcatccattgaacatttatttgtcaaaggcctggtctgtgccaggcagcatgtggaggcactgaatggggggtggagggggttgtncngngggaatcaa

SEQ ID NO: 7807 - DNA, 312 bp, Homo sapiens
  misc_feature (119)..(119): "n" may be a, t, c, g, other or unknown
  misc_feature (179)..(179): "n" may be a, t, c, g, other or unknown
  misc_feature (226)..(226): "n" may be a, t, c, g, other or unknown
  misc_feature (253)..(253): "n" may be a, t, c, g, other or unknown
  misc_feature (292)..(292): "n" may be a, t, c, g, other or unknown
gggccttccaatattatgaggttattttgaggatccagggaggtaacggatgtgaaaaacgtgtggtgaactgtaaataatgactatcacatttagttctcccacaatccagtgaggantaatcacttactcgaggtcacccagcgctggcaactgctggagctgggatttgaacccanctagcagtgtccatgctacaaaaatggggccagccttggcacaggangttgattgctgcagccagtgtttctanaattccaaatatgaagtggtctcatgttctccttgggangaagcccttggcttccccaa

SEQ ID NO: 7808 - DNA, 478 bp, Homo sapiens
  misc_feature (139)..(139): "n" may be a, t, c, g, other or unknown
  misc_feature (156)..(156): "n" may be a, t, c, g, other or unknown
  misc_feature (250)..(250): "n" may be a, t, c, g, other or unknown
  misc_feature (255)..(255): "n" may be a, t, c, g, other or unknown
  misc_feature (390)..(390): "n" may be a, t, c, g, other or unknown
  misc_feature (402)..(402): "n" may be a, t, c, g, other or unknown
  misc_feature (405)..(405): "n" may be a, t, c, g, other or unknown
  misc_feature (440)..(440): "n" may be a, t, c, g, other or unknown
  misc_feature (447)..(447): "n" may be a, t, c, g, other or unknown
gatcaataaatcaatttatttaaaagaatatgttacaattaattacactaagtgacattaccaaacaattttagagtggttagctctagaacaaggaatgaaagaaacaatgttagccattattgtgtctgtgtatttnctcttcacatttcttanatcacaaataaaaaaatacaagatactgcagtgaaaatacaattagagtttctctgaaataaattaaatgtgcatggcctgggaaaaactgaancccanctcactggcttaaaagggggtcatgatataaaattaatgtccaagtttagcaggcggccaagtgcccccaccccgtatcactcccctctttgattctattccttaccacagccctgaccttcccacataccctanattattgctgangantgagctgatgctgtcctggcaacaaaaaagcctgncgtgatntgctcaggtttaggggaacaggaattcaaaa

SEQ ID NO: 7809 - DNA, 269 bp, Homo sapiens
  misc_feature (72)..(72): "n" may be a, t, c, g, other or unknown
  misc_feature (113)..(113): "n" may be a, t, c, g, other or unknown
  misc_feature (216)..(216): "n" may be a, t, c, g, other or unknown
  misc_feature (242)..(242): "n" may be a, t, c, g, other or unknown
  misc_feature (248)..(248): "n" may be a, t, c, g, other or unknown
  misc_feature (261)..(261): "n" may be a, t, c, g, other or unknown
  misc_feature (267)..(267): "n" may be a, t, c, g, other or unknown
ccagtgctattatatatttcaaacattacttgtttgcataataaccaaacactgagacagcaggcatcagantgccatgaagtacaacacaactcccacttccatgcttgaanagctttgtgagagctgtgcctgttgaggcaggggacgtgtactgtggactccaggaatgacacaatgttagccggcagacacctcaaagttcctctgatcccnacaaactgggaaatggggtgggtgantggaangagctttctcaanatcacnca

SEQ ID NO: 7810 - DNA, 562 bp, Homo sapiens
  misc_feature (87)..(87): "n" may be a, t, c, g, other or unknown
  misc_feature (358)..(358): "n" may be a, t, c, g, other or unknown
  misc_feature (364)..(364): "n" may be a, t, c, g, other or unknown
  misc_feature (374)..(374): "n" may be a, t, c, g, other or unknown
  misc_feature (414)..(414): "n" may be a, t, c, g, other or unknown
  misc_feature (422)..(422): "n" may be a, t, c, g, other or unknown
  misc_feature (508)..(508): "n" may be a, t, c, g, other or unknown
  misc_feature (511)..(511): "n" may be a, t, c, g, other or unknown
  misc_feature (543)..(543): "n" may be a, t, c, g, other or unknown
  misc_feature (552)..(552): "n" may be a, t, c, g, other or unknown
  misc_feature (559)..(559): "n" may be a, t, c, g, other or unknown
cacagtggacaggaaaattttactactgaatactggaaaataaatcaaggatacctcttaatatcttgatctccttaagctggcaanactggaatacaagttttaatgaatagcagcacaaaatcacttgcaactcttacattctggcattgggtaccacataagtaaagttcatcattttgatggtcaaaggagcctcgattctattcctctttcaaagctgaacccaatggactcctgtgggaaatagtattgtctctcgttcggtcatgcttaatgtaaacaactccatagcacaaaaagatgcaatgggcacctaaacaaatcctagtgggtacagaacacacacacacacacncacacncacacacacncacgcacacacacaacaagtttgttggtggcatgaaaaanatgccacncatgaaaaaaaaatgctacacttgggtcaaaaatgaattttaaccaactgcttggtaatctacaattccattctttgaaaatttancanctttttttgaaatttgttgcaaaagcaaggtnatcttcctnttaaatnttc

SEQ ID NO: 7811 - DNA, 533 bp, Homo sapiens
  misc_feature (64)..(64): "n" may be a, t, c, g, other or unknown
  misc_feature (363)..(363): "n" may be a, t, c, g, other or unknown
  misc_feature (440)..(440): "n" may be a, t, c, g, other or unknown
  misc_feature (443)..(443): "n" may be a, t, c, g, other or unknown
  misc_feature (459)..(459): "n" may be a, t, c, g, other or unknown
  misc_feature (496)..(496): "n" may be a, t, c, g, other or unknown
  misc_feature (511)..(511): "n" may be a, t, c, g, other or unknown
aactattcaaaaacatgtatttatttagaacaatagaaatacgtgttctcagactgtcctctanagtttttgagactattagttcaagagtttcaaagtatattacttgtaaaaacaatactgattaaaaaaattttttttaacaaaaaaacagaaatctgatttgatggtaccttgaaaataccctaaataccaaattttctccaacctaacattacagctaatttaagaattcctccttcattggtaaaacattttttcctcattaaatgtgggtactgaaattggatagaaacactatgaatgtgaaaataccaccaattttctgcagtaaaaaaaaaaaacccaaaaaacaaaaaaacnaacaaaaaacctagaatgttctttggaatcactgaaatatcacaaacttgggttttttcttacagtctgtgcacctnctnccaggttctctgtttngcttgtattactgaacggtgtgatcctaattttatanatccagtcttgcatncaatatcctgctggacacccgg

SEQ ID NO: 7812 - DNA, 495 bp, Homo sapiens
  misc_feature (6)..(6): "n" may be a, t, c, g, other or unknown
  misc_feature (275)..(275): "n" may be a, t, c, g, other or unknown
  misc_feature (460)..(460): "n" may be a, t, c, g, other or unknown
  misc_feature (466)..(466): "n" may be a, t, c, g, other or unknown
  misc_feature (486)..(486): "n" may be a, t, c, g, other or unknown
  misc_feature (494)..(495): "n" may be a, t, c, g, other or unknown
aatttntaaaagttttgttttgtttaatgaaacacagtataagaaactagaaaatattacagagaactatgcatactgatgctaagttctgttttatttcatatacatgtccattttatatcacaaaccagtaaaaacatacaaattgataaatgtataaacacattgcacataggtgtatacatgtgttatgttgggtcataatgtatattgggtcataatgtaagctcttccaggaaagcttcctggtccctcatatctcccaacctccaaanataatgaagcattctctcatctgctaggactgaaccatgttaatgcttctatcattgctttaattctgtatttgtgcttcctacaagaccataaacttctaacactgtactaggcatttttcctactacttgatatgtacgatctcatttaattctcacaactcctgttttccggggtgggtttngggttnaaatttgccttgttgaacanctggaatnn

SEQ ID NO: 7813 - DNA, 510 bp, Homo sapiens
  misc_feature (58)..(58): "n" may be a, t, c, g, other or unknown
  misc_feature (84)..(84): "n" may be a, t, c, g, other or unknown
  misc_feature (134)..(134): "n" may be a, t, c, g, other or unknown
  misc_feature (315)..(315): "n" may be a, t, c, g, other or unknown
  misc_feature (330)..(330): "n" may be a, t, c, g, other or unknown
  misc_feature (353)..(353): "n" may be a, t, c, g, other or unknown
  misc_feature (387)..(387): "n" may be a, t, c, g, other or unknown
  misc_feature (398)..(398): "n" may be a, t, c, g, other or unknown
  misc_feature (415)..(415): "n" may be a, t, c, g, other or unknown
  misc_feature (433)..(433): "n" may be a, t, c, g, other or unknown
  misc_feature (463)..(463): "n" may be a, t, c, g, other or unknown
  misc_feature (491)..(491): "n" may be a, t, c, g, other or unknown
  misc_feature (499)..(499): "n" may be a, t, c, g, other or unknown
catctcactttttccagattttttttttattcagtacagatgcaaagtagtagctcanaggctctgggtaatagcattcctganattgatgacatccattacctcactagtccaacttctccagactaacgcanacttttctcttcccttggcctttcctctcctcgccattgggccaattccttcgatttctcatttcccttgaagttagggccattcacagtttcatggtcaaagccagttccaggttcaatagtctgtgatttatccaggctctgaggtatgcaccgcttctgttttgctcgttcctccaanagctagtttggccanaaaggggatgctttataccatanaacacatccaccttctagaactgctctaaaaggncaggccctcanattccacatggttgganttctggccaattctgganctttcttcacactcggctctcaaaactctngggttcaaaaaaaaattaacatggtganaaaaaaanattttctaaac

SEQ ID NO: 7814 - DNA, 585 bp, Homo sapiens
  misc_feature (109)..(109): "n" may be a, t, c, g, other or unknown
  misc_feature (335)..(335): "n" may be a, t, c, g, other or unknown
  misc_feature (405)..(405): "n" may be a, t, c, g, other or unknown
  misc_feature (418)..(418): "n" may be a, t, c, g, other or unknown
  misc_feature (456)..(456): "n" may be a, t, c, g, other or unknown
  misc_feature (479)..(479): "n" may be a, t, c, g, other or unknown
  misc_feature (548)..(548): "n" may be a, t, c, g, other or unknown
  misc_feature (564)..(564): "n" may be a, t, c, g, other or unknown
  misc_feature (577)..(577): "n" may be a, t, c, g, other or unknown
  misc_feature (582)..(582): "n" may be a, t, c, g, other or unknown
  misc_feature (585)..(585): "n" may be a, t, c, g, other or unknown
catatttgattttttattaccaatcaaaaataaattccatatatcgtttagcaaatatcattgttttgtgacaaaagacacaagagtcataacaacaaaactccccganagtcaaactcataacgccaaaataaatcacaaaaatatacaaattaaaatattatgcaaaataaatacggcggctgtcacctgcctacccatttggatgccctttgcaaaggtctcccttacgtggaaaacacagtgggtgggccagttccagggtatggctcatcccaggaaccagaggttgaaataggaagggaaaaattgcactgggaagaggaagtcatcanacaaacaatatttggaaataatgatgaccctctgtgagaagggatgatcaatgggccacgggaaaaagangaaggccacccanttggtggtaaccgtgtgccaaaagtcactgtggaagtnttttcacctgcccctttgcttcncataccccccccaatgttcttttgctctacctggccatccagggctgtcaggaatattactcctgcccncttcccaaaaaggaanttgggaaaacaanctgcnccn

SEQ ID NO: 7815 - DNA, 578 bp, Homo sapiens
  misc_feature (210)..(210): "n" may be a, t, c, g, other or unknown
  misc_feature (212)..(212): "n" may be a, t, c, g, other or unknown
  misc_feature (270)..(270): "n" may be a, t, c, g, other or unknown
  misc_feature (327)..(327): "n" may be a, t, c, g, other or unknown
  misc_feature (461)..(461): "n" may be a, t, c, g, other or unknown
  misc_feature (498)..(498): "n" may be a, t, c, g, other or unknown
  misc_feature (500)..(500): "n" may be a, t, c, g, other or unknown
  misc_feature (528)..(528): "n" may be a, t, c, g, other or unknown
  misc_feature (562)..(562): "n" may be a, t, c, g, other or unknown
  misc_feature (574)..(574): "n" may be a, t, c, g, other or unknown
gtttttttgaattccagaacttctttattgtacataaaaatctgaatttcttaatatggaaaccaaaggtctgcaaaatgtactctcctagctcaggatcattatttattcctcttatttttggaatctattcttcttttattcaaggaccaactcaaaggtcagcttttagttaactcttatatccccatacacatatcctaaaggcananttaactgctatatccaagctacttcttggcatatccttgtcacctaaaataacagaanagggagactctctgaaaagaaaaatgatgttttattcaggaagtaggcattgcaatnagaaatacaagtgccacagttaaactatgtgcatatacagggaagtcaaggaagacaacggtttttaaagcaaaaatgattgttttgaaaaaaattatccttggctacaaggatcataacaaggatgttgccanttggacattggacagggaattgctgggcaaattttcncntaaaaatttttttgttttttttcaggtngtgaaggccttgttcaaggtttggtttggtcaanctttaatgaaancccc

SEQ ID NO: 7816 - DNA, 308 bp, Homo sapiens
  misc_feature (183)..(183): "n" may be a, t, c, g, other or unknown
  misc_feature (190)..(190): "n" may be a, t, c, g, other or unknown
  misc_feature (249)..(249): "n" may be a, t, c, g, other or unknown
  misc_feature (277)..(277): "n" may be a, t, c, g, other or unknown
  misc_feature (285)..(285): "n" may be a, t, c, g, other or unknown
  misc_feature (288)..(288): "n" may be a, t, c, g, other or unknown
  misc_feature (291)..(291): "n" may be a, t, c, g, other or unknown
atttagagcttagttcaagtttccaaacaagaatttattctttcttttttaatctttttttctaaaaaaaagtaccaggtacaattttttcctgtttttgatttgctttgttttttcaagtttcagcaaatgcttgttcccctcagcccagccccaggaattaggactgaggctgggtcagantctggantggggaatggggtagtttggaaccacatgactgagtttgaggggtgcccctcaccccanctgaggtaggtgggtcagaatctggccnggtgagangangcnccccactgcttggccct

SEQ ID NO: 7817 - DNA, 211 bp, Homo sapiens
  misc_feature (59)..(59): "n" may be a, t, c, g, other or unknown
  misc_feature (99)..(99): "n" may be a, t, c, g, other or unknown
  misc_feature (101)..(101): "n" may be a, t, c, g, other or unknown
  misc_feature (137)..(137): "n" may be a, t, c, g, other or unknown
  misc_feature (140)..(140): "n" may be a, t, c, g, other or unknown
  misc_feature (196)..(196): "n" may be a, t, c, g, other or unknown
  misc_feature (203)..(204): "n" may be a, t, c, g, other or unknown
aggaaaataggccaagcctgttataggctttttgatcatctccagactggcaggaaaanaatgcatactcacactgtaagtgcctgatttgatttgcanangatatagaaccttatcagaaaacaaccttccaaggnaanaacaaatgcatcctatcttagcacagcttttctccaattcttctttacctaagganatgaatnnctgccag

SEQ ID NO: 7818 - DNA, 552 bp, Homo sapiens
  misc_feature (97)..(97): "n" may be a, t, c, g, other or unknown
  misc_feature (196)..(196): "n" may be a, t, c, g, other or unknown
  misc_feature (256)..(256): "n" may be a, t, c, g, other or unknown
  misc_feature (340)..(340): "n" may be a, t, c, g, other or unknown
  misc_feature (345)..(345): "n" may be a, t, c, g, other or unknown
  misc_feature (434)..(434): "n" may be a, t, c, g, other or unknown
  misc_feature (464)..(464): "n" may be a, t, c, g, other or unknown
  misc_feature (468)..(468): "n" may be a, t, c, g, other or unknown
  misc_feature (481)..(481): "n" may be a, t, c, g, other or unknown
  misc_feature (513)..(513): "n" may be a, t, c, g, other or unknown
  misc_feature (546)..(546): "n" may be a, t, c, g, other or unknown
aaaaacagaactgtgcaatgagaatgctttaatcatcacccacacagacgagcggaagctacagacagagaaccactacggatggtgcctggaacanaggtgagaatggcccaaaactctgcctccgggaaaggtgccaagtttacaggacttatcgtggtgccctcaccagacccctcctcctcctcctcctccncctcctcctcctcctccgtggccgctggcggctcctgcatctcctctggggaagcctgangccggctcgggtaacttctgctgcctgagacagtcacacgtgcttgggacctctcacctgaggtctctgggtgctgaactggantggangtactaggcgtgggaaaaaaatgtggtcacctgttgtcatcttcttcaaagtccttaaggcagtacacttcgtccaggtcaacatccancgtccggaaacccttggtgaccacaccaangccnggggttcaggatnccccaaggtgaggttgggccacttgctgccantggtgaaatttggcaaaaacttcccaccggttncccaat

SEQ ID NO: 7819 - DNA, 352 bp, Homo sapiens
  misc_feature (151)..(151): "n" may be a, t, c, g, other or unknown
  misc_feature (264)..(264): "n" may be a, t, c, g, other or unknown
  misc_feature (266)..(266): "n" may be a, t, c, g, other or unknown
  misc_feature (332)..(332): "n" may be a, t, c, g, other or unknown
  misc_feature (339)..(339): "n" may be a, t, c, g, other or unknown
  misc_feature (345)..(345): "n" may be a, t, c, g, other or unknown
agtcataattcatttttattgctcttttaaaacaacagcttggctgagccgcggatgccatgaacagttcagggcctcggcgtcattttatctcctccttattcctttcctttctagcataagagccctgaaagaggcgttttgagccaanagaaccgcttgtaggcgatcattttaagcgtaaccaagctcgcctttcacccagtctcccaaggcgttgaaagagaccagctccagtcttggggcgctgacctacttgcctananggccaaggatctcctactcggtggaacggcccccaaaatttcttgggggaagggttttggggaaanaactganctacanaacctaa

SEQ ID NO: 7820 - DNA, 581 bp, Homo sapiens
  misc_feature (378)..(378): "n" may be a, t, c, g, other or unknown
  misc_feature (381)..(381): "n" may be a, t, c, g, other or unknown
  misc_feature (524)..(524): "n" may be a, t, c, g, other or unknown
  misc_feature (535)..(535): "n" may be a, t, c, g, other or unknown
  misc_feature (554)..(554): "n" may be a, t, c, g, other or unknown
  misc_feature (570)..(570): "n" may be a, t, c, g, other or unknown
aagcattttccaccatttactcttgttatcaaaaatagttcaactcttcttgcaaaacaaaaacaaaatagtacatactggacacatcacatttttcttcctatggctttagcccacccccaccccaccaaaagagaccaaaaaaaaaaaagaaaaaaaagcccaacaacaacaacaaaaacaactctacctgaccacattcacagaaaatgacaccaggatacactacaaaacagaaggaggtgtcatctgctctgtgtccaaaggtttcttctccatgtcttgtactaggcgagtaaccatcattgaacatgctgtgtgccaaatcaaaacataacttcagcatatgtcagatcttactagagatggtgaacgtantanaaattggaaattttccagcagtatttttctttaaataagcactgtcaaagctgcagctcttcttttaaatcacaggttatttcattacacctaagtcagtccttgttttatttgggctggtgctctttccagccactgaatanaattcccctcnacaaaatgtttgggaaacncttgtcttccccctanaaaattaccgg

SEQ ID NO: 7821 - DNA, 400 bp, Homo sapiens
  misc_feature (59)..(59): "n" may be a, t, c, g, other or unknown
  misc_feature (212)..(212): "n" may be a, t, c, g, other or unknown
  misc_feature (258)..(258): "n" may be a, t, c, g, other or unknown
  misc_feature (308)..(308): "n" may be a, t, c, g, other or unknown
  misc_feature (332)..(332): "n" may be a, t, c, g, other or unknown
  misc_feature (341)..(341): "n" may be a, t, c, g, other or unknown
  misc_feature (350)..(350): "n" may be a, t, c, g, other or unknown
  misc_feature (361)..(361): "n" may be a, t, c, g, other or unknown
  misc_feature (387)..(387): "n" may be a, t, c, g, other or unknown
  misc_feature (398)..(398): "n" may be a, t, c, g, other or unknown
ctgaggatttcctgtatttattaagttacaagttggtaggcacagcttgagcaacatanaaaagtaatcttcttgagttatacaatcatttaaattccaaagcactcacaaaattgagcaaacaaagccactatttgcatatttgggaaaggaaacatattgctaatggaagccacaggactggtcaaaaataaatgttttgtattaagtantaaaataaatggagaattctaccccaaagcctccacctcagtgaanacctgcgggttattgcagctgcaagggaagctacagcacagtcgtctcanaataaacagcagcctggaaagcanatgttttcncaggtatcnaaggccctccnaccccaaatagcctctgctctccagnaacagttgaanaa

SEQ ID NO: 7822 - DNA, 550 bp, Homo sapiens
  misc_feature (3)..(3): "n" may be a, t, c, g, other or unknown
  misc_feature (169)..(169): "n" may be a, t, c, g, other or unknown
  misc_feature (218)..(218): "n" may be a, t, c, g, other or unknown
  misc_feature (442)..(442): "n" may be a, t, c, g, other or unknown
  misc_feature (465)..(465): "n" may be a, t, c, g, other or unknown
  misc_feature (480)..(481): "n" may be a, t, c, g, other or unknown
  misc_feature (536)..(536): "n" may be a, t, c, g, other or unknown
  misc_feature (550)..(550): "n" may be a, t, c, g, other or unknown
ganatggagtttcgctgttgttgcccaggctggagtgcaatggtgcaatctcagctcatcgcaacctctgcctcccaggttcaagcgattctcctacctcagcctcccgagtagctgggattacaggcatgtgccaccacatccagctaactttgtattttgagtaaanatggggtttctccatgttggtcaggctggtctcgaactccagaactcanatgatcctcccccttggcctcccaaagtgctgggattgcaggtgtcagccaccatgcccggcctcctctgtcacttttatagccatcctctgctcagaggaaagagctgacacctctctgcccagtctcgaggccccagtccacactgtctacaactatctacagccatcttcatacctaatgccaaaagaagctccccacattaattaaccctggagtgatcnctctaaattgggcgttccccttnaaaacaagaaacccnncccccccccaaattatttcagggccatcctcccctcccaccaattcccacaatgnaggaaactctcccn

SEQ ID NO: 7823 - DNA, 519 bp, Homo sapiens
  misc_feature (69)..(69): "n" may be a, t, c, g, other or unknown
  misc_feature (448)..(448): "n" may be a, t, c, g, other or unknown
  misc_feature (457)..(457): "n" may be a, t, c, g, other or unknown
  misc_feature (474)..(474): "n" may be a, t, c, g, other or unknown
  misc_feature (476)..(476): "n" may be a, t, c, g, other or unknown
  misc_feature (495)..(495): "n" may be a, t, c, g, other or unknown
  misc_feature (507)..(508): "n" may be a, t, c, g, other or unknown
agagtagacttttataaactccagaggattttcccaattaacactaaaacctccaaaaacctgtcaganatacaattattcttctatttagcttcttataaaaatataaaaagctgagcaaaaaaaccacaacccaattataaagtcaatatacaaaatgtattctatttttaaaatggcacagaatgagaaaaaattcttcatgctgataagtgcctcattcccaaacagggacttcaaattgatcagattctcttgcaggcaaaagctttgcagcagtctgcatttactggaatattgctctctgaacacggccacattcaggtttgttaaatatatcctcttccgcttctggagttagttggatgttatctccgactggggacaggggtttcttacaaggaagaagcttttcagaatcttttttaaatccaaagtttttccaganctcattgantttgatctgttaccccngnttgttctccgcattatgangctttctcctcnngaatgcttggc

SEQ ID NO: 7824 - DNA, 565 bp, Homo sapiens
  misc_feature (9)..(9): "n" may be a, t, c, g, other or unknown
  misc_feature (93)..(93): "n" may be a, t, c, g, other or unknown
  misc_feature (194)..(194): "n" may be a, t, c, g, other or unknown
  misc_feature (291)..(291): "n" may be a, t, c, g, other or unknown
  misc_feature (503)..(503): "n" may be a, t, c, g, other or unknown
  misc_feature (505)..(505): "n" may be a, t, c, g, other or unknown
  misc_feature (526)..(526): "n" may be a, t, c, g, other or unknown
  misc_feature (565)..(565): "n" may be a, t, c, g, other or unknown
cccttaaanaaagcactttattttccatttaaacaacttggtcacaggacgttattttacataaatggaagtaatttgtaaaatttccatgtnaaaggccttgtgtctgagtctgaggtgataagaggatatgaatacaagtatataaaaacagtgcaaaatgtgcagcccacagcctccggagttggcttcanaaatcccccttaatgttgctagaccagttacattaaatattaaatgtaacaccaggtaaatattcctgggtttcctttagtctaacatccaacccanatatgcaataaaatgaaaaactcaaaatccctaacaactcaaaccatccaatcacccagaccattaggatcacaatgagttgagactgcaggctctatactgtgacatctcgtcagtggctccatcttaagaaatacagaattttagttgcatcagtaactaaaataaactaactctgcttttaaagctttggcttttaaatgtttaattcnanaaatttcccttccaggggccncccaaaagggggggccctaaaaaattccaaccccccccn

SEQ ID NO: 7825 - DNA, 571 bp, Homo sapiens
  misc_feature (46)..(46): "n" may be a, t, c, g, other or unknown
  misc_feature (69)..(69): "n" may be a, t, c, g, other or unknown
  misc_feature (107)..(107): "n" may be a, t, c, g, other or unknown
  misc_feature (175)..(175): "n" may be a, t, c, g, other or unknown
  misc_feature (221)..(221): "n" may be a, t, c, g, other or unknown
  misc_feature (321)..(321): "n" may be a, t, c, g, other or unknown
  misc_feature (341)..(341): "n" may be a, t, c, g, other or unknown
  misc_feature (509)..(509): "n" may be a, t, c, g, other or unknown
  misc_feature (533)..(533): "n" may be a, t, c, g, other or unknown
  misc_feature (561)..(561): "n" may be a, t, c, g, other or unknown
ccaaaattcatttttagtatttctgtacccaaaccccccgatgaanaaacagcacatggcacacagcancctggcccagggctaaggtgaggcgtgaacccgcccanggctaaggtgaggcgtgaacctggcccagggctaaagtgaggcatgctttcattaatcccgtcagganctcttggctcctctgtgactgcaaatcatttgcacccacctgcgantctctccttctcaggatgcaccctcatgatacatggagcaaacacaataagccctgatctcatggggctgcttggaaacgggctgaggtatcgcaccccnagtcacaagcttgcgggaantgcaggcgcccatgacccagtgccagcatgctctaatggtgtggggattttgcataacataaggtgaaactgtgaacaaaaaaagggcctgttgggttctctgcatctttaaggactgggcctggcccctgactgcttccaggaaaaagcacattccctggggaccanaaaaatctcttaaaaacctccccncccaggtttaaacactttccggtctttnttccatggtc

SEQ ID NO: 7826 - DNA, 594 bp, Homo sapiens
  misc_feature (289)..(289): "n" may be a, t, c, g, other or unknown
  misc_feature (341)..(341): "n" may be a, t, c, g, other or unknown
  misc_feature (343)..(343): "n" may be a, t, c, g, other or unknown
  misc_feature (452)..(452): "n" may be a, t, c, g, other or unknown
  misc_feature (570)..(570): "n" may be a, t, c, g, other or unknown
  misc_feature (588)..(588): "n" may be a, t, c, g, other or unknown
aataatattattatttttcagctgagtctgggtctcactccgtcgcccaggctggaatgcagtggcatgatcacagctcactgcggcctccaactcctgggctcaagtgattctcctgccccagcctcccgagtagctgggactacaggcttgcgccaccatgcccggcttatagggcactttagatggaaacaaatgactggatctttaactcctacctttctctcctctcttcctgtaatgttgttactgaaggcaggaagggagactccttggctaaagagcagancaagagcctcaaagtggtctttgtgagccaccctggactactggttcggtananggttgagtcaagcaatatttgaggacgggatataaacagtatttcttaaagttgtcaccaatttttcccccgatgaggccattccagacccaaattagtcataacaganccaggacaataatcacatctcctgattctgaacctgaatgcttcccccaggaatgggttcctcccctggtctgaaggtccattgttgggggaaaatttcccctgggaatcccccccanggcctggggaacaaaccncccaaa

SEQ ID NO: 7827 - DNA, 565 bp, Homo sapiens
  misc_feature (236)..(236): "n" may be a, t, c, g, other or unknown
  misc_feature (277)..(277): "n" may be a, t, c, g, other or unknown
  misc_feature (430)..(430): "n" may be a, t, c, g, other or unknown
  misc_feature (513)..(513): "n" may be a, t, c, g, other or unknown
  misc_feature (526)..(526): "n" may be a, t, c, g, other or unknown
  misc_feature (528)..(528): "n" may be a, t, c, g, other or unknown
  misc_feature (533)..(533): "n" may be a, t, c, g, other or unknown
  misc_feature (535)..(535): "n" may be a, t, c, g, other or unknown
  misc_feature (550)..(550): "n" may be a, t, c, g, other or unknown
  misc_feature (556)..(556): "n" may be a, t, c, g, other or unknown
gtaagtttgtctggtttatttgcaggctgtagagatgatatcccagtccacgcacactcccatgcacacgcacacacatacttcatccacctgaatttgcccgacaaaccctcctctgagtcataggggacaaagccatacttggcagtcctcacgttactggttacattagatttggtctttcagaaagaagatggttgaagtcccaagaagctgagcccttagccagagaagtnagagtcctagaaccaagagccacaacctgaaatagatgttnactgcccccgccctccttccagggacaactcttgagaccctctcctcccaggagttgagtctcaagaaatgaagggactgatggggtttcccaggacacacgagcccccacccccattcaatgagaaaacctctcttctgccatttccagaanctgggggcacacctgcttgctctcctcccttaaggaaaattcctgcatcttgtttaaatgtggaacttatgaaataacccgantggtctgcctccncnctgantnaggaaaagggacctnaatttnatggttttc

SEQ ID NO: 7828 - DNA, 600 bp, Homo sapiens
  misc_feature (176)..(176): "n" may be a, t, c, g, other or unknown
  misc_feature (239)..(239): "n" may be a, t, c, g, other or unknown
  misc_feature (246)..(246): "n" may be a, t, c, g, other or unknown
  misc_feature (310)..(310): "n" may be a, t, c, g, other or unknown
  misc_feature (350)..(350): "n" may be a, t, c, g, other or unknown
  misc_feature (431)..(431): "n" may be a, t, c, g, other or unknown
  misc_feature (487)..(487): "n" may be a, t, c, g, other or unknown
  misc_feature (535)..(535): "n" may be a, t, c, g, other or unknown
  misc_feature (545)..(545): "n" may be a, t, c, g, other or unknown
  misc_feature (592)..(592): "n" may be a, t, c, g, other or unknown
  misc_feature (594)..(594): "n" may be a, t, c, g, other or unknown
  misc_feature (600)..(600): "n" may be a, t, c, g, other or unknown
actgaagaggacaagatgggaaggacatttttattttccctaatcttcaggcaacctcaccaagctggaggtcacatgtagctgagtgtgaaaccaagaaaaatacgaagcttcaaaagtactgtgcgttgtatttcttcattctctggcaggctgggagtccaaggtcagtctangcaggagggctgcttggcctaagcagtcacacaattttcaccgtcttgagcatatctgacaanacatacntgtcatcccaacccctcccaggcttccccagggtccgctccaaagcctgggctgtttctagganctctggtgtggcaagtttttgctcagggtgcagctgacanaacaggatctcattcacttcaccctcaattcgccagacatataggagggggaacactgccttgagcccagccagcactgantcttttagccccaagtctcggcacacaaggttgaaaaataaaaacaccttcaggantcaagatgcttttaaccttctgttaaaaaaaatgctccccaaatgctngggggcgganaactcattccccaaaattgggttcctaatgttcacatcaactttatnanatcctn

SEQ ID NO: 7829 - DNA, 580 bp, Homo sapiens
  misc_feature (126)..(126): "n" may be a, t, c, g, other or unknown
  misc_feature (157)..(157): "n" may be a, t, c, g, other or unknown
  misc_feature (223)..(223): "n" may be a, t, c, g, other or unknown
  misc_feature (288)..(288): "n" may be a, t, c, g, other or unknown
  misc_feature (334)..(334): "n" may be a, t, c, g, other or unknown
  misc_feature (459)..(459): "n" may be a, t, c, g, other or unknown
  misc_feature (469)..(469): "n" may be a, t, c, g, other or unknown
  misc_feature (474)..(474): "n" may be a, t, c, g, other or unknown
  misc_feature (509)..(509): "n" may be a, t, c, g, other or unknown
  misc_feature (517)..(517): "n" may be a, t, c, g, other or unknown
  misc_feature (533)..(533): "n" may be a, t, c, g, other or unknown
  misc_feature (553)..(553): "n" may be a, t, c, g, other or unknown
  misc_feature (580)..(580): "n" may be a, t, c, g, other or unknown
aaaacaagaaagactaaaatgtggtaagaaatcagtcttgtgcattttgtacatttgtgtcctccactctgtcttcatttactgctccaggaagctgatgccacagctggccacagttgaacaaanacatcagaaggccagttagtctctaccacanaagcccccaagtgaaccgaattctgaagggcaggtctcagtgtcccttaactttgttctccccagnaaaaatccattttgctgccaaatgtgaccagcaaacttgggcaggtacatctagcacaatcacantcctgtcacactgccaacgtggcccaaggcatggcgtgcagggcantctctctggagggcctctgctatgcctgctcaccagcaccacctccaccaacagcggaacccttgctggatgcctgggcatctgaagaacgggaagcctgcttcggcaggcggatggggacatanattttggaancacantgctccttgaagtacctcctccctttcttcctacnccttcccnggtgatccaaactccnttaacacctaggtggttcanggcccattccaaacaccgttcaagcan

SEQ ID NO: 7830 - DNA, 486 bp, Homo sapiens
  misc_feature (33)..(33): "n" may be a, t, c, g, other or unknown
  misc_feature (79)..(79): "n" may be a, t, c, g, other or unknown
  misc_feature (88)..(88): "n" may be a, t, c, g, other or unknown
  misc_feature (107)..(107): "n" may be a, t, c, g, other or unknown
  misc_feature (119)..(119): "n" may be a, t, c, g, other or unknown
  misc_feature (171)..(171): "n" may be a, t, c, g, other or unknown
  misc_feature (195)..(195): "n" may be a, t, c, g, other or unknown
  misc_feature (252)..(252): "n" may be a, t, c, g, other or unknown
  misc_feature (275)..(275): "n" may be a, t, c, g, other or unknown
  misc_feature (406)..(407): "n" may be a, t, c, g, other or unknown
  misc_feature (410)..(410): "n" may be a, t, c, g, other or unknown
  misc_feature (421)..(421): "n" may be a, t, c, g, other or unknown
  misc_feature (423)..(423): "n" may be a, t, c, g, other or unknown
  misc_feature (431)..(431): "n" may be a, t, c, g, other or unknown
  misc_feature (476)..(476): "n" may be a, t, c, g, other or unknown
ccaaaatctaaaaaaaacctttattcccaacanacctctcattctacttcccccaggtaactccttagccacacattanttttttganaccgtgtctcgctctgtancccaggctggantgcagtggcatcatcttggcctactgcaatctccatctcctgggttcaagcnattctcctgtctcagcctcccgantaaccgggactacaggcatgcaccaccacgcctggctaatttttatatttttagttnaaatggggtttcatttcaccatnttggtcaggctggtctcaaacttctgacctcaggtgatccactcaccttggcctcccaaaatgctgggattacaggtgtgagccactgcacccggccccttatccacaaatttgggattgaactacaggcnnaangattgaaaatntntccttccnccttcccctatactcatgccactctctgcccaactttctcttggncccataattc

SEQ ID NO: 7831 - DNA, 356 bp, Homo sapiens
  misc_feature (96)..(96): "n" may be a, t, c, g, other or unknown
  misc_feature (102)..(102): "n" may be a, t, c, g, other or unknown
  misc_feature (190)..(190): "n" may be a, t, c, g, other or unknown
  misc_feature (212)..(212): "n" may be a, t, c, g, other or unknown
  misc_feature (246)..(246): "n" may be a, t, c, g, other or unknown
  misc_feature (329)..(329): "n" may be a, t, c, g, other or unknown
  misc_feature (341)..(341): "n" may be a, t, c, g, other or unknown
  misc_feature (352)..(356): "n" may be a, t, c, g, other or unknown
acaatataaccaagggagtttatttcaggaatgcaaagctaacgcaatataccaaaattgagcaccacagtaacagactgaagaagaaaaatcgcnaatatnttagttgtggcaaaaaaatcatttgacaaaattcaacagccattcatcgtaataactctcagaaaagcaggaacagagaggaatatcntcaatttgataatggacatgtnttaaaacactacagctaacatatttaatgatgtnagactgaatgctttctcctaaggctgggaacaagacaaggatgtctgctctcaccactcttgttcagcatagtactagaagtnctagccagtgtnttatgcccacnnnnn

SEQ ID NO: 7832 - DNA, 511 bp, Homo sapiens
  misc_feature (18)..(18): "n" may be a, t, c, g, other or unknown
  misc_feature (100)..(100): "n" may be a, t, c, g, other or unknown
  misc_feature (214)..(214): "n" may be a, t, c, g, other or unknown
  misc_feature (252)..(252): "n" may be a, t, c, g, other or unknown
  misc_feature (416)..(416): "n" may be a, t, c, g, other or unknown
  misc_feature (450)..(450): "n" may be a, t, c, g, other or unknown
  misc_feature (466)..(466): "n" may be a, t, c, g, other or unknown
  misc_feature (486)..(486): "n" may be a, t, c, g, other or unknown
  misc_feature (488)..(488): "n" may be a, t, c, g, other or unknown
  misc_feature (506)..(506): "n" may be a, t, c, g, other or unknown
  misc_feature (510)..(510): "n" may be a, t, c, g, other or unknown
cctattttgtacccttgnaaatttattagtttattctgaggatacaaataacatttatatatgcacacatgagccatcttaatatttccatttagttcanaatttcaaaaatatcaatcgatccttgaactttcaagtatagaaatgagtttagggtaaaatagtaacctttgaaataattacagtactgtattagatttgtctttttctttanttgcttaacttcatgaactcatttgtttttttcttttnaatttttattaatctactttttccaatccccaatgtgattaaattcagaagaacagtatctttcaagtaaatgatgcaaaacttcctttcacatcatctcacgtcctttccccctttgtattagtagataattatactatctacagccagaacgatcttcctanacgtgatcatgctatgtgctatgaaaaaaacctncaatgggggaactccnctaccgaaatgatgtggttntnctgggcagtcgctcccangtgnc

SEQ ID NO: 7833 - DNA, 570 bp, Homo sapiens
  misc_feature (412)..(412): "n" may be a, t, c, g, other or unknown
  misc_feature (439)..(439): "n" may be a, t, c, g, other or unknown
  misc_feature (472)..(472): "n" may be a, t, c, g, other or unknown
  misc_feature (484)..(484): "n" may be a, t, c, g, other or unknown
  misc_feature (516)..(516): "n" may be a, t, c, g, other or unknown
  misc_feature (518)..(519): "n" may be a, t, c, g, other or unknown
  misc_feature (566)..(566): "n" may be a, t, c, g, other or unknown
  misc_feature (570)..(570): "n" may be a, t, c, g, other or unknown
aaaggtttttaaatagaaactttatttaaataaatgaactcttctcaaccccaaaacccagcttctgatcttgactaagttcataattactcagggaaaaacactgctggttccttataagccactgtgctgtacgaaatcaattcatgaaaaggaaacgccctatttccaagcatacctgtactagaatatattaagtatattcacttaacatattaatttaaatgttaatgttagtctaaatgttaaattaatttaatatgttaaacttaatacgtttatttaatttttacttaataccattactggaacatattaagcattttttcggcttaaaaaaaacaaaaaaacaaaaaaaaaccctgaatttacagaactaaaattatgagaggagatcgcattacaaaatctncctctatgggttcttctagctcaaaanattttcctactgattttaactactgaatttggngttattatttanaaaaaaacccggaaaggtgccactgttgaaancnntgtttttaggaattcttaccccatgaatttcttttccgggaaaaaanactn

SEQ ID NO: 7834 - DNA, 416 bp, Homo sapiens
  misc_feature (410)..(416): "n" may be a, t, c, g, other or unknown
gcagacaaaaagtggtttatttagcacccactatgtaccaggcacttgggaggtattttctcacactttcgctttccatcctcacaatatcccttatgaggtagggactaccctcatttttacaggtgagggaactgaggcttagatgttgacagacccatccaaggtgacccagctggtaatggtagacttcatcctgctacacagtatttaaggggcctaaaccataaacaatttttaaaaatttgggaaagtcacacataaaggagatgtttcaataccttctctctccaggtatgaacagtattgagcaagacccacagggcagcaataatcatttatcctgatgaaaggttcctctgtgaaaggtaagggggttgggggagacctaaagccttctgcagacccannnnnnn

SEQ ID NO: 7835 - DNA, 366 bp, Homo sapiens
  misc_feature (11)..(11): "n" may be a, t, c, g, other or unknown
  misc_feature (69)..(69): "n" may be a, t, c, g, other or unknown
  misc_feature (100)..(100): "n" may be a, t, c, g, other or unknown
  misc_feature (155)..(155): "n" may be a, t, c, g, other or unknown
  misc_feature (174)..(174): "n" may be a, t, c, g, other or unknown
  misc_feature (187)..(187): "n" may be a, t, c, g, other or unknown
  misc_feature (192)..(192): "n" may be a, t, c, g, other or unknown
  misc_feature (196)..(196): "n" may be a, t, c, g, other or unknown
  misc_feature (285)..(285): "n" may be a, t, c, g, other or unknown
  misc_feature (293)..(293): "n" may be a, t, c, g, other or unknown
  misc_feature (329)..(329): "n" may be a, t, c, g, other or unknown
  misc_feature (336)..(337): "n" may be a, t, c, g, other or unknown
  misc_feature (348)..(348): "n" may be a, t, c, g, other or unknown
  misc_feature (359)..(359): "n" may be a, t, c, g, other or unknown
gatgttgaganaacatttattccactcagtcagctcccgcaggagtcagcaacctgtagaaatatccangctggacgaccacttccgtgcactcctgcanaaccggggtgggggtgggggtccctgatgctcccactgccccaaggaggtaagancctgaggcctccgacatcnacttttgacccanggganccancccacatcccaaaaaaaggcacccttgagttaactcacataccctctccccacgtgcactgcccattaccggccaccgacaatctccancgcttgangcaccattcatccgacaagtgtttcctgaaagttangagcccnntcctgtgctanaccctgggtangactcaa

SEQ ID NO: 7836 - DNA, 305 bp, Homo sapiens
  misc_feature (7)..(7): "n" may be a, t, c, g, other or unknown
  misc_feature (64)..(64): "n" may be a, t, c, g, other or unknown
  misc_feature (108)..(108): "n" may be a, t, c, g, other or unknown
  misc_feature (151)..(151): "n" may be a, t, c, g, other or unknown
  misc_feature (159)..(159): "n" may be a, t, c, g, other or unknown
  misc_feature (170)..(170): "n" may be a, t, c, g, other or unknown
  misc_feature (172)..(172): "n" may be a, t, c, g, other or unknown
  misc_feature (178)..(178): "n" may be a, t, c, g, other or unknown
  misc_feature (214)..(214): "n" may be a, t, c, g, other or unknown
  misc_feature (229)..(229): "n" may be a, t, c, g, other or unknown
  misc_feature (261)..(261): "n" may be a, t, c, g, other or unknown
  misc_feature (267)..(267): "n" may be a, t, c, g, other or unknown
  misc_feature (274)..(274): "n" may be a, t, c, g, other or unknown
  misc_feature (295)..(296): "n" may be a, t, c, g, other or unknown
catgaanaggatgggacctgtttggcccatgaattcaattgactcattggccccatcacaaganatcagtgactcaatgctcagcacccaactggcaatgtgcccagnaccccctgcacttcccaagcagtgagcgcacacccaatgggtnagcccatnaacccactttntnacactncgttgggcaaaactcctgtccccagcactgaacatngcctaagccccatancagctggcaagggatccaattgccctgcctgnctctanctcccancattgctactgtgcccgccannggtactgaa

SEQ ID NO: 7837 - DNA, 554 bp, Homo sapiens
  misc_feature (57)..(57): "n" may be a, t, c, g, other or unknown
  misc_feature (357)..(357): "n" may be a, t, c, g, other or unknown
  misc_feature (423)..(423): "n" may be a, t, c, g, other or unknown
  misc_feature (460)..(460): "n" may be a, t, c, g, other or unknown
  misc_feature (473)..(473): "n" may be a, t, c, g, other or unknown
  misc_feature (475)..(475): "n" may be a, t, c, g, other or unknown
  misc_feature (508)..(508): "n" may be a, t, c, g, other or unknown
  misc_feature (519)..(519): "n" may be a, t, c, g, other or unknown
  misc_feature (526)..(526): "n" may be a, t, c, g, other or unknown
  misc_feature (549)..(549): "n" may be a, t, c, g, other or unknown
catcttatgacatattagtttattacatgcataaaactataaatgataaaaatgaanaatgtaatgaacagtttatgtttttttaaaacaaagtcagattttaaaagttgtacacagagagcaaaaatcactttacgtactcatgattggctttaatatttctttacactatacatactgaaaatgtttacatttactaataaggaatgccaagcgtatccatcaccatttgaatagcttgcaggggatttgtgatttcttccatgttatctcttctcaaaacccaatctggcttaagtcttgaaactattctggtccttacaggtgtttctgggataaaaggaatgcttatagaanaattctcttttgcttgtaaagtatctttcagtattcattttatgtttatgaactgtaagtttgtanaaactgtaaatacggccacaactttgggactacttcntacatcaaaaggncnatttgttgtctcccttaaaaaacccccaacacnaattttggttnaaatccncccccctttttggcactttttancagct

SEQ ID NO: 7838 - DNA, 448 bp, Homo sapiens
  misc_feature (3)..(3): "n" may be a, t, c, g, other or unknown
  misc_feature (210)..(210): "n" may be a, t, c, g, other or unknown
  misc_feature (249)..(249): "n" may be a, t, c, g, other or unknown
  misc_feature (373)..(373): "n" may be a, t, c, g, other or unknown
  misc_feature (375)..(375): "n" may be a, t, c, g, other or unknown
  misc_feature (389)..(389): "n" may be a, t, c, g, other or unknown
  misc_feature (399)..(399): "n" may be a, t, c, g, other or unknown
  misc_feature (413)..(413): "n" may be a, t, c, g, other or unknown
  misc_feature (440)..(440): "n" may be a, t, c, g, other or unknown
  misc_feature (446)..(446): "n" may be a, t, c, g, other or unknown
canaacactgttaatattcaggcaccatttgttcctgcaaataaataagtctctaaggtaactgcatctgaactagtgttaaacacaacagtgcttttttttttttttaatccccccacaaagcttttccaactatgtactatgcctcctttcttattgctatggtaatgtggctgtggaaataaaactactgtacatccaaaaaaatanagcacctttaacattaaagtatatgtctgattatttgtnctcatgtttattttacaatactaaagcccaaactatggtaaattgctctacatctctaccaggtcacctgatatacaggaaataaaactcaactatcttccctcttgaggtaagcccaagccanancactgttttagcanagtctaaaanaaaaaggtctcaantgtcgccagggtttacattcatcttcncaccanga

SEQ ID NO: 7839 - DNA, 398 bp, Homo sapiens
  misc_feature (349)..(349): "n" may be a, t, c, g, other or unknown
  misc_feature (358)..(358): "n" may be a, t, c, g, other or unknown
  misc_feature (394)..(398): "n" may be a, t, c, g, other or unknown
gcggcttaaacatgtggcaaatgttgctttaataaagtcacggaaggacagagccctggtctggcccaggccccctggctggcagccggagaggctcaaatcggaggctgtgcccatggcagctgatccattcctggggatcagcttcaccctcctgaaactgacctcagctgcagaaacagctaaagggttcctcttagactcaaaatctccccctctccttctctgtctctgaggctaggtacctttggtttcaaaaatgcattaggtggggaggatgaaggcagcaccttcggtctgagaactgcaggtctgcgagtgtctccatttggggtgactggtgaggacntgtgttgantggccacttctggtcctgccggaacacttgcatagnnnnn

SEQ ID NO: 7840 - DNA, 535 bp, Homo sapiens
  misc_feature (12)..(12): "n" may be a, t, c, g, other or unknown
  misc_feature (149)..(149): "n" may be a, t, c, g, other or unknown
  misc_feature (202)..(202): "n" may be a, t, c, g, other or unknown
  misc_feature (204)..(204): "n" may be a, t, c, g, other or unknown
  misc_feature (252)..(252): "n" may be a, t, c, g, other or unknown
  misc_feature (289)..(289): "n" may be a, t, c, g, other or unknown
  misc_feature (317)..(317): "n" may be a, t, c, g, other or unknown
  misc_feature (343)..(343): "n" may be a, t, c, g, other or unknown
  misc_feature (361)..(361): "n" may be a, t, c, g, other or unknown
  misc_feature (389)..(389): "n" may be a, t, c, g, other or unknown
  misc_feature (456)..(456): "n" may be a, t, c, g, other or unknown
  misc_feature (493)..(493): "n" may be a, t, c, g, other or unknown
  misc_feature (496)..(496): "n" may be a, t, c, g, other or unknown
  misc_feature (498)..(498): "n" may be a, t, c, g, other or unknown
  misc_feature (507)..(507): "n" may be a, t, c, g, other or unknown
  misc_feature (515)..(515): "n" may be a, t, c, g, other or unknown
  misc_feature (533)..(533): "n" may be a, t, c, g, other or unknown
aaccttgttcanatttctttattgaaaaattaaagtcataagctctgtatataaatacaatgacactgctggtcacctgcaaggcctctgggataggctgggggtgcaaaaggaaactggggccttggggtccccaggggcatgggganggaaataaataataaacaccatgggggataaggaaccaggaagaatgggggtntnaatggggaagtgctccatgcttatttgtggcactaaaggtcttgcaanatgccccctgactgggggccgtgtccatgaattctcnaatgacctcactttggacaaaggctcangcatctggggatgggctgggtcctanctggaagggggacagcantgcccccaacccaacctggaaaaaccancactctgcccttccttttcctttcttcctgtcttgcaacccacttgtcctgggcccctactgttttnccaatacaacaccattcctgaactgaacctctttttnccntnttctgctcncacccccncccattcttgttccattngg

SEQ ID NO: 7841 - DNA, 559 bp, Homo sapiens
  misc_feature (14)..(14): "n" may be a, t, c, g, other or unknown
  misc_feature (55)..(55): "n" may be a, t, c, g, other or unknown
  misc_feature (199)..(199): "n" may be a, t, c, g, other or unknown
  misc_feature (296)..(296): "n" may be a, t, c, g, other or unknown
  misc_feature (523)..(523): "n" may be a, t, c, g, other or unknown
  misc_feature (525)..(525): "n" may be a, t, c, g, other or unknown
caggcattaaccanatttaattgtttttggcaggtaagtacaggctctggcaganttaccaactattctggtcaacaaaagtaaagacaagtggataattatttttagtggagctttaaaaacctgtgagaagctcacattgactttttggcctccagtccacaaaataatacttcatttgataagctaaagtaaagancaattttatggattaactctatcaaagtgaagcacatgaaaaatgggcctaaagtcacaatatattaatcaggatataaaaaattaaattttcacanaggttttcagggatgtttgtttgttaacaatgacctatatgtaataatgttatttgttaataaattcacacaacacaaagcagtaattaactaatgaattttcatttttctttccccaatattaaaaagggataattatactatcattataatttgataatgtctatatctgctaattagggcacataatatcctacaaactactactataaaatgtgggaaatccnanaactataattaatactgtaattaaaatccccccc

SEQ ID NO: 7842 - DNA, 537 bp, Homo sapiens
  misc_feature (57)..(57): "n" may be a, t, c, g, other or unknown
  misc_feature (87)..(87): "n" may be a, t, c, g, other or unknown
  misc_feature (229)..(229): "n" may be a, t, c, g, other or unknown
  misc_feature (260)..(260): "n" may be a, t, c, g, other or unknown
  misc_feature (371)..(371): "n" may be a, t, c, g, other or unknown
  misc_feature (381)..(381): "n" may be a, t, c, g, other or unknown
  misc_feature (431)..(431): "n" may be a, t, c, g, other or unknown
  misc_feature (442)..(442): "n" may be a, t, c, g, other or unknown
  misc_feature (455)..(455): "n" may be a, t, c, g, other or unknown
  misc_feature (513)..(514): "n" may be a, t, c, g, other or unknown
  misc_feature (533)..(533): "n" may be a, t, c, g, other or unknown
gtaggcatttactgataaaacttccctgttgttagggggatataaaggacacaaaanaaacttcaactgcctcacaatgtgaccaanaattgatcataggtaactcttaaagatacccactctgtccacaaaaatggcttatcagcaactgtgttcctgctatgtgactctaactccacagccacaactggttggagcaggagtgaatatctgattcaagttgaatcanacctattatctctctcaagcattgacctganacaggattgggagctgggagtgagtcattctcaacagtgctattctggagggtgtgtccacatactgcagctgccacatgcccttgtaaaactggattgttcaacttctanatttcatganctccactatccttccaaaaatgctcactttttcttaaacattcttgaacngatttctgttntttttaacaatanaaatgttattaacagaacaacaaattttgtttgaaaaaaaaatctccctttctcctcnncggtttccattccgaaaanaaaa

SEQ ID NO: 7843 - DNA, 567 bp, Homo sapiens
  misc_feature (430)..(430): "n" may be a, t, c, g, other or unknown
  misc_feature (483)..(483): "n" may be a, t, c, g, other or unknown
  misc_feature (492)..(492): "n" may be a, t, c, g, other or unknown
  misc_feature (514)..(515): "n" may be a, t, c, g, other or unknown
  misc_feature (532)..(533): "n" may be a, t, c, g, other or unknown
aggagtgtttttgaaatattgtttttcagtttattgtatcaccaccttggaactagttgacttcttacatatacacaaagataggacctgcagcaacaactcttatgacatttttttcatatcagccacacaatttacataaatatgcaaaatgatcctagggtacactggaataaaaaatattttgaaatcttattgccacatgtaactaccaggttatttttttaaggagatgtgtaggttgtaagcctataagaaaggtacacgcagaatgcatacacagatacagaaaaacaagtacaattacaatagagacataatacatacaatcaacaagagctctgcctgaagcttctagcaacttatacattttgggtacacagtacattcagatatcactacttcacaggttgaaaaaagctgtcttganaaacactaatgcaaaagcttatgaagatttaatgaagaatttaagttatgacncctttgttnattaactggcaggtgataaggnngcttgaaaaaacctgcnnccctgaatgaaatcccccaaataatttcccagga

SEQ ID NO: 7844 - DNA, 509 bp, Homo sapiens
  misc_feature (129)..(129): "n" may be a, t, c, g, other or unknown
  misc_feature (144)..(144): "n" may be a, t, c, g, other or unknown
  misc_feature (209)..(209): "n" may be a, t, c, g, other or unknown
  misc_feature (216)..(216): "n" may be a, t, c, g, other or unknown
  misc_feature (230)..(230): "n" may be a, t, c, g, other or unknown
  misc_feature (239)..(239): "n" may be a, t, c, g, other or unknown
  misc_feature (284)..(284): "n" may be a, t, c, g, other or unknown
  misc_feature (306)..(306): "n" may be a, t, c, g, other or unknown
  misc_feature (333)..(333): "n" may be a, t, c, g, other or unknown
  misc_feature (395)..(395): "n" may be a, t, c, g, other or unknown
  misc_feature (413)..(413): "n" may be a, t, c, g, other or unknown
  misc_feature (435)..(435): "n" may be a, t, c, g, other or unknown
  misc_feature (437)..(437): "n" may be a, t, c, g, other or unknown
  misc_feature (461)..(461): "n" may be a, t, c, g, other or unknown
  misc_feature (472)..(472): "n" may be a, t, c, g, other or unknown
  misc_feature (505)..(505): "n" may be a, t, c, g, other or unknown
  misc_feature (509)..(509): "n" may be a, t, c, g, other or unknown
aactaaggaaagcttttatttaaattgtgcaatcaatcagtatttaaacagcagtttcataaacattttggcatttaaacttttattcatttttggcatgacctatagggtagtatataaactacccantggggtgggggcaantactaagcaatatttactatgatactagaaaaaaaaaaacaaatctacattattaaacaaatatnttttaanaaaacattaaaaanatacattcnaaatcaaggcaaacatttgctttcttcgtgcaatggcattcacanaactgatcccctgagtcaagtntaaaattaatatagctcagctctacantccattaagcaagtctacaaatgctgcccttacaaaaaaatggtatacggagtgaaaggatncacaacacccataatacnaaataatttaactggctccccncnttcatttaattcacatctttgaanaatatttaaanaaaaaattctttcccccgacccaaattttgtcntacn

SEQ ID NO: 7845 - DNA, 585 bp, Homo sapiens
  misc_feature (455)..(455): "n" may be a, t, c, g, other or unknown
  misc_feature (477)..(477): "n" may be a, t, c, g, other or unknown
  misc_feature (519)..(519): "n" may be a, t, c, g, other or unknown
  misc_feature (557)..(557): "n" may be a, t, c, g, other or unknown
aattagaaacaactattttattcagaaaagtataaacagttagcaattagaatcttcttatatacagacataacttgcagaaggttaagtctgaggacgctgttctgggtaatttttacagtcctttttagctctaagatccatgacactgcatttttatggccaaagggcaatcaattatgcacctggttgtctcaataggcagtaaaacctaatataaataaatgacaaatcatctgccataaaaaaatacgaaaaacttttgaaatgttaatttcaactccaatgaaacaaatacctaattaaaacaattatttattccctgctagaatataaagggaacaacaagcttgagctgcaaggctcaagctttgagagcacagaaagatttttaaactaataatgcattttaagtccaagaaaatggagccagcccataatctcatgttggaatnccctcaggcaaactggaaaacncatcctgaatatctctgcaatgcgaatctccggttatttggntttttaaaaaaaaacccactcctccgtggttaatttangaattcctttaagggaaaattttaaaaa

SEQ ID NO: 7846 - DNA, 572 bp, Homo sapiens
  misc_feature (52)..(52): "n" may be a, t, c, g, other or unknown
  misc_feature (105)..(105): "n" may be a, t, c, g, other or unknown
  misc_feature (114)..(114): "n" may be a, t, c, g, other or unknown
  misc_feature (164)..(164): "n" may be a, t, c, g, other or unknown
  misc_feature (198)..(198): "n" may be a, t, c, g, other or unknown
  misc_feature (201)..(201): "n" may be a, t, c, g, other or unknown
  misc_feature (203)..(203): "n" may be a, t, c, g, other or unknown
  misc_feature (222)..(222): "n" may be a, t, c, g, other or unknown
  misc_feature (251)..(251): "n" may be a, t, c, g, other or unknown
  misc_feature (264)..(264): "n" may be a, t, c, g, other or unknown
  misc_feature (272)..(272): "n" may be a, t, c, g, other or unknown
  misc_feature (305)..(305): "n" may be a, t, c, g, other or unknown
  misc_feature (315)..(315): "n" may be a, t, c, g, other or unknown
  misc_feature (365)..(365): "n" may be a, t, c, g, other or unknown
  misc_feature (403)..(403): "n" may be a, t, c, g, other or unknown
  misc_feature (405)..(405): "n" may be a, t, c, g, other or unknown
  misc_feature (418)..(418): "n" may be a, t, c, g, other or unknown
  misc_feature (472)..(472): "n" may be a, t, c, g, other or unknown
  misc_feature (481)..(481): "n" may be a, t, c, g, other or unknown
  misc_feature (528)..(528): "n" may be a, t, c, g, other or unknown
  misc_feature (531)..(531): "n" may be a, t, c, g, other or unknown
  misc_feature (551)..(551): "n" may be a, t, c, g, other or unknown
  misc_feature (571)..(571): "n" may be a, t, c, g, other or unknown
aaaaaggacttatccaaataatctggataataaatcgtttgcgtttcctaanaaactgggtttttcttttcccttgtggttttggtgtttttcttcttctttganccttactancggtctgaagctttctttctttcctttgcctttttgcttttggacagganaaagcagtttgtctgaattgtacttgactcttcnaanangaaaagggcgtggaaacanaagggggcttagggagaaaggacaaatcnataacggaggaanaaaacganaacggaactaaaacccatggaacccaaaaattnccgggctganggtgggggggtggaaggaaggcctcctgcctgcccgcccccaaccaactncctccagaagcttcagccccatcttggttcctgcacananatctcaggccaanaaaaaaaaaacgggggtggaaaaggaactctgggccctctaacaacaaaatacntggatttcnaaaggttgtccttggtctgggggttgggaaaaagaagaagaaaagcnctntggttttaactggaagaacnaaggcaacttccctccggang

SEQ ID NO: 7847 - DNA, 576 bp, Homo sapiens
  misc_feature (43)..(43): "n" may be a, t, c, g, other or unknown
  misc_feature (118)..(118): "n" may be a, t, c, g, other or unknown
  misc_feature (256)..(256): "n" may be a, t, c, g, other or unknown
  misc_feature (293)..(293): "n" may be a, t, c, g, other or unknown
  misc_feature (434)..(434): "n" may be a, t, c, g, other or unknown
  misc_feature (446)..(446): "n" may be a, t, c, g, other or unknown
  misc_feature (460)..(460): "n" may be a, t, c, g, other or unknown
  misc_feature (471)..(471): "n" may be a, t, c, g, other or unknown
  misc_feature (489)..(490): "n" may be a, t, c, g, other or unknown
  misc_feature (492)..(492): "n" may be a, t, c, g, other or unknown
  misc_feature (536)..(536): "n" may be a, t, c, g, other or unknown
  misc_feature (560)..(560): "n" may be a, t, c, g, other or unknown
  misc_feature (570)..(570): "n" may be a, t, c, g, other or unknown
gtagaggcagttccttttataaaaagcaggaagccttgtgtanactccaatgtataaaaaatagataagcatatacttgttgctgatagaagtagtagcacctaatgtccctgtgaanaatgtactgaacaagtttaattactacaagttgattttttattgagtgcaaagttaaaaataacgtattctggagctatatgttacaaaaaaaaacatgtacatggaaatcaaacttctatgccagaatgtggatganaaggaagcaaggccttccctgaccacccactccccanaattcagtgccctgcctggtcagctttttccataggccctggcactatctgagatatcatctgtctactcgctctagaatggaaattcttgagggcaggttatttttgcctgccatgttgatatccgcattcctctatctncaacatgtctancacacacaggtgcncagtacatgcncttaaggaacaataattnnantttgaatccctaacctcctttggctggttttgcaaaaaaaactnttttactttaaattacaagtttcngaattccaancctttt

SEQ ID NO: 7848 - DNA, 486 bp, Homo sapiens
  misc_feature (37)..(37): "n" may be a, t, c, g, other or unknown
  misc_feature (162)..(162): "n" may be a, t, c, g, other or unknown
  misc_feature (182)..(182): "n" may be a, t, c, g, other or unknown
  misc_feature (217)..(217): "n" may be a, t, c, g, other or unknown
  misc_feature (237)..(237): "n" may be a, t, c, g, other or unknown
  misc_feature (281)..(281): "n" may be a, t, c, g, other or unknown
  misc_feature (283)..(283): "n" may be a, t, c, g, other or unknown
  misc_feature (285)..(285): "n" may be a, t, c, g, other or unknown
  misc_feature (287)..(287): "n" may be a, t, c, g, other or unknown
  misc_feature (308)..(308): "n" may be a, t, c, g, other or unknown
  misc_feature (441)..(441): "n" may be a, t, c, g, other or unknown
  misc_feature (455)..(455): "n" may be a, t, c, g, other or unknown
  misc_feature (461)..(461): "n" may be a, t, c, g, other or unknown
  misc_feature (466)..(466): "n" may be a, t, c, g, other or unknown
  misc_feature (472)..(472): "n" may be a, t, c, g, other or unknown
  misc_feature (478)..(478): "n" may be a, t, c, g, other or unknown
  misc_feature (480)..(480): "n" may be a, t, c, g, other or unknown
ggatttctgattcagtttaatggtaaggagttgtgtnaaaccgtaccaagtcctgcttcttcctcaaaatgagctgggctgcatttttgtgactggaagcatttctcataatggtgaattaagcactataaaaaaataaagtcaatcccatctctatgagtngcataagagctgcttccaanaacccagggatgcccacatcccataacccacccanacacggccaattcctcatanacagctacataaaaccctttcgtcaacttgttttggggggtganananangcagtgcttagggaaaatgtnggatggattttttttattcctgccactaccaaaaactataaatctacacacacactcacacgcacatacatgtccatttttaagaaagcttttcctccctgtgactacaggaacccagaatccaccccccccngggtgaaaaaaaangcctanttacnggcccnattttncntttcac

SEQ ID NO: 7849 - DNA, 572 bp, Homo sapiens
  misc_feature (136)..(136): "n" may be a, t, c, g, other or unknown
  misc_feature (161)..(161): "n" may be a, t, c, g, other or unknown
  misc_feature (404)..(404): "n" may be a, t, c, g, other or unknown
  misc_feature (438)..(438): "n" may be a, t, c, g, other or unknown
  misc_feature (479)..(479): "n" may be a, t, c, g, other or unknown
  misc_feature (521)..(521): "n" may be a, t, c, g, other or unknown
  misc_feature (528)..(528): "n" may be a, t, c, g, other or unknown
  misc_feature (535)..(535): "n" may be a, t, c, g, other or unknown
  misc_feature (539)..(539): "n" may be a, t, c, g, other or unknown
  misc_feature (542)..(542): "n" may be a, t, c, g, other or unknown
  misc_feature (570)..(570): "n" may be a, t, c, g, other or unknown
ggaaaggtataaaacgtgatagatggaacagtagacatacaacttgaataacaagtcacagtgcatcgcgccatgaaaacacccctcccgcccacccaccccaccgtaccccacccactctggtttctgaaaggangctggtggtcaccagggccctaaanaggcacctggagtcctcaagattgtggagtccacggacatagcacactgtgccactagccacacagacagctgggcttagtttccccaaacattgccgtgtgaaggaatcagactgctgaatatggcagcaatggctggagccgtattacaggtgacaggttcacgcggaggatccgctgagcccgctgccgcacctcatcatccgaggaccgcctatctacctttatggcacggaacttcancagctttgctgttccaggccctaccatgccttangaaatcggggcccaaccctgttctctccttggaagaaaatntttgctccccaccctttcctctcctgcccaaaatctcagggnggtttcntggcctncctnttnttttggccttacaaattcctttggccgncc

SEQ ID NO: 7850 - DNA, 502 bp, Homo sapiens
  misc_feature (105)..(105): "n" may be a, t, c, g, other or unknown
  misc_feature (125)..(125): "n" may be a, t, c, g, other or unknown
  misc_feature (195)..(195): "n" may be a, t, c, g, other or unknown
  misc_feature (415)..(415): "n" may be a, t, c, g, other or unknown
  misc_feature (431)..(431): "n" may be a, t, c, g, other or unknown
  misc_feature (445)..(445): "n" may be a, t, c, g, other or unknown
  misc_feature (450)..(450): "n" may be a, t, c, g, other or unknown
  misc_feature (479)..(479): "n" may be a, t, c, g, other or unknown
  misc_feature (494)..(494): "n" may be a, t, c, g, other or unknown
  misc_feature (499)..(499): "n" may be a, t, c, g, other or unknown
aaaaggtttcaagttcaatagtcactctctccaaatacaaaaagcagttacaattcaactgaacacagaagcttgtgtgcaaagttatggggaactggggcatcntataaaaagttgggttaaanatgattctgtggtttggttttgttgtgttttgttttgtggctcttcctcagtcacctgaactcaggaaanaaatgcttatcttgatgaaatatcaacagcccacccacagtaaaaagacaaattctaaaaattaaaaaaaagcgcataattaccaaaaaaaagtcactgcttcctccccctccccattttgctttttaaacttttttttttttaagttttgattttttttttaatcctgaaaagtaaacagtaaaacagctcctggggaaaatttacaaccaactgcatnaaggtctgggaaactnaagggctggaacanggttnggaaaaattaacaggaagggatccccccnccatccctgttaccnccctnttt

SEQ ID NO: 7851 - DNA, 316 bp, Homo sapiens
  misc_feature (5)..(5): "n" may be a, t, c, g, other or unknown
  misc_feature (86)..(86): "n" may be a, t, c, g, other or unknown
  misc_feature (100)..(100): "n" may be a, t, c, g, other or unknown
  misc_feature (115)..(115): "n" may be a, t, c, g, other or unknown
  misc_feature (131)..(131): "n" may be a, t, c, g, other or unknown
  misc_feature (138)..(138): "n" may be a, t, c, g, other or unknown
  misc_feature (166)..(166): "n" may be a, t, c, g, other or unknown
  misc_feature (173)..(173): "n" may be a, t, c, g, other or unknown
  misc_feature (207)..(207): "n" may be a, t, c, g, other or unknown
  misc_feature (246)..(246): "n" may be a, t, c, g, other or unknown
  misc_feature (252)..(252): "n" may be a, t, c, g, other or unknown
  misc_feature (265)..(265): "n" may be a, t, c, g, other or unknown
  misc_feature (269)..(269): "n" may be a, t, c, g, other or unknown
  misc_feature (288)..(288): "n" may be a, t, c, g, other or unknown
  misc_feature (311)..(311): "n" may be a, t, c, g, other or unknown
  misc_feature (315)..(315): "n" may be a, t, c, g, other or unknown
gggtnatgctgaatcacatttattaccaaactttcctggccccatgctcacaggcactggtcactgattcaggcatttgccagggntgtctgcttgggcnactgctgcaggaaancaggctgaggccccantgcccantctgaaccttaaaaccggccctcagganggctcanccccataccactaggggggctcctgcaaacctgntcccttggcctgaggcagggatttcacctccttttgcangaaccnctgcaaggctgtngatnaaactttctggtcacaaanccccttctcctggggctgctgtnggant

SEQ ID NO: 7852 - DNA, 551 bp, Homo sapiens
  misc_feature (64)..(64): "n" may be a, t, c, g, other or unknown
  misc_feature (383)..(383): "n" may be a, t, c, g, other or unknown
  misc_feature (460)..(460): "n" may be a, t, c, g, other or unknown
  misc_feature (482)..(482): "n" may be a, t, c, g, other or unknown
  misc_feature (508)..(508): "n" may be a, t, c, g, other or unknown
  misc_feature (528)..(528): "n" may be a, t, c, g, other or unknown
  misc_feature (543)..(543): "n" may be a, t, c, g, other or unknown
  misc_feature (551)..(551): "n" may be a, t, c, g, other or unknown
catctaatcattttattaatatcatataactctgataattgtcaggtcttcatctttatcctanatcaatttgaaaagcatcacttttttacccgaataaaaatttccaattcagtttttcttcttttttcaattttctccgcctcaatttggcaagtatgacaaatgtacagatggttgacagctggtcctccaccatacctgctatataggttatcccaaatgttctgaggcagcatcaaaaccaggtcttcaatataaccagcttttcttggaggaacacctccatgaatacaaagaaagtcattatttgaaatagggccaggttcggcaaaggtcttaaatttattaagccactgtcgagaaatataaaactgaaggangcttggttccattatgttcaataaatttgatatccttctcctctctttttgtgcctcttcgctgctcttcctataanaaaaaaaacttagcttctggcntttgttcaataaaatccgaaacttcnattaaactctgatctccaantcctaccaaaaatantttaaatn

SEQ ID NO: 7853 - DNA, 516 bp, Homo sapiens
  misc_feature (199)..(199): "n" may be a, t, c, g, other or unknown
  misc_feature (202)..(202): "n" may be a, t, c, g, other or unknown
  misc_feature (429)..(429): "n" may be a, t, c, g, other or unknown
  misc_feature (434)..(434): "n" may be a, t, c, g, other or unknown
  misc_feature (443)..(443): "n" may be a, t, c, g, other or unknown
  misc_feature (446)..(446): "n" may be a, t, c, g, other or unknown
  misc_feature (466)..(466): "n" may be a, t, c, g, other or unknown
  misc_feature (479)..(479): "n" may be a, t, c, g, other or unknown
  misc_feature (505)..(505): "n" may be a, t, c, g, other or unknown
accacagtctaaagtccttgtattctcttccacataccagggctgataatttatcagttgccattgatcaaagttcacaaggcaaatcttcataaacttctaaagctgcctacagtttcccgtaaacaaatctctaaatttacaaaagcaatgcttgctgattgtaaaaaacacacagtgccaaagcatacaaaggaanaanacccgcttgcaatttgctacctacatcccactcttggggccaacaactattggaagtgtggtgagtgattgacttacatccttctagatcttatctacatatttgcaaagaaaaaatatacatatataaaataaaatatgtgtgggttatatccttacaaactgagatcataggcagttccgcaacttgccttttctctgtaacaataaatgatggatgctttgcanggttngtgctacanatnctatttatcctttaaaaagntgcataagaaccntgtggcccatgaaataatgcatgaanacctattgaac

SEQ ID NO: 7854 - DNA, 542 bp, Homo sapiens
  misc_feature (58)..(58): "n" may be a, t, c, g, other or unknown
  misc_feature (60)..(60): "n" may be a, t, c, g, other or unknown
  misc_feature (153)..(153): "n" may be a, t, c, g, other or unknown
  misc_feature (186)..(186): "n" may be a, t, c, g, other or unknown
  misc_feature (242)..(243): "n" may be a, t, c, g, other or unknown
  misc_feature (318)..(318): "n" may be a, t, c, g, other or unknown
  misc_feature (351)..(351): "n" may be a, t, c, g, other or unknown
  misc_feature (372)..(372): "n" may be a, t, c, g, other or unknown
  misc_feature (400)..(400): "n" may be a, t, c, g, other or unknown
  misc_feature (410)..(410): "n" may be a, t, c, g, other or unknown
  misc_feature (421)..(421): "n" may be a, t, c, g, other or unknown
  misc_feature (450)..(450): "n" may be a, t, c, g, other or unknown
  misc_feature (465)..(465): "n" may be a, t, c, g, other or unknown
gcaaaaaaaaaaacaaaaataagtgcattttatttaaacaacggaacaaacatcaganancatcccctgcaaagcccccaccccaaaacctgctgatggaagcggggctgcaggacgctctgccacaacggcagcatctccaactgcacaaanaccccttgctgccagggccgggcaccggcctanctcctcgcctgcctgcctgaggcagccgtggaatcagggcaggggtggcacaggtnnaaaagacagatggaaacaatgcccatgaatatacccaaagtgtcccaggaggataaaagccgtcatgaggaccanaagccaacccagtctttttttggcctcctgganaatttgtttttgagacctganactccacctgaaatggctccctgaaganccccacggancaagaagggtnttctgaagacacccctgaagaaaacacantgcctgcaaaagganagcccccaccaccctcccgcaagggtctggacactaaccccatcctgaaaaggtcaaaaaaaaatgaatctccaaaa

SEQ ID NO: 7855 - DNA, 507 bp, Homo sapiens
  misc_feature (141)..(141): "n" may be a, t, c, g, other or unknown
  misc_feature (415)..(415): "n" may be a, t, c, g, other or unknown
  misc_feature (429)..(429): "n" may be a, t, c, g, other or unknown
  misc_feature (444)..(444): "n" may be a, t, c, g, other or unknown
  misc_feature (450)..(450): "n" may be a, t, c, g, other or unknown
  misc_feature (470)..(470): "n" may be a, t, c, g, other or unknown
  misc_feature (473)..(473): "n" may be a, t, c, g, other or unknown
  misc_feature (497)..(497): "n" may be a, t, c, g, other or unknown
ggtcatttcctttttatctgtcaggcagccagctctgacttactctctgtttctgtcatctctcccccacataccaacttcttcaccatgatgattataccaataatacagttccttatatgaggggctctggaaaattanacagtgaagcatgttgcagattacatgttaaacaggtctaattcacaatgaatgacaacttgagacaatatgagacagttttcagacaacagttttgtggcaggtaggggactcctttctctgcttactcttcttggctgaggttgtgttgcactggctgaggttgctgaaacagtggcccatggatggagatgtataatcagaagcaaggagacacagttctccgctggagtcttctaaagaaatcaagcctgcccatacttttgattttggncttctggtctccanaacttaacccaaaantccaantccaaaatccatcccaaganaangaaaaatccctcctgcctgttaanccgttgttcc

SEQ ID NO: 7856 - DNA, 549 bp, Homo sapiens
  misc_feature (65)..(65): "n" may be a, t, c, g, other or unknown
  misc_feature (301)..(301): "n" may be a, t, c, g, other or unknown
  misc_feature (303)..(303): "n" may be a, t, c, g, other or unknown
  misc_feature (341)..(341): "n" may be a, t, c, g, other or unknown
  misc_feature (417)..(417): "n" may be a, t, c, g, other or unknown
  misc_feature (436)..(436): "n" may be a, t, c, g, other or unknown
  misc_feature (466)..(466): "n" may be a, t, c, g, other or unknown
  misc_feature (488)..(488): "n" may be a, t, c, g, other or unknown
  misc_feature (498)..(498): "n" may be a, t, c, g, other or unknown
  misc_feature (527)..(527): "n" may be a, t, c, g, other or unknown
  misc_feature (534)..(534): "n" may be a, t, c, g, other or unknown
  misc_feature (543)..(543): "n" may be a, t, c, g, other or unknown
  misc_feature (547)..(547): "n" may be a, t, c, g, other or unknown
aatgcttttattctacataaattactaccataggctaatgtttaaaaagcaaataaactggacanatgcaggacaaaatctggtcacccaactataaaaggtgatgtttttaaaaaattacaataaatgcagaagtgatgcatgcagtaaccttaattcccactgttccagaaaagaaaaaacagaaaaacccacacatcttactgtactccaccttaaaatgcatcatattgggtttgtttataacagcacagaattccaagagtcaaaatgaaataaagcaggtattttaaagtttaananccgttatcaaaaataaattacattttttcaaaatacanaaatgctgctatgatggctgggagcccagtaacctttcaatagctgcattgatatcacctcctgttgctattaaancttgcaagtttgcttcccnggtccaaaatcccattgcctgaattgtccnattgttgctgaaatctgactcnggatccgttnctgaagattacccacaaaaactgcacatnggcgaanaactgtganggcnat

SEQ ID NO: 7857 - DNA, 577 bp, Homo sapiens
  misc_feature (111)..(111): "n" may be a, t, c, g, other or unknown
  misc_feature (285)..(285): "n" may be a, t, c, g, other or unknown
  misc_feature (312)..(312): "n" may be a, t, c, g, other or unknown
  misc_feature (435)..(435): "n" may be a, t, c, g, other or unknown
  misc_feature (439)..(439): "n" may be a, t, c, g, other or unknown
  misc_feature (468)..(468): "n" may be a, t, c, g, other or unknown
  misc_feature (476)..(476): "n" may be a, t, c, g, other or unknown
  misc_feature (543)..(543): "n" may be a, t, c, g, other or unknown
  misc_feature (547)..(547): "n" may be a, t, c, g, other or unknown
  misc_feature (567)..(567): "n" may be a, t, c, g, other or unknown
  misc_feature (577)..(577): "n" may be a, t, c, g, other or unknown
ctagactgaaacaaaaagcccatcccatatcataacatataatactgcctaaataaaactttctatgatgatagaaacattaagtatctacactggtatagcagccactanccccacatggctagtgaacacttgaaatgtggcttgtgttactgagaactgaattttaaattttacttaatacaaaattaagcagccatatgtggctagtggctaccatgctagacatcgcagtattagaacataaaaaaattctataagtaactagaatactggtagtcctanacgtttcttgcattctgaaagccatanaactgaagttgttatgtatggttatttctactttttaaaaaaagcaaattcttgctggtctatataatagaatgacttattttcttacgtggtaagaacagaaatcctacaaggaactggganctangctggcagggaaaaattgaaggtgatttntttaatangaatgttatgccaattcttctgttttccaaaaaaaaaaattattgcttatgaacattactggaaccngggntttttgtttttttacttaanttaataggtn

SEQ ID NO: 7858 - DNA, 565 bp, Homo sapiens
  misc_feature (31)..(31): "n" may be a, t, c, g, other or unknown
  misc_feature (74)..(74): "n" may be a, t, c, g, other or unknown
  misc_feature (92)..(92): "n" may be a, t, c, g, other or unknown
  misc_feature (102)..(102): "n" may be a, t, c, g, other or unknown
  misc_feature (117)..(117): "n" may be a, t, c, g, other or unknown
  misc_feature (153)..(153): "n" may be a, t, c, g, other or unknown
  misc_feature (159)..(159): "n" may be a, t, c, g, other or unknown
  misc_feature (163)..(163): "n" may be a, t, c, g, other or unknown
  misc_feature (194)..(194): "n" may be a, t, c, g, other or unknown
  misc_feature (210)..(210): "n" may be a, t, c, g, other or unknown
  misc_feature (227)..(227): "n" may be a, t, c, g, other or unknown
  misc_feature (250)..(250): "n" may be a, t, c, g, other or unknown
  misc_feature (276)..(276): "n" may be a, t, c, g, other or unknown
  misc_feature (327)..(327): "n" may be a, t, c, g, other or unknown
  misc_feature (330)..(330): "n" may be a, t, c, g, other or unknown
  misc_feature (333)..(333): "n" may be a, t, c, g, other or unknown
  misc_feature (343)..(343): "n" may be a, t, c, g, other or unknown
  misc_feature (446)..(446): "n" may be a, t, c, g, other or unknown
  misc_feature (467)..(467): "n" may be a, t, c, g, other or unknown
  misc_feature (484)..(484): "n" may be a, t, c, g, other or unknown
gaacattcacaacctttattatgggtgagancttcactacaactttagaaataaaaagtaaaattacaacatangtcctaggccttggcgancctgaaaaanaaaattgggaaaganggcacagggtccttccacctccctggaaaggtgcanaatganccangcctaactacagggccatgagcctctataancttaggggggaataanaaacactgtgaacttanatatataaatagagagagacccnagcaataggccgggcctgactcccanacccctgcagatcatggctaaggccttacatcctcctctgtcatactggantangangcaggggaantcatctttggagtattttggtttttcttatttatgtacaaaaaagtccacatccacaatccaaaataaagttctctgtccatctctgaaactgcctgtctcantttttcccctgtctgtttggnccaagggaatggaattnacttaaaaaaccatggattttaaaaaaaaataaaccctggttttggttattaaaaaaaaaacatttgggttcaaaaaattc

SEQ ID NO: 7859 - DNA, 571 bp, Homo sapiens
  misc_feature (188)..(188): "n" may be a, t, c, g, other or unknown
  misc_feature (238)..(238): "n" may be a, t, c, g, other or unknown
  misc_feature (242)..(242): "n" may be a, t, c, g, other or unknown
  misc_feature (422)..(422): "n" may be a, t, c, g, other or unknown
  misc_feature (527)..(527): "n" may be a, t, c, g, other or unknown
  misc_feature (542)..(542): "n" may be a, t, c, g, other or unknown
  misc_feature (545)..(545): "n" may be a, t, c, g, other or unknown
  misc_feature (552)..(552): "n" may be a, t, c, g, other or unknown
  misc_feature (554)..(554): "n" may be a, t, c, g, other or unknown
  misc_feature (566)..(566): "n" may be a, t, c, g, other or unknown
atttccatacatgtttattatatacacactgcctatagattctgtttaaataatctctaagaaaaaaatcaaacttttctgagcaggtgattaagctgaaaacaaccaattaaaaccaccactttttaagtgacctttggtcacaaatgtcaaaatgtttccacaccctttccaccctcaaacaaganacaaactgtttttgataaactctagtatttattaaattataaattttgtnatcnaaaagaaaaatgcagaccaaaaaaacctcaaactataagactagacagcaaagcctatgggaacaccatgaagtgtgttacaaacattctgaaacataagttactggctgttttcatttccatttcaataactttactataaaatagttgttattcatctattttgaaatcccaaattcncatctattcatacattaaattatgtttcctgttcataatatcaaacatctcacaggtgccaaatttaataatggtcttatgccatccctgccgaaaaaataaganaccatgccggatccnatnaggaccntnatgcccgatatncaacc

SEQ ID NO: 7860 - DNA, 565 bp, Homo sapiens
  misc_feature (454)..(454): "n" may be a, t, c, g, other or unknown
  misc_feature (480)..(480): "n" may be a, t, c, g, other or unknown
  misc_feature (504)..(504): "n" may be a, t, c, g, other or unknown
  misc_feature (508)..(508): "n" may be a, t, c, g, other or unknown
  misc_feature (515)..(515): "n" may be a, t, c, g, other or unknown
  misc_feature (518)..(518): "n" may be a, t, c, g, other or unknown
cttcaatgtttattattttcgtattttttcacttaatactacataaaatctaagatctcagctcttggaatacagaaaaatagtttcaaagtgtattttagcaaaacaatttataatgaaattagcatttgtgaattaagcatgtcaacattactgtgttgcttgttaggcacactgcttatttgtacagctttatcagtcagttccatcatttcaatattttggcccaccacaccactttgaaacatgtaatgaagggcaagttttataataaaaaaaacaacttggcattactcaacgggaagtcagtacatgttttttgcaaggagaacaacataactgtttaatgatgctgtcttcaatatactacctaattctgtttatgcaacttctcaccaggtaattgttttttatggtcagttttgcttttctttgtcccctagtcaagggaganttgttagtgttgttatctggaaattncctcatgtcgaataaaaccactanatgnactcatnatntaggtgttttctctagtaccattacacaaaaaaaaaggtccccaaaa

SEQ ID NO: 7861 - DNA, 534 bp, Homo sapiens
  misc_feature (416)..(416): "n" may be a, t, c, g, other or unknown
  misc_feature (445)..(445): "n" may be a, t, c, g, other or unknown
  misc_feature (448)..(448): "n" may be a, t, c, g, other or unknown
  misc_feature (473)..(473): "n" may be a, t, c, g, other or unknown
  misc_feature (488)..(488): "n" may be a, t, c, g, other or unknown
  misc_feature (503)..(503): "n" may be a, t, c, g, other or unknown
  misc_feature (507)..(507): "n" may be a, t, c, g, other or unknown
  misc_feature (517)..(517): "n" may be a, t, c, g, other or unknown
ctgtgggagtataaatatggggacatgactatgggactatatattttcacattgttagcactttgttagtacagttacttttaggtattgtcttttagtagcattattaaagttaaaaaataaaggaaacagaagtaaagagtttatagaaggatacacagaaatacggtacttatctctgagtggtgacattagaatgggtttttcattctatcctttttactttatttatacattgcttatataacagatatcattcaagagcaatgaagataactgtataatgctatggcgtcaacttaccttagcatacaaccaacttgataataaataatggtcaaatggccaaacctaccaatccacagaagatcattcaaatatctaaaatgattatggatcagacatacagaataccnaacataggatacaaacaacaacaacaacnacnacaatttcccatgattaaagcccanggctttaaaaaaaanaccctttcttaggtntttncacctaaatnttttcccccccaaaatt

SEQ ID NO: 7862 - DNA, 553 bp, Homo sapiens; identical to SEQ ID NO: 5578
  misc_feature (1)..(553): "n" may be a, t, c, g, other or unknown

SEQ ID NO: 7863 - DNA, 520 bp, Homo sapiens
  misc_feature (3)..(3): "n" may be a, t, c, g, other or unknown
  misc_feature (14)..(14): "n" may be a, t, c, g, other or unknown
  misc_feature (44)..(44): "n" may be a, t, c, g, other or unknown
  misc_feature (50)..(50): "n" may be a, t, c, g, other or unknown
  misc_feature (57)..(57): "n" may be a, t, c, g, other or unknown
  misc_feature (59)..(59): "n" may be a, t, c, g, other or unknown
  misc_feature (150)..(150): "n" may be a, t, c, g, other or unknown
  misc_feature (193)..(193): "n" may be a, t, c, g, other or unknown
  misc_feature (209)..(209): "n" may be a, t, c, g, other or unknown
  misc_feature (223)..(223): "n" may be a, t, c, g, other or unknown
  misc_feature (261)..(261): "n" may be a, t, c, g, other or unknown
  misc_feature (263)..(263): "n" may be a, t, c, g, other or unknown
  misc_feature (265)..(265): "n" may be a, t, c, g, other or unknown
  misc_feature (283)..(283): "n" may be a, t, c, g, other or unknown
  misc_feature (295)..(295): "n" may be a, t, c, g, other or unknown
  misc_feature (334)..(334): "n" may be a, t, c, g, other or unknown
  misc_feature (363)..(363): "n" may be a, t, c, g, other or unknown
  misc_feature (385)..(385): "n" may be a, t, c, g, other or unknown
  misc_feature (409)..(409): "n" may be a, t, c, g, other or unknown
  misc_feature (430)..(430): "n" may be a, t, c, g, other or unknown
  misc_feature (448)..(448): "n" may be a, t, c, g, other or unknown
  misc_feature (463)..(463): "n" may be a, t, c, g, other or unknown
  misc_feature (471)..(471): "n" may be a, t, c, g, other or unknown
  misc_feature (478)..(478): "n" may be a, t, c, g, other or unknown
  misc_feature (488)..(488): "n" may be a, t, c, g, other or unknown
  misc_feature (513)..(513): "n" may be a, t, c, g, other or unknown
atnggacaacacanatttattatgtttatgacatgttaaataanctgganaggttanantgacagttctcagtgttaccttttcaggttcatctttccctaaagtacagcaaaccaaaaaaaaattaaattaacttggatcaatttcccnaatagggaatctaagtgactatagaaaaatttacagaaatacntctggaataacacacncagacatatatttnctaataactgttaacataaaaaacagctaaaatttctncncncagaaaacagatgccaanatgacaaataantccaggtaggcattgtaaaatctggttaaatacactaanaaaaatactaaactggtgagttttacccnacagggaatcttaaaataccanaaaagtacctccaattttaccttntttggaaatgaaacaaattcnttattttaatatttaaanattgtggtagtatantccaaacncttaatnttataatatncctttagaaattaaatttaagtccncccaccc

SEQ ID NO: 7864 - DNA, 543 bp, Homo sapiens
  misc_feature (7)..(7): "n" may be a, t, c, g, other or unknown
  misc_feature (24)..(24): "n" may be a, t, c, g, other or unknown
  misc_feature (39)..(40): "n" may be a, t, c, g, other or unknown
  misc_feature (117)..(117): "n" may be a, t, c, g, other or unknown
  misc_feature (146)..(146): "n" may be a, t, c, g, other or unknown
  misc_feature (160)..(160): "n" may be a, t, c, g, other or unknown
  misc_feature (185)..(185): "n" may be a, t, c, g, other or unknown
  misc_feature (191)..(191): "n" may be a, t, c, g, other or unknown
  misc_feature (194)..(194): "n" may be a, t, c, g, other or unknown
  misc_feature (209)..(209): "n" may be a, t, c, g, other or unknown
  misc_feature (275)..(275): "n" may be a, t, c, g, other or unknown
  misc_feature (310)..(310): "n" may be a, t, c, g, other or unknown
  misc_feature (320)..(320): "n" may be a, t, c, g, other or unknown
  misc_feature (323)..(323): "n" may be a, t, c, g, other or unknown
  misc_feature (359)..(359): "n" may be a, t, c, g, other or unknown
  misc_feature (362)..(362): "n" may be a, t, c, g, other or unknown
  misc_feature (413)..(413): "n" may be a, t, c, g, other or unknown
  misc_feature (448)..(448): "n" may be a, t, c, g, other or unknown
  misc_feature (463)..(463): "n" may be a, t, c, g, other or unknown
  misc_feature (472)..(472): "n" may be a, t, c, g, other or unknown
  misc_feature (481)..(481): "n" may be a, t, c, g, other or unknown
  misc_feature (515)..(515): "n" may be a, t, c, g, other or unknown
  misc_feature (528)..(528): "n" may be a, t, c, g, other or unknown
  misc_feature (537)..(537): "n" may be a, t, c, g, other or unknown
gtttganaaatcttttattagaanatgtcccagaagggnnacattttaaaatcaggcaatcagtaatcacaactaaatacaaaatttcaggtgaacttgcctttcaaaataaatcanacccttgcaacaggaaattgccccaagantttttttccttgtncaaaaacagttaacaccactttgcnaaaggnatncaaaaatacaatatnaaaaaaaaagactcccccagcataatagccaacagcagcttataaaacacaagctattcagttganacatcagtaacctacacccaaactgtcctccatanacaattccanaantcagctggcttttgttaaccatgctccaaaagggtnaanaggctatttccaaacatcccctggggtcctctgaaggcaagaagcacctcngaaagaaaccattatggacaataaatttggaaatncagctggttttcccnaaccatatntattcttancacccctaccaccccaacttccaaacccaaaccncagggccctgctnttcttgggnaaaatt

SEQ ID NO: 7865 - DNA, 552 bp, Homo sapiens
  misc_feature (72)..(72): "n" may be a, t, c, g, other or unknown
  misc_feature (81)..(81): "n" may be a, t, c, g, other or unknown
  misc_feature (349)..(349): "n" may be a, t, c, g, other or unknown
  misc_feature (451)..(451): "n" may be a, t, c, g, other or unknown
  misc_feature (482)..(482): "n" may be a, t, c, g, other or unknown
  misc_feature (491)..(491): "n" may be a, t, c, g, other or unknown
  misc_feature (497)..(497): "n" may be a, t, c, g, other or unknown
  misc_feature (535)..(535): "n" may be a, t, c, g, other or unknown
aggatctgtaaactacatttattgaatacttactggacacatcatatacaaaaaaggatgggggcaggtaanaacttgaanaaattaaatatacacattaagtttcttcactaattctagccactaaagaagtacaaaatttgtacaagtaatactttataatgaaattttgatgcctgtcaaaagggtaataagctatacatatactacaataaacatttttaaaaactgtgcttaatatcatagaattttcttaaaatgggttggtaaaatacctatatagcatccattcttacacacatattttccactaaagattgcttaaatagtacaaattcctattgctaanaaattcatggtcaacagctgtatatgaagttcctctaagaaacatcacagcatttgcagtaagtccatttctccagtgaagcccaccttattttcagtttancttactaacaagttctcatgaaaacgtttanatgtctttngctggncacctcctccagtttccgaatcctttttaaacaatttnaatttcccaaatggttt

SEQ ID NO: 7866 - DNA, 481 bp, Homo sapiens
  misc_feature (4)..(4): "n" may be a, t, c, g, other or unknown
  misc_feature (91)..(91): "n" may be a, t, c, g, other or unknown
  misc_feature (105)..(105): "n" may be a, t, c, g, other or unknown
  misc_feature (185)..(185): "n" may be a, t, c, g, other or unknown
  misc_feature (207)..(207): "n" may be a, t, c, g, other or unknown
  misc_feature (220)..(220): "n" may be a, t, c, g, other or unknown
  misc_feature (235)..(235): "n" may be a, t, c, g, other or unknown
  misc_feature (257)..(257): "n" may be a, t, c, g, other or unknown
  misc_feature (268)..(268): "n" may be a, t, c, g, other or unknown
  misc_feature (280)..(280): "n" may be a, t, c, g, other or unknown
  misc_feature (297)..(297): "n" may be a, t, c, g, other or unknown
  misc_feature (323)..(323): "n" may be a, t, c, g, other or unknown
  misc_feature (325)..(325): "n" may be a, t, c, g, other or unknown
  misc_feature (444)..(446): "n" may be a, t, c, g, other or unknown
  misc_feature (453)..(453): "n" may be a, t, c, g, other or unknown
  misc_feature (460)..(460): "n" may be a, t, c, g, other or unknown
  misc_feature (462)..(462): "n" may be a, t, c, g, other or unknown
  misc_feature (469)..(469): "n" may be a, t, c, g, other or unknown
ccanaatgaaattttattgtgtaaagtttatagaagtatgactagtattcctttgtacaaagtacacaacggttttaaatataactgaganaaatgtgagtcctntgacaacatctgatacacgctgaaccatttacagacacactaaaaatgttttaaaatatcttctttctccaaagagtccnttgcgcatttcttagagtaaanatggggacacatnccaggcaaggtcacnatggcattttgttgccctcaangctgattttcnctgcgtgtgcanatctgctttttttcctnatatctgtgaactttctcatctgttnanccagtcgaccgatacccttcttggaggtcgcctgaaacctggatgactccatttccacattccatttgggcctgaacaacatatccttgtttgaaggcattgggacccttgcacgggcnnnaatcccnggatctncncgtcttngaacctctcccc

SEQ ID NO: 7867 - DNA, 534 bp, Homo sapiens
  misc_feature (79)..(79): "n" may be a, t, c, g, other or unknown
  misc_feature (357)..(357): "n" may be a, t, c, g, other or unknown
  misc_feature (381)..(381): "n" may be a, t, c, g, other or unknown
  misc_feature (423)..(423): "n" may be a, t, c, g, other or unknown
  misc_feature (463)..(463): "n" may be a, t, c, g, other or unknown
  misc_feature (468)..(468): "n" may be a, t, c, g, other or unknown
  misc_feature (471)..(471): "n" may be a, t, c, g, other or unknown
  misc_feature (487)..(487): "n" may be a, t, c, g, other or unknown
  misc_feature (490)..(490): "n" may be a, t, c, g, other or unknown
  misc_feature (513)..(513): "n" may be a, t, c, g, other or unknown
  misc_feature (532)..(532): "n" may be a, t, c, g, other or unknown
atttttttttcctcttaagagtaatatatacacaacacagcagctacatgggtgttcaggcaaagggtgcatgaacganaagccctctgctccctgcccgatgagaaagtccccagaaaggattcagcagcagcaagtctacagcacaaacatggatggcattgtccctgaaaacacacagttaggtggacctacaggagacattggagcctaaacatgtgggaaagggctcagttacagtacattctactgcatacacttgaaatattacagtgtgttttttctccagactattataaataatttttcgtgctttctgaaaaaaataaaaactgaaactttcagtctgcgatgaangtgaacccatcttataaagcagancttacttacattctgcaggattttggtgtggatgcataaaangcttacctggttagtaagcctccattcctccgaactacanaaagnaanccttctgcactcccancanggaattcttaaaaaaaacaagtnttttaaaaatcttactttncc

SEQ ID NO: 7868 - DNA, 563 bp, Homo sapiens
  misc_feature (494)..(494): "n" may be a, t, c, g, other or unknown
  misc_feature (503)..(503): "n" may be a, t, c, g, other or unknown
  misc_feature (533)..(533): "n" may be a, t, c, g, other or unknown
  misc_feature (552)..(552): "n" may be a, t, c, g, other or unknown
  misc_feature (557)..(559): "n" may be a, t, c, g, other or unknown
gatttgaaactttattatataaattttcatttcttttaaagattacaaaacctgttctatgacaggaatacaagcaatattgttccaggattattcatggatacatctgaagagcttagattacacattaatagtatgatttgaaaacttcccagattagactcttaagtaaaacaatttaaagtatttagtgatatttgatcctttacaagcattttataattatggcagcaatgccaagcatctgatgcgatttaaccaccaacaaaaggtacaatatgtaagaattcatgatatggtatcttgggcttctggcatgccttactagagagaaactagtataaaggaagatcatatataacagtagaaaaatatttgtgatttttttcttttttaaaaactatttaagtaggcacccaccccattcccacccatgaccaaaaatgcaaaataagtacatcccttaggtgtataccttcccttttgcttagggngcagttaanataaactaataccgtttttgaattttaganttttaaacccccccccccntcccnnngggg

SEQ ID NO: 7869 - DNA, 567 bp, Homo sapiens
  misc_feature (62)..(62): "n" may be a, t, c, g, other or unknown
  misc_feature (502)..(502): "n" may be a, t, c, g, other or unknown
  misc_feature (513)..(514): "n" may be a, t, c, g, other or unknown
  misc_feature (517)..(517): "n" may be a, t, c, g, other or unknown
  misc_feature (535)..(535): "n" may be a, t, c, g, other or unknown
  misc_feature (548)..(548): "n" may be a, t, c, g, other or unknown
  misc_feature (562)..(562): "n" may be a, t, c, g, other or unknown
aaattttttcctttcaatttttattcattcagcaaatactaagctcccactatgcacataanagatgttcaatcaatgttagatgaagggaaaatattcagaaattcacaagtcactccagcactccaaaaacatacaactcttcatgctcctcccttctccgttcttggcctcatctctgcccacatcacaggttgttaaatgctcacatgaacaagaacttaagcacagtatgacatggcctgtgacttatacaaatgtctgtcccaccaagaggccatcttttaaagtaggtactagttccaagcctaaaaacaccctaacgggtcttcagcttcatctgaggatatgccacagtgatcatgcctgctatagaggacacaagacctccaagtccaatgatgccaggattggatttatagatccccagctggtccaaagggttcaggatatcacaaaggttcttcactgtgtccaagaacaagggaagatgctgcttccnaaatctgaatnnaanaattttaaaggattgggnccttctgtttccncccccccccccctnaaacc

SEQ ID NO: 7870 - DNA, 571 bp, Homo sapiens
  misc_feature (139)..(139): "n" may be a, t, c, g, other or unknown
  misc_feature (144)..(144): "n" may be a, t, c, g, other or unknown
  misc_feature (171)..(171): "n" may be a, t, c, g, other or unknown
  misc_feature (326)..(326): "n" may be a, t, c, g, other or unknown
  misc_feature (496)..(496): "n" may be a, t, c, g, other or unknown
  misc_feature (513)..(513): "n" may be a, t, c, g, other or unknown
  misc_feature (523)..(523): "n" may be a, t, c, g, other or unknown
  misc_feature (534)..(534): "n" may be a, t, c, g, other or unknown
  misc_feature (537)..(537): "n" may be a, t, c, g, other or unknown
  misc_feature (543)..(543): "n" may be a, t, c, g, other or unknown
  misc_feature (562)..(562): "n" may be a, t, c, g, other or unknown
gcacgtagtaacttatagatatatttggaaaactgattatcttttaaaaaatgactactaaacagattaaaatgcagagttcattaaaatacagaggatgcctctggttctctggtattgactctttttgtctactaanataanaagtctgggctaggctgaaaaactcanaatccaggtctggggtttcccagtactatgctcccatttccgagtactgtgctcctatttcccagtactgtgaactcccctttcccagtactgtgggctcccatttcccagtactgtgtgctcccatttctcagtactgtatgcccatttcccantactgtgctcccatttctcagtagtgtactcccatttctcagtactgtgctcccacttctcagtactgtgctcccacttcccagtactgtgctcccatttcccaatactgtgctcccattttgcagtgctgtgagcccccatttcccagtactgtgctcccatttcgcantactgtgctccattccnaatacgtgcncccattccccnaangttgtnccaagtgtttaaaaaaatntccggggaa

SEQ ID NO: 7871 - DNA, 593 bp, Homo sapiens
  misc_feature (39)..(39): "n" may be a, t, c, g, other or unknown
  misc_feature (88)..(88): "n" may be a, t, c, g, other or unknown
  misc_feature (94)..(94): "n" may be a, t, c, g, other or unknown
  misc_feature (113)..(113): "n" may be a, t, c, g, other or unknown
  misc_feature (116)..(116): "n" may be a, t, c, g, other or unknown
  misc_feature (226)..(226): "n" may be a, t, c, g, other or unknown
  misc_feature (243)..(243): "n" may be a, t, c, g, other or unknown
  misc_feature (251)..(251): "n" may be a, t, c, g, other or unknown
  misc_feature (312)..(312): "n" may be a, t, c, g, other or unknown
  misc_feature (374)..(374): "n" may be a, t, c, g, other or unknown
  misc_feature (441)..(441): "n" may be a, t, c, g, other or unknown
  misc_feature (449)..(449): "n" may be a, t, c, g, other or unknown
  misc_feature (501)..(501): "n" may be a, t, c, g, other or unknown
  misc_feature (520)..(520): "n" may be a, t, c, g, other or unknown
  misc_feature (540)..(540): "n" may be a, t, c, g, other or unknown
  misc_feature (561)..(561): "n" may be a, t, c, g, other or unknown
  misc_feature (585)..(585): "n" may be a, t, c, g, other or unknown
cgactggggcaggcgggctttattccgggtgctggaaanctgtgggccccactcctcccccaaaatgccaccgggttgaggggctgancctcancaggggtgagcgctcaaancangaaggggatgatgggcatgcgcaggggcgggtaatcccggaactccttcaggtaactgcggtgcttgcccttggcccaaatggtcatctgggtgaagcccaccagggganaacagggccactggganacactgcntcatgatggcgaaaccgatccaggaccccacctcgtaggtgtatttggggcaggacaccancaggaaaagccacgtgaaggggttcttggtggggtatgggatcttccgcgtcttggacccancgggccgcaggtcccgcagggccatgtggatggaaaatttccgagctggcatatcacaaaaatggcnaacgccantttcacctgctgaactccgtaggtagggggaatttaaaaaaggtgattgatnttataggccaccacccgcnaaccccattattagttgcantccttgaaaattttccccaangcatattccctgggaaaaaccgtnccaaaaac

SEQ ID NO: 7872 - DNA, 512 bp, Homo sapiens
  misc_feature (60)..(60): "n" may be a, t, c, g, other or unknown
  misc_feature (93)..(93): "n" may be a, t, c, g, other or unknown
  misc_feature (144)..(144): "n" may be a, t, c, g, other or unknown
  misc_feature (151)..(151): "n" may be a, t, c, g, other or unknown
  misc_feature (197)..(197): "n" may be a, t, c, g, other or unknown
  misc_feature (202)..(202): "n" may be a, t, c, g, other or unknown
  misc_feature (255)..(255): "n" may be a, t, c, g, other or unknown
  misc_feature (291)..(291): "n" may be a, t, c, g, other or unknown
  misc_feature (424)..(424): "n" may be a, t, c, g, other or unknown
  misc_feature (427)..(427): "n" may be a, t, c, g, other or unknown
  misc_feature (433)..(433): "n" may be a, t, c, g, other or unknown
  misc_feature (443)..(443): "n" may be a, t, c, g, other or unknown
  misc_feature (448)..(448): "n" may be a, t, c, g, other or unknown
  misc_feature (456)..(456): "n" may be a, t, c, g, other or unknown
  misc_feature (483)..(483): "n" may be a, t, c, g, other or unknown
gtcaccaggactatttattatttcacttaatagattaaacagtgaattcacagaacatcnagtggggatatcaaagctttaggcaaaagggtnaaaaccaatagtgttttggtcatctagaacattaaaaagaaaaaagagccntccttcnaaaacaaaacaaatgaaacagaaaataggtttataagaggtggaanagtcngaaaaattacatacacacattaacaacatagaacatggattacctttggaaanaatcatactgaaatgtttgcttttaataaattgaanatttttcatgtttacagatgtttgggtatgttcaataggagcttccaaaaatgtcaaactaattcagtcttgtgcaaataaaacctaaaaatagttttcagcagattttacagtgatattcttagggtatganaanaatgcncaccctctanaaacnatgaaacngaccaaagtttgacaatgaatggcccntaaaacaatgttttttttccgttacaaaa

SEQ ID NO: 7873 - DNA, 567 bp, Homo sapiens
  misc_feature (102)..(102): "n" may be a, t, c, g, other or unknown
  misc_feature (108)..(108): "n" may be a, t, c, g, other or unknown
  misc_feature (152)..(152): "n" may be a, t, c, g, other or unknown
  misc_feature (243)..(243): "n" may be a, t, c, g, other or unknown
  misc_feature (270)..(270): "n" may be a, t, c, g, other or unknown
  misc_feature (299)..(299): "n" may be a, t, c, g, other or unknown
  misc_feature (496)..(496): "n" may be a, t, c, g, other or unknown
  misc_feature (508)..(508): "n" may be a, t, c, g, other or unknown
  misc_feature (516)..(516): "n" may be a, t, c, g, other or unknown
  misc_feature (535)..(535): "n" may be a, t, c, g, other or unknown
  misc_feature (540)..(540): "n" may be a, t, c, g, other or unknown
  misc_feature (546)..(546): "n" may be a, t, c, g, other or unknown
  misc_feature (561)..(561): "n" may be a, t, c, g, other or unknown
aatatttatcaacagtatatttgacaaaaaccacccccaatcgatggcagaaagcagtattttctagctggcactgaaacttaacctatttttttgaggganaaaaanactaaaatgtaagcactaacttcctccttctgcatcttccacanaaaacccacttgtgggcattctctttctgtccgttatcagtgggtttacatccgaaggccggcggcaagacacttgaaccacaaacaccanacatgcaggtgtctcaatggcatgcanattatttaaagtgcatcacttgtgagaancttctcaaatttctgactgtcataaccaggtgtcacctaaaatctgtcctgtaggccaagatgctacacgcagcgcccaggcagtcagaggtaagtgagcgcctcccgcctcagaaagcttttacagggccacgctcgccaggctttcctcgcccacgctgaaccacgtcctgggcacagcaactcccaagctgtcncaatccgctggnaatgccancacacctctccgaatcatncacantggtgnctctataactctcanccaacc

SEQ ID NO: 7874 - DNA, 588 bp, Homo sapiens
  misc_feature (458)..(458): "n" may be a, t, c, g, other or unknown
  misc_feature (569)..(569): "n" may be a, t, c, g, other or unknown
  misc_feature (583)..(583): "n" may be a, t, c, g, other or unknown
gagatggagtctcgctctgtcgcccaggcaggagtgcagtggagagatctcggctcactgcaagctccgcctcccaggttcacgtcattctcctgcctcagcctcccaagtagctgggactacaggcgcccgccaccatgctcagctaattttttttttgtatttttagtaaagatggggtttcaccatgttagccaggatggtttcgatctcctgacctcgtgatccgcccaccttggcctcccaaagtgctgggattacaggcgtgagccaccacacctggccaaaatcctatacattaaatgtttgtcttacccaaaccccaaagttaaattgtaaatataaaacccacagcgggggtgagaaaactggagaacagtctttctctattttcctacaatcttcaaataagaagtatctgcttatataagacaggttagtggcaatacctggcttanaaagtttctagatttatttctagctctctacatactgtgataaagtcctaaagtttaaaaatacccccaatattacaggcatgctgctttataaaatatgccctaaattcnaaccaaatactccnttctt

SEQ ID NO: 7875 - DNA, 575 bp, Homo sapiens
  misc_feature (18)..(18): "n" may be a, t, c, g, other or unknown
  misc_feature (63)..(63): "n" may be a, t, c, g, other or unknown
  misc_feature (71)..(71): "n" may be a, t, c, g, other or unknown
  misc_feature (91)..(91): "n" may be a, t, c, g, other or unknown
  misc_feature (97)..(97): "n" may be a, t, c, g, other or unknown
  misc_feature (113)..(113): "n" may be a, t, c, g, other or unknown
  misc_feature (173)..(173): "n" may be a, t, c, g, other or unknown
  misc_feature (189)..(189): "n" may be a, t, c, g, other or unknown
  misc_feature (204)..(204): "n" may be a, t, c, g, other or unknown
  misc_feature (215)..(215): "n" may be a, t, c, g, other or unknown
  misc_feature (229)..(229): "n" may be a, t, c, g, other or unknown
  misc_feature (263)..(263): "n" may be a, t, c, g, other or unknown
  misc_feature (384)..(384): "n" may be a, t, c, g, other or unknown
  misc_feature (393)..(393): "n" may be a, t, c, g, other or unknown
  misc_feature (444)..(444): "n" may be a, t, c, g, other or unknown
  misc_feature (502)..(502): "n" may be a, t, c, g, other or unknown
  misc_feature (512)..(512): "n" may be a, t, c, g, other or unknown
  misc_feature (525)..(525): "n" may be a, t, c, g, other or unknown
  misc_feature (538)..(538): "n" may be a, t, c, g, other or unknown
  misc_feature (557)..(557): "n" may be a, t, c, g, other or unknown
  misc_feature (564)..(565): "n" may be a, t, c, g, other or unknown
gtttttttttgagcttanaaaatttattccttttgttcttttcctttgaaataacacacacangcagggangtggggcgcaatggaagtcnaaagangtggaacgtgcggaantcctccagcccctccccaaatcccagttcccctttccaagtccctccatggggtctccanatgatcctaagctcanaatccaactatgaantgcaaaatgtnagggcgcaggggangaagactttgctcctctctctggtagaaaaatanatctggaatgaatttggggatttggtggtttttttttgtttttgttttttgcatcattgggtgcttgggtttaaggaaaggtggtctttgccgattttctcctggctttcaactctggaancctggggangccctgataatgctggggtggggacatcccttcatgtgtccctggcctcanactgtctccttgccacctccaagaatgagtgatccctccgacccttggaagaacacanctctggggantatcccctaaaangtgggaagggganagaaaaacttttaattttnggaaacnnggaattaatt

SEQ ID NO: 7876 - DNA, 527 bp, Homo sapiens
  misc_feature (37)..(37): "n" may be a, t, c, g, other or unknown
  misc_feature (39)..(39): "n" may be a, t, c, g, other or unknown
  misc_feature (102)..(102): "n" may be a, t, c, g, other or unknown
  misc_feature (225)..(225): "n" may be a, t, c, g, other or unknown
  misc_feature (235)..(235): "n" may be a, t, c, g, other or unknown
  misc_feature (305)..(305): "n" may be a, t, c, g, other or unknown
  misc_feature (397)..(397): "n" may be a, t, c, g, other or unknown
  misc_feature (458)..(458): "n" may be a, t, c, g, other or unknown
  misc_feature (463)..(464): "n" may be a, t, c, g, other or unknown
  misc_feature (480)..(480): "n" may be a, t, c, g, other or unknown
  misc_feature (485)..(485): "n" may be a, t, c, g, other or unknown
  misc_feature (487)..(487): "n" may be a, t, c, g, other or unknown
  misc_feature (509)..(509): "n" may be a, t, c, g, other or unknown
caattaacaaaagtcctttatttgtgaacaatgagananactgacactagctttgtatggttttactttggaaaattttacaaatttaaagtaataaatgtnttcattttcttactctgcagaagttcaattttaaaaagaacattactgttctaaaatttcaaaacatacaacatagtctgtgcttgtaacattttcagattcgtctgtgacagcttgatgttntgaagagaangagggagaatggctgtgagtggagaaaagagcgagagaatattcttatagtaaatgttagtaaaattaanagaaataatgggtactgtcactcacaatataaaaacttcctgctgttttagcacaacctggtggtgataaattttaggtacagaaaacatcngaaaaatcaataaagtgttctaattactttaaatctacttattgtatgctattttttttcnattcnnaaatctcaatatcccnttccnancaattagttaaaactaccctgncctgttcaaaaaaaaaac

SEQ ID NO: 7877 - DNA, 613 bp, Homo sapiens
  misc_feature (231)..(231): "n" may be a, t, c, g, other or unknown
  misc_feature (320)..(320): "n" may be a, t, c, g, other or unknown
  misc_feature (341)..(341): "n" may be a, t, c, g, other or unknown
  misc_feature (354)..(354): "n" may be a, t, c, g, other or unknown
  misc_feature (393)..(393): "n" may be a, t, c, g, other or unknown
  misc_feature (455)..(455): "n" may be a, t, c, g, other or unknown
  misc_feature (490)..(490): "n" may be a, t, c, g, other or unknown
  misc_feature (500)..(500): "n" may be a, t, c, g, other or unknown
  misc_feature (514)..(514): "n" may be a, t, c, g, other or unknown
  misc_feature (544)..(544): "n" may be a, t, c, g, other or unknown
  misc_feature (547)..(547): "n" may be a, t, c, g, other or unknown
  misc_feature (564)..(564): "n" may be a, t, c, g, other or unknown
  misc_feature (583)..(583): "n" may be a, t, c, g, other or unknown
  misc_feature (608)..(608): "n" may be a, t, c, g, other or unknown
gactttcaaagtttcttatgttatatacagatcaatttctttcaagaaaccagaagctaaagagaacaaaatctgaaagacccatcctgtggcagtcactgagctaggagaattttaccaattattcaatctccatagtaatcatgagaggtaggaatctcaagtccatcttacagatgaggaactaggctccacaatttaagtaattgctcagggtgccacatattcgancctaggcagtccccatgtttcctgctgcaccaaatgcctcacctgctgtggctcctaataggacgttgggagacttacaacaaaggtcnttgacaaaacagagctgtgtntagctttcccaanaaacaattgctttctaaactctctatttctctctcaaancagaaaactcttttaaatcccctggacaagaaatggaatcttcttcactgctagggctcgangttccatcccaaagcagttttgatccaaacgcccngctccacaantctgtgccctctcngaacctactccctcataaccgtggtatcanctntcctgcttactaatttnggcattttgtccggttttnaacaaaaaggaagggcaaaatgccnccccc

SEQ ID NO: 7878 - DNA, 549 bp, Homo sapiens
  misc_feature (15)..(15): "n" may be a, t, c, g, other or unknown
  misc_feature (38)..(38): "n" may be a, t, c, g, other or unknown
  misc_feature (40)..(40): "n" may be a, t, c, g, other or unknown
  misc_feature (51)..(51): "n" may be a, t, c, g, other or unknown
  misc_feature (92)..(92): "n" may be a, t, c, g, other or unknown
  misc_feature (111)..(111): "n" may be a, t, c, g, other or unknown
  misc_feature (118)..(118): "n" may be a, t, c, g, other or unknown
  misc_feature (306)..(306): "n" may be a, t, c, g, other or unknown
  misc_feature (455)..(455): "n" may be a, t, c, g, other or unknown
  misc_feature (463)..(463): "n" may be a, t, c, g, other or unknown
  misc_feature (471)..(471): "n" may be a, t, c, g, other or unknown
  misc_feature (487)..(487): "n" may be a, t, c, g, other or unknown
  misc_feature (512)..(512): "n" may be a, t, c, g, other or unknown
  misc_feature (530)..(530): "n" may be a, t, c, g, other or unknown
  misc_feature (538)..(538): "n" may be a, t, c, g, other or unknown
gctaagctcacttanaaaagttgggcaccatttaaaananttggagaacanaccagggtggcttcttgggcacagctggatggtgctggaanccaggcctgggatttgganaaaaaantttccgacatataaacccacggaggtcaccagccctccccgcatctactctcctaacagctcaggacagccccgtcacactactgccagccctggtgactcactttgttggcaatttttaaagccctcttcattatgtacttcctactcttcagaacctctgtgataagcaatacccctgccatacanaacgctggatctcggtttactcagcctctccctgtagcgtcacaggctgtgcactcacctaggtgagcccctaaaaacagggtttgcttctgcttcacctaacgccacgtcttccctcaaatgtgtggtcaccaaatgtttgcaaaaanggtcctancttttttncttttggcacattaanccctttaaaatacttctgaactaanctttatactcaaatttcncccctccncaaaaaatttt

SEQ ID NO: 7879 - DNA, 605 bp, Homo sapiens
  misc_feature (1)..(605): "n" may be a, t, c, g, other or unknown
nnnnnnnnnnnnnnnnnnnnnnnnnnnnnnnnnnnnnnnnnnnnnnnnnnnnnnnnnnnnnnnnnnnnnnnnnnnnnnnnnnnnnnnnnnnnnnnnnnnnnnnnnnnnnnnnnnnnnnnnnnnnnnnnnnnnnnnnnnnnnnnnnnnnnnnnnnnnnnnnnnnnnnnnnnnnnnnnnnnnnnnnnnnnnnnnnnnnnnnnnnnnnnnnnnnnnnnnnnnnnnnnnnnnnnnnnnnnnnnnnnnnnnnnnnnnnnnnnnnnnnnnnnnnnnnnnnnnnnnnnnnnnnnnnnnnnnnnnnnnnnnnnnnnnnnnnnnnnnnnnnnnnnnnnnnnnnnnnnnnnnnnnnnnnnnnnnnnnnnnnnnnnnnnnnnnnnnnnnnnnnnnnnnnnnnnnnnnnnnnnnnnnnnnnnnnnnnnnnnnnnnnnnnnnnnnnnnnnnnnnnnnnnnnnnnnnnnnnnnnnnnnnnnnnnnnnnnnnnnnnnnnnnnnnnnnnnnnnnnnnnnnnnnnnnnnnnnnnnnnnnnnnnnnnnnnnnnnnnnnnnnnnnnnnnnnnnnnnnnnnnnnnnnnnnnnnnnnnnnnnnnnnnnnnnnnnnnnnnnnnnnnn

SEQ ID NO: 7880 - DNA, 517 bp, Homo sapiens
  misc_feature (485)..(485): "n" may be a, t, c, g, other or unknown
  misc_feature (512)..(517): "n" may be a, t, c, g, other or unknown
ccaaggagtagctttattcagggatcataaacatcacagcctctcctcaaagtcaagcctaactgctaggtccccagatgtacccaagttgtctaggactggcaggggtagcttgtttgctgtagtgtttgagggcaagagactgaccatccatgcagaaagctggcctgggctgctcgctgcctgccgtggctttcccacctcattaggagcccgcttctctcggtggggagatgctgcccccagagcatcacctggccaggtctgagggcagagcatggagtgggtccagactttgtttctctgctgccagccgtagaaaggtctgggctgtcagatctcccccaagccagacagcctcgctcagctccttggctggggccccttagggaacaggcctgcaagtgtgatgagccaggtgtgctcatccaggcagctacaggcgcagcctctgatatctcactgcggaagtctatccgcagggncagcacctggcgcacttcacaggggtnnnnnn

SEQ ID NO: 7881 - DNA, 436 bp, Homo sapiens
  misc_feature (430)..(436): "n" may be a, t, c, g, other or unknown
gaaattggagtaaaagtttaataagtgaaagaaaaaagctctccacagtggaagtggggatccaaataagttgcccagtatgaggctggggtccggggtttttatggactgggaaggggaaggaatgcacttagcctgcgggctgtcttggagaaagcgtgattcagcttggtctgggaccttggcccgggaccaatcaggaaccgaagtgatgattcataggggctattcagcttggcccgggaccaatcaggagttgaagtgattattcctaggggctattcagcttggcctgggaccaatcaggagctgaagtgatgatttacagaggctgggcttttccttttccacaaaagaaagtgccaacctgaacctactgaagcccactgtgttcatgccccacaaagaagaaactttttcctccgaaccnnnnnnn

SEQ ID NO: 7882 - DNA, 585 bp, Homo sapiens
  misc_feature (14)..(14): "n" may be a, t, c, g, other or unknown
  misc_feature (114)..(114): "n" may be a, t, c, g, other or unknown
  misc_feature (119)..(119): "n" may be a, t, c, g, other or unknown
  misc_feature (181)..(181): "n" may be a, t, c, g, other or unknown
  misc_feature (185)..(185): "n" may be a, t, c, g, other or unknown
  misc_feature (190)..(190): "n" may be a, t, c, g, other or unknown
  misc_feature (257)..(257): "n" may be a, t, c, g, other or unknown
  misc_feature (449)..(449): "n" may be a, t, c, g, other or unknown
  misc_feature (479)..(479): "n" may be a, t, c, g, other or unknown
  misc_feature (519)..(519): "n" may be a, t, c, g, other or unknown
  misc_feature (536)..(536): "n" may be a, t, c, g, other or unknown
  misc_feature (545)..(545): "n" may be a, t, c, g, other or unknown
  misc_feature (553)..(553): "n" may be a, t, c, g, other or unknown
  misc_feature (558)..(558): "n" may be a, t, c, g, other or unknown
  misc_feature (570)..(570): "n" may be a, t, c, g, other or unknown
  misc_feature (579)..(579): "n" may be a, t, c, g, other or unknown
ctggaccagctgantttttattttacagatcataaaacggatgaaagtatatcacagtaattaatgaagccgttctaatttagcttgaaaaaatttaaaattcccagtgatggnttgtnctgctactgacgaactcataaactggagctcaacaaggtaaccacaaacagcatccaggcanaaanttgtnaatcttctcctttcacaatttaaaacttggctgggattctcaacatatcttatcaataatacatgtntacaatccaaaaggtgcagtggcttcttcattctgttccagaatggatcccgtgatttgaacaactgatcataaacttctagtagtctaggtaatggtactccaatttcattcattgtctgtattacgaagcccacatcccagttcaaagtacaaacctgctgttctaaaaactgtacaataaaatctaaangaaaaaaaccttggttttgccaccataaantttggccaaggaaaacaatcttgaaaactaaaaacctgcntcctatccgaagaaacncaatgttcncccggtcncccantccttctctatnaattcctgnccaatt

SEQ ID NO: 7883 - DNA, 576 bp, Homo sapiens
  misc_feature (69)..(69): "n" may be a, t, c, g, other or unknown
  misc_feature (77)..(77): "n" may be a, t, c, g, other or unknown
  misc_feature (139)..(139): "n" may be a, t, c, g, other or unknown
  misc_feature (177)..(177): "n" may be a, t, c, g, other or unknown
  misc_feature (327)..(327): "n" may be a, t, c, g, other or unknown
  misc_feature (394)..(394): "n" may be a, t, c, g, other or unknown
  misc_feature (421)..(421): "n" may be a, t, c, g, other or unknown
  misc_feature (429)..(429): "n" may be a, t, c, g, other or unknown
  misc_feature (499)..(499): "n" may be a, t, c, g, other or unknown
  misc_feature (523)..(523): "n" may be a, t, c, g, other or unknown
  misc_feature (529)..(529): "n" may be a, t, c, g, other or unknown
  misc_feature (536)..(536): "n" may be a, t, c, g, other or unknown
  misc_feature (542)..(542): "n" may be a, t, c, g, other or unknown
  misc_feature (575)..(575): "n" may be a, t, c, g, other or unknown
gacagaagaatattttatttatttataatatcattttgtaaacaatcacactgtgcacttttttattcnacaataanaacaatttttttctagggatttatagcaaaccctatataaagtgaatgacttaatacacgantgaagatgactagggtagaataatttctgaaaatgtcnaattacagcacttgatacaaagactgatgataactatctgtaccataaaaatttacatgccacgaaaacattaatttataattttaaatatacagtaaaacatagttataaaaagagtattacatttattataaaccagtgaattactcngagaaatatttattaaaacctactaaaaaccagtaaatattgcaactgaggtaaaaatttataagtnaacaaaactatcatttataagggaccnagaaagtnaacaaaagggcagacattttctgatgactgtgtctacccctgatattttgaagcagcttccacaaatgtnactccataacctgttgaaccctcnttaccnagggctncgctanatcctaaaatttttcccaatccgttccattgtng

SEQ ID NO: 7884 - DNA, 559 bp, Homo sapiens
  misc_feature (2)..(2): "n" may be a, t, c, g, other or unknown
  misc_feature (290)..(290): "n" may be a, t, c, g, other or unknown
  misc_feature (299)..(299): "n" may be a, t, c, g, other or unknown
  misc_feature (345)..(345): "n" may be a, t, c, g, other or unknown
  misc_feature (398)..(398): "n" may be a, t, c, g, other or unknown
  misc_feature (404)..(404): "n" may be a, t, c, g, other or unknown
  misc_feature (407)..(407): "n" may be a, t, c, g, other or unknown
  misc_feature (499)..(499): "n" may be a, t, c, g, other or unknown
  misc_feature (513)..(513): "n" may be a, t, c, g, other or unknown
  misc_feature (521)..(521): "n" may be a, t, c, g, other or unknown
  misc_feature (528)..(528): "n" may be a, t, c, g, other or unknown
  misc_feature (535)..(535): "n" may be a, t, c, g, other or unknown
  misc_feature (539)..(539): "n" may be a, t, c, g, other or unknown
antaaaaatggggttttaccatgttggccaggctggtcttgaactcctgacctcaggtgatccacacgcttcagcctcccaaagtgctgggattacaggcgtgagccaccacgcccagcctaaatatttctttatagcaatgcaaggatggcctaacacactgcctaaatcaaaattgctattcacttcaagggtattcattacctgactagcttttttgggtgcatatgaacataatgtaaattttatggctgatcaaatgtcattactatgaaaatactccctatganctcacagantcaggacatcaacaatatttaaactttcactgtaaacatgacacantggtaggcactgtggaaatatatttggtcctattttccctacctgagcatgtnaaagancanactattctaacagtgtgatgactctgcagtgaaaaaaaaatccactctcccggcacactgataaaacatgttcctgggcatagtattcctcnaaggaaaatggtcntaaaaatnatctgcnaaatccnatancatcccaaaggtccccctaa

SEQ ID NO: 7885 - DNA, 572 bp, Homo sapiens
  misc_feature (152)..(152): "n" may be a, t, c, g, other or unknown
  misc_feature (259)..(259): "n" may be a, t, c, g, other or unknown
  misc_feature (358)..(358): "n" may be a, t, c, g, other or unknown
  misc_feature (371)..(371): "n" may be a, t, c, g, other or unknown
  misc_feature (454)..(454): "n" may be a, t, c, g, other or unknown
  misc_feature (469)..(469): "n" may be a, t, c, g, other or unknown
  misc_feature (513)..(513): "n" may be a, t, c, g, other or unknown
  misc_feature (520)..(520): "n" may be a, t, c, g, other or unknown
  misc_feature (523)..(523): "n" may be a, t, c, g, other or unknown
  misc_feature (533)..(533): "n" may be a, t, c, g, other or unknown
  misc_feature (548)..(548): "n" may be a, t, c, g, other or unknown
  misc_feature (566)..(566): "n" may be a, t, c, g, other or unknown
  misc_feature (569)..(569): "n" may be a, t, c, g, other or unknown
gtcccctaaatggtaggatttatttcaatgctcacatacaattgaatgagacaaactatttacataaaacataagtacaaaaaatataatacaatttatactgtacacaatcaggattcccttgttttgttccccccacaaatggcagctanagatggtaagaagggggttggtaggaaagtgtgactgcacactcagcagtgctgaggatagatcttcagaatgctttttcataaagatgaatagggttgagatacanaaactgtcaatgcaccaagagcagtaagagagcacaacatattcacttctgtaataatagctatatattttttcttataaacgtgtttgtttctcaaanctgaagcttggancaggtgtgagttgccttccattgattggttaggtgaactccgcccacccctgctccaacttccataatttgatccaatgccancaggtaatgaatttnccatttgccacaattggttttcttaacctgaatttcaaaaaaanaatgcanctntcaaatttcnttaaccaccaatccngggatacaaacctaaacnccnccc

SEQ ID NO: 7886 - DNA, 583 bp, Homo sapiens
  misc_feature (319)..(319): "n" may be a, t, c, g, other or unknown
  misc_feature (327)..(327): "n" may be a, t, c, g, other or unknown
  misc_feature (371)..(371): "n" may be a, t, c, g, other or unknown
  misc_feature (384)..(384): "n" may be a, t, c, g, other or unknown
  misc_feature (471)..(471): "n" may be a, t, c, g, other or unknown
  misc_feature (519)..(519): "n" may be a, t, c, g, other or unknown
  misc_feature (550)..(550): "n" may be a, t, c, g, other or unknown
  misc_feature (567)..(567): "n" may be a, t, c, g, other or unknown
aatgtttaaagagaatttattctatagagtgcattcttgcactctataggtgacagaaaaacaaactgtgctttaaataccaaacaagtaaatcagaaagcttattttctatttaaaatatatctaagacacacttatataaaaagaaaacagaccctcctaacatgtaacattaccgttcgtggcaattgttctcaacctttcactctccttttgaccttagcattaagctcctttgctcacttctgagctctcagttacagttcttgaggtggcatcctaaccaatttgcactatctttcaggtgaagcgctggatntttaccanataattgaactccccaaaaggccccttggaaaaaacaaaaccancctggaaccatanccactgcctggaaggctcctgtttttggctccccgtgggaaacttccatccggggtgggtgcaggctcccaaactcaggcttccacntgtgctttttgcaaaagggcttgcctaaggccagccattttccattancaggactgccaaaaaaatcctccaactgaanggtgcgttaaattcatnggtcaaaccaaaattc

SEQ ID NO: 7887 - DNA, 564 bp, Homo sapiens
  misc_feature (150)..(150): "n" may be a, t, c, g, other or unknown
  misc_feature (167)..(167): "n" may be a, t, c, g, other or unknown
  misc_feature (169)..(169): "n" may be a, t, c, g, other or unknown
  misc_feature (186)..(186): "n" may be a, t, c, g, other or unknown
  misc_feature (307)..(307): "n" may be a, t, c, g, other or unknown
  misc_feature (356)..(356): "n" may be a, t, c, g, other or unknown
  misc_feature (538)..(538): "n" may be a, t, c, g, other or unknown
  misc_feature (550)..(550): "n" may be a, t, c, g, other or unknown
gcattcatatggtttttattctgtgcaaattctactatctgctgagactgaacttctggcaacaggctggctcacaatggctactttgctctctgcttggaacgcactgttagttaatgaggtctgagctgccacagaaggcatctgcanagtcaccatgttaacanantctttatcctgtatganatcacgtgtatgtgataagctatgactctctgagcaaggattttccaatttgactgaacctacacatttctctcttgcatgcagcattcccttatgataaacaaggcatgacaagtggganaaagctttcccacaatcagagcatccatacggtctctcccctgtatganttctccgatgtctgttgagacatgatttatctctgaaagctttcccacagtcactgcatgtatagggtttctctcctgtgtgaattctctggtggttaatgagacctgacttgtgtgagcaggattttccacactcagtacatacaaagggtgtctttcctgtgtgaaatctctgatggganattaaacatgtnttctggctgaaacc

SEQ ID NO: 7888 - DNA, 549 bp, Homo sapiens
  misc_feature (4)..(4): "n" may be a, t, c, g, other or unknown
  misc_feature (134)..(134): "n" may be a, t, c, g, other or unknown
  misc_feature (160)..(160): "n" may be a, t, c, g, other or unknown
  misc_feature (176)..(176): "n" may be a, t, c, g, other or unknown
  misc_feature (269)..(269): "n" may be a, t, c, g, other or unknown
  misc_feature (292)..(292): "n" may be a, t, c, g, other or unknown
  misc_feature (296)..(296): "n" may be a, t, c, g, other or unknown
  misc_feature (469)..(469): "n" may be a, t, c, g, other or unknown
  misc_feature (476)..(476): "n" may be a, t, c, g, other or unknown
  misc_feature (479)..(479): "n" may be a, t, c, g, other or unknown
  misc_feature (481)..(481): "n" may be a, t, c, g, other or unknown
  misc_feature (508)..(508): "n" may be a, t, c, g, other or unknown
  misc_feature (531)..(531): "n" may be a, t, c, g, other or unknown
  misc_feature (543)..(543): "n" may be a, t, c, g, other or unknown
ccanagtttcatccttttattgaagcttacaatttcactggacttttggccccaaatgaaaaaaaatgcaaattaaaaaaagtattggcagggagaggtgaccactgtctcctggcgactgaagccgagcaaancatggcaggcaagtgaggggtcccanctgcagagggcagaancctggccaaagatgcccagggagcaaatttgtctgagcagggccagccccaggcagctagaagttaacacacaaggatttatgggtgtggcanaatccaagccactggtcccatanacanatctctctcatgcttggtcagattccactttggagaaaatgggctcgtttgacaggatggcctggtgagggaacacaggtactaacggtaacaggccgatgaacactcaccactggcatcagggtggaactcacctgactggacctaactccattacaaggacctgctcctgntgccagnctntnccctcacttgctcatggccatcagganattcaatttctatcccccccccntcaggccctatntttttg

SEQ ID NO: 7889 - DNA, 565 bp, Homo sapiens
  misc_feature (244)..(244): "n" may be a, t, c, g, other or unknown
  misc_feature (456)..(456): "n" may be a, t, c, g, other or unknown
  misc_feature (488)..(488): "n" may be a, t, c, g, other or unknown
  misc_feature (528)..(528): "n" may be a, t, c, g, other or unknown
  misc_feature (532)..(532): "n" may be a, t, c, g, other or unknown
  misc_feature (563)..(563): "n" may be a, t, c, g, other or unknown
  misc_feature (565)..(565): "n" may be a, t, c, g, other or unknown
aagtcatcaacaaactttttctgagtatttgattacctttctttcaaaccgtacagtatctcctggatttgtttctctttttatttaggtactttctccaaaagtgattttagtttgtatggaaaatcttctgatgctttgatggtacatattcttattaatgccctcacattagaataactattttcagaacataaaattgtaggttcaaagtttttttcaggttcaatttcacattcttganctaggcatggtactgatggttttcaccataacatacaccaatgtccttttgtctgtgggctcccatccagcctggtggctgaagtcatctacaggtaagattgaccaaacctctgaacaggactgaaaaaaatgttatcttcagaaaaccagccctcttgtacactgctgctgtgaatacaaattgattaacttttctggatggcaatctancaatgcagatcaaacatttaaaaatacatatntatctcgacacaattttatctccaggcatccacatgaaanaacncccaatgttcaaaattgtcaaataaggatcncn

SEQ ID NO: 7890 - DNA, 569 bp, Homo sapiens
  misc_feature (29)..(29): "n" may be a, t, c, g, other or unknown
  misc_feature (59)..(59): "n" may be a, t, c, g, other or unknown
  misc_feature (121)..(121): "n" may be a, t, c, g, other or unknown
  misc_feature (131)..(131): "n" may be a, t, c, g, other or unknown
  misc_feature (205)..(205): "n" may be a, t, c, g, other or unknown
  misc_feature (226)..(226): "n" may be a, t, c, g, other or unknown
  misc_feature (270)..(270): "n" may be a, t, c, g, other or unknown
  misc_feature (340)..(340): "n" may be a, t, c, g, other or unknown
  misc_feature (376)..(376): "n" may be a, t, c, g, other or unknown
  misc_feature (378)..(378): "n" may be a, t, c, g, other or unknown
  misc_feature (387)..(387): "n" may be a, t, c, g, other or unknown
  misc_feature (409)..(409): "n" may be a, t, c, g, other or unknown
  misc_feature (413)..(413): "n" may be a, t, c, g, other or unknown
  misc_feature (456)..(456): "n" may be a, t, c, g, other or unknown
  misc_feature (503)..(503): "n" may be a, t, c, g, other or unknown
  misc_feature (522)..(522): "n" may be a, t, c, g, other or unknown
  misc_feature (533)..(533): "n" may be a, t, c, g, other or unknown
  misc_feature (539)..(539): "n" may be a, t, c, g, other or unknown
aatttttactcgtttctttattaatatanaaaaggagcccagggcagctggaccagtantacaaagcaccaggagttaataccattctggtgaaggggatggttttacaaaagtgaaggancaggcagganccaccaggttctgaggccaggcccagcctactgcccaaaacccctgaaacggctccctgggaaaaagctgacanatgggtcaggggtggattganctggaaaccatggggacagatggcagggatagagggtcatgcantgggaaccacccagtggctgataaggacagggaacttgtggctggaggctccccattgggccatgggcangggcttgcaaatggcctcagctctgggggcaggtananaaactgcanaaactgatgggcatggaaaaanccanacatggccctggggctgaagggcctttccccctctcttcccanaaacccctttgctctatactacatatggggcttcagggcccaaggcncagggaagctcaaaagccnccatttggaanaaaatngggcaagaaagaaacccttaattttcctac

SEQ ID NO: 7891 - DNA, 575 bp, Homo sapiens
  misc_feature (83)..(83): "n" may be a, t, c, g, other or unknown
  misc_feature (504)..(504): "n" may be a, t, c, g, other or unknown
  misc_feature (520)..(520): "n" may be a, t, c, g, other or unknown
  misc_feature (541)..(542): "n" may be a, t, c, g, other or unknown
  misc_feature (547)..(547): "n" may be a, t, c, g, other or unknown
  misc_feature (550)..(550): "n" may be a, t, c, g, other or unknown
  misc_feature (565)..(565): "n" may be a, t, c, g, other or unknown
agtttttatactctaatactttaatatgcaatgaataaaagggcagaaaattcagaattacaataaatgttaggctatttcanaacaccagtttttcacacctattttcttagcatacagaagctcgaaaatcatacattaagcatagtttgaattgtcctgaagttatattctgaaggggctgtaacacttaagaactaataatattaaaaaggcaaaagcattataactcacagcacacaagactttttacctcatctataaaacgtgagaatgtcaatgttttattggctacaaggataaggaaggaaacatcagagaaataaatttgataacaagattcacacttcattacaagtgattttcctaaattcacaactttcacatttggctgagtgaaagagaaaaacaaaacaaaacaaaacaaaactgaaaagggaactttcactacttgttaagtaggccaactcacatgatccctccaaatgaaaaaatttaaatganaatgaatttactttcnaactgggaaaatatttccctnnataanttnatttaaataatttanccctggggaa

SEQ ID NO: 7892 - DNA, 433 bp, Homo sapiens
  misc_feature (84)..(84): "n" may be a, t, c, g, other or unknown
  misc_feature (200)..(200): "n" may be a, t, c, g, other or unknown
  misc_feature (205)..(205): "n" may be a, t, c, g, other or unknown
  misc_feature (258)..(258): "n" may be a, t, c, g, other or unknown
  misc_feature (282)..(282): "n" may be a, t, c, g, other or unknown
  misc_feature (288)..(288): "n" may be a, t, c, g, other or unknown
  misc_feature (371)..(371): "n" may be a, t, c, g, other or unknown
  misc_feature (377)..(377): "n" may be a, t, c, g, other or unknown
  misc_feature (385)..(385): "n" may be a, t, c, g, other or unknown
  misc_feature (394)..(394): "n" may be a, t, c, g, other or unknown
  misc_feature (398)..(398): "n" may be a, t, c, g, other or unknown
  misc_feature (421)..(421): "n" may be a, t, c, g, other or unknown
  misc_feature (427)..(427): "n" may be a, t, c, g, other or unknown
gcaaatctacactcagttgctttaatattaacatacatacaatggtactaccttcaccaactttttcatttgggcatcacaaanatgagtcttctgatgttctataagcaatatgtttatatgaaagtcagaagtttagcgaaaattcggcctaaacagtaataaatgaaaatggaatggaaatcaaagttcttaaatanaacanaaggctgggcacggtggctcacgcctgtaatcccagcactttgggaggccganatgggcggatcacgaggtcagganatcganaccatcctgactaacacggtgaaaccccgtctctactaaaaatacaaaaaaaattggccgggcgtggtggcgggcgcctgtantcccanctactcangaagctgangcangaaaatggcgtgaacccggggangcagancttgca

SEQ ID NO: 7893 - DNA, 579 bp, Homo sapiens
  misc_feature (69)..(69): "n" may be a, t, c, g, other or unknown
  misc_feature (93)..(93): "n" may be a, t, c, g, other or unknown
  misc_feature (174)..(174): "n" may be a, t, c, g, other or unknown
  misc_feature (176)..(176): "n" may be a, t, c, g, other or unknown
  misc_feature (369)..(369): "n" may be a, t, c, g, other or unknown
  misc_feature (540)..(540): "n" may be a, t, c, g, other or unknown
  misc_feature (547)..(548): "n" may be a, t, c, g, other or unknown
  misc_feature (550)..(550): "n" may be a, t, c, g, other or unknown
  misc_feature (554)..(554): "n" may be a, t, c, g, other or unknown
  misc_feature (577)..(578): "n" may be a, t, c, g, other or unknown
atttaaaaattgcagactttatttgcatttcctcagcttttctgctaatgtcttctttctttttttganacagggtctcgctctgtcacctangctgcagtgtgatggcgtgatctcggctaactttgcaacctcttcctcaatcctcctgcttcagcctcccaagtagctcanantacaagcgtgtgccacacctgtctaatttttgtgtctttttgtagaaatggggtttcaccgtgttgcctaagctggtctcgaactcctaggctcaagcaatgcgccctcctccgcctcccaaagtgctgagattacaggtgtgagccactgcgcccagcctaatgtcttctttctgttacagggatccagtanaagatccacatctggagatcttttcctttctttatatctatcaccgacattacctactctttaaaaattttgtaaaaggcataaatttgaaaaatatatcctcattaatctaaatcaagtcattgatacaactatttaacaagaccccggcctgcttgttttattaacganttggacnnantccnctttacatatataataattccgnnt

SEQ ID NO: 7894 - DNA, 404 bp, Homo sapiens
  misc_feature (160)..(160): "n" may be a, t, c, g, other or unknown
  misc_feature (240)..(240): "n" may be a, t, c, g, other or unknown
  misc_feature (267)..(267): "n" may be a, t, c, g, other or unknown
  misc_feature (286)..(286): "n" may be a, t, c, g, other or unknown
  misc_feature (328)..(328): "n" may be a, t, c, g, other or unknown
  misc_feature (333)..(333): "n" may be a, t, c, g, other or unknown
  misc_feature (350)..(350): "n" may be a, t, c, g, other or unknown
  misc_feature (372)..(372): "n" may be a, t, c, g, other or unknown
  misc_feature (374)..(374): "n" may be a, t, c, g, other or unknown
  misc_feature (392)..(393): "n" may be a, t, c, g, other or unknown
aaaaaaagaaaacaatgtttattaggatattctggggtgagaggatggccaaagggactatgtacattctgtagtgcttgagcaataggctaacagaaaattcgaacatcacaaaaccacttccaaagtccatattgcaaaacttgtacttctacagganatgttcttccaagggtgttggcaataaaggctgttgcaaaacagctatgtgaggcagccatgtgggagtgaccccagganaatgctccggtgtcctctggaaagcanatacacaggacgatggacnaatgtgtcatcttctaccactgggaagctcagtaaacacacnatatnacatggagacccgcccnaacctaactggatgcttctcancnaagctcagtcgaccctcnncccctgtttcc

SEQ ID NO: 7895 - DNA, 478 bp, Homo sapiens
  misc_feature (416)..(416): "n" may be a, t, c, g, other or unknown
  misc_feature (428)..(428): "n" may be a, t, c, g, other or unknown
  misc_feature (430)..(430): "n" may be a, t, c, g, other or unknown
  misc_feature (433)..(433): "n" may be a, t, c, g, other or unknown
  misc_feature (445)..(445): "n" may be a, t, c, g, other or unknown
  misc_feature (447)..(447): "n" may be a, t, c, g, other or unknown
  misc_feature (450)..(450): "n" may be a, t, c, g, other or unknown
gcattagacacagtttaatcgccttcaaatagatgaaaagttccggtttacactcccccaccgcataagtcatccagacaggaccctggcttagaaagaggaaaacacaggtgctctaggaaatatagccacatataatacataaatcttcttccctgaaatagagcaggtcctgagcagagctgactgggggccacagcccacccccagggtgaagtggctctgggactctgccggtggaagtgctggaagagcggggcttggaggaagcccccagtgtggttaccatagccagaggtgggccgaggccttagggtgagttacccgagagggcagcagtgctgggctttccctcactcagccgaggcttaatggaagaactggttagcattttttttttttttgagggtacctcnggggaaaaggananganaaggagagcctntntgngccttgggttccatttgggcattcaggg

SEQ ID NO: 7896 - DNA, 559 bp, Homo sapiens
  misc_feature (482)..(482): "n" may be a, t, c, g, other or unknown
  misc_feature (503)..(503): "n" may be a, t, c, g, other or unknown
  misc_feature (510)..(510): "n" may be a, t, c, g, other or unknown
  misc_feature (526)..(526): "n" may be a, t, c, g, other or unknown
  misc_feature (544)..(544): "n" may be a, t, c, g, other or unknown
  misc_feature (550)..(550): "n" may be a, t, c, g, other or unknown
  misc_feature (556)..(556): "n" may be a, t, c, g, other or unknown
gttttttttttttttgagacggagtctccctctgtcacccaggctggaatgcagtggcacaatctcggctcgctacaacctctgcttcccgggttcaagcgatcctcctgcctcagcctcccgagtagctgggacttcaggcccagtagagacagggtttcaccatgttagccaggatggtctccatctcctgacctcgtgatttgcccgcctcggcctcccaaagtgctgggattacaggcgtgagtcaccgcgcccggccaaaatatttaaagacagtatgacaggagagtggggttggcctgacacgtagaccagcctcctgggttcgcagagggtgcatttggtcttctgctctcactgcccgaccccatgggggaaagaggtgcatctccatttttaaattcctcctttgagctatagtggcaaactcaagcaactaaagtagatcccaagcctggtagttcttttttcttctgggncttgaaaacttcatgtcccgnacctggnatctttcaaggatgtnccgggccattccgggaantactgngtggcncac

SEQ ID NO: 7897 - DNA, 571 bp, Homo sapiens
  misc_feature (464)..(464): "n" may be a, t, c, g, other or unknown
  misc_feature (489)..(489): "n" may be a, t, c, g, other or unknown
  misc_feature (527)..(527): "n" may be a, t, c, g, other or unknown
  misc_feature (543)..(543): "n" may be a, t, c, g, other or unknown
  misc_feature (557)..(557): "n" may be a, t, c, g, other or unknown
catataaaccacagaatatatttaattcaaattaaacatgaaactagaataatgttcggtccttatcaagtagcaattacattgtttaaaaaaaaaaaaaagaacagtacatttctgtctacattccgacaatccaacgaggcggcatgggtcacatccagtttgatgaggtgacagagccagcagtcaccatccatgggcatggttctgaggggactggggagacacagaccatacatgatacaaaatgattctgcagcaagtctgaaggagcgcagcctccctcctaatacataagaatgaacgtccaggtagcagagagtaggcgacttgcataatgagcgcattttattaaatagatagttaacgcactgcttcttactcattccaagttgctgtaggtgctgcccgcattaacagcagggacaaaagcttcctatgcgcgtttcagcaggaatactctnttcacttcaggacttctttggtttnggatttttttggcatggatttcctttccatggtaaagnaaagccaacttttttnaagacacagggcanttagcttttagggg

SEQ ID NO: 7898 - DNA, 562 bp, Homo sapiens
  misc_feature (493)..(493): "n" may be a, t, c, g, other or unknown
  misc_feature (514)..(514): "n" may be a, t, c, g, other or unknown
  misc_feature (535)..(535): "n" may be a, t, c, g, other or unknown
  misc_feature (545)..(545): "n" may be a, t, c, g, other or unknown
  misc_feature (548)..(548): "n" may be a, t, c, g, other or unknown
  misc_feature (560)..(560): "n" may be a, t, c, g, other or unknown
gctgccttggtccaacatacttgactgatgcgtgcccagctcgtcctagttgacatgcaaactgacaaactaatcgctgaatagttctttctcatttctgccaagaggctctttttaatagtatgtgaaataaaaactccatgctgaaggccaaattgacaccagccacaagattacgtctacagtgttgtggaaatcactgcaaagaatgccatctccaaaacactcaccaccagcctggacaaagcacgagagagtacactgaagggaataatcctgccctggcccccaggggagggaccagatgggacctaatagctcttttctactactcatttctatgataattttaagttgccacatggcatatgtatttttttttaatctaaaggcagaatatcagtcaatgaagtgaccaggattttaatgaaaggtattttttcatgaaccgtatctattcacatgggataagttttcatctacccccaacttntcacttgctatacaacacatnacttactatcaaggttggganaagttttttnganggcaaccccatntg

SEQ ID NO: 7899 - DNA, 466 bp, Homo sapiens
  misc_feature (128)..(128): "n" may be a, t, c, g, other or unknown
  misc_feature (209)..(209): "n" may be a, t, c, g, other or unknown
  misc_feature (460)..(466): "n" may be a, t, c, g, other or unknown
agaagcagaaaaaaacagctgttttattcaactattcacaatagagaatatttataatctagtcactgaaacacgcatttcttaggccactcctagaatatgggaatagctgttacataaaatactgntttataattatattaataagaaaaagcattttacctgttccaagaggggaaaaaagctcctcattgagtatcctttgtctntagatcagaatggtaaagtcttgggcctggttcttctaccctggagcaattcttccccagtcaccctccagggaatgtcagaaaacgtgaagaactttagagactagaatcatattcaaactttccttgaaagtagctataataaacactaacaccttttttaaaaggccaaattaggtaacttctttaggtggatcatccagcaaaagccaatgaacctgaatacaagctatttttttcttttctcaaannnnnnn

SEQ ID NO: 7900 - DNA, 556 bp, Homo sapiens
  misc_feature (495)..(495): "n" may be a, t, c, g, other or unknown
  misc_feature (503)..(503): "n" may be a, t, c, g, other or unknown
  misc_feature (505)..(505): "n" may be a, t, c, g, other or unknown
  misc_feature (544)..(544): "n" may be a, t, c, g, other or unknown
  misc_feature (548)..(548): "n" may be a, t, c, g, other or unknown
acagcttcatatgtcaatataatatcatcaacacagcataaagatttaagcagtagacacaagtcacatgaaagaggctctatgcatcatgtggcctgtccgaataaaaagcaaacattagaatgccatttcagcagttacagtgttgatatgatcaatatagctaatttttttatacccgtcatatatttttagaagtcatccgtagggaagaagcaaacaacaaagactgcttttttttagaaaagttatgtgccaacttcaaaatgacatactaaccagatatcagcattcgaaagctaggttgaataggactggccttgatgcacatgcagatgatttgctttcataatataaaattaaatggtaatgtcagctgtattactactggttctatatttatgattaattactagcagtacaactcccagaaggaaggagatggatccaacagcgatgtaagcaatccccaaaaatgggttttttcctccatcntggaatangntcaagaacatccgttttggccctcaaaaaatggccgggnaatntgaaaagg

SEQ ID NO: 7901 - DNA, 489 bp, Homo sapiens
  misc_feature (447)..(447): "n" may be a, t, c, g, other or unknown
  misc_feature (459)..(459): "n" may be a, t, c, g, other or unknown
  misc_feature (470)..(470): "n" may be a, t, c, g, other or unknown
  misc_feature (474)..(474): "n" may be a, t, c, g, other or unknown
  misc_feature (480)..(481): "n" may be a, t, c, g, other or unknown
  misc_feature (488)..(488): "n" may be a, t, c, g, other or unknown
aattaattagaaagtaggctgggcacggtggctcatgcctataatcccagcacttggggaggccgaggatctcctctctggtggatcacttgagggcaggagttaagagaccatcctggccaacatgatgaaaccctgtctctactaaaaatacaaaaagtagctgggcgtggtggcatactcttacaatcccagctacttgggaggctgaggcaggagaatcacttgaacctaggaagcagaggttgcagtgggccaagatcacaccactatactctagcctgggcgacagaggtggggaaaaaagtaggacccctgtcctatattcaggtttttctcacatatatgaacccatctaaattctacgttgttaaaggtagcttaggttaattagtctatacttatttaagaccaatatggggtgagatggatttttttttaaaaatnctacagtaaggntttctactttncttntaatgnnggaaaang

SEQ ID NO: 7902 - DNA, 560 bp, Homo sapiens
  misc_feature (477)..(477): "n" may be a, t, c, g, other or unknown
  misc_feature (506)..(506): "n" may be a, t, c, g, other or unknown
  misc_feature (542)..(542): "n" may be a, t, c, g, other or unknown
  misc_feature (549)..(549): "n" may be a, t, c, g, other or unknown
gagatggagtctctctctgttgccaggctacagtgcagtagtgtgatcttggctcactgcaacctctgcctcctgggttcaagcgattctcctgcctcagcctctggagtagctgggattacagatgcgtgccaccatgactggttatttaaaacatttttttgtatttttagtagagacggggtttcaccacattggtcaggctggtctcgaactcctgacctcgtgacctgcccacctcggcctcccgaagtgctgggattacaggtgtgagccacagcacctggactatttctcgtaaatgtcaaggaacaattttattgtgttaatacatttactttaagcatctactctatttagctgagactatgctttttctgctacggtgacaaaagtccatccaaattgctatgcttaatacattctttattaccaaagtcccaataaaagtagtaattcaaaaaaactaaaactcanaaaaaaaaaaaacaaccttcacattatgnggaaaactggattttaaattaaagggcctaaatccnttttacnaagtttttggc

SEQ ID NO: 7903 - DNA, 507 bp, Homo sapiens
  misc_feature (2)..(2): "n" may be a, t, c, g, other or unknown
  misc_feature (20)..(20): "n" may be a, t, c, g, other or unknown
  misc_feature (28)..(28): "n" may be a, t, c, g, other or unknown
  misc_feature (99)..(99): "n" may be a, t, c, g, other or unknown
  misc_feature (227)..(227): "n" may be a, t, c, g, other or unknown
  misc_feature (421)..(421): "n" may be a, t, c, g, other or unknown
  misc_feature (468)..(468): "n" may be a, t, c, g, other or unknown
  misc_feature (471)..(471): "n" may be a, t, c, g, other or unknown
  misc_feature (473)..(473): "n" may be a, t, c, g, other or unknown
  misc_feature (499)..(499): "n" may be a, t, c, g, other or unknown
  misc_feature (501)..(501): "n" may be a, t, c, g, other or unknown
  misc_feature (507)..(507): "n" may be a, t, c, g, other or unknown
gngggagacccatttaatgnggacactnaaggcctgggcagagtggggagcgcccaggagttgggtgggcaggcaagtgggtgggttgcaggcccactnttggccccaggagggcatgccaggtggtgggggctggcccaggtaggccaaggggaggcccaggcaggaagggtggcccaggcaggcagacccaccaggggtccctgaaggccagcccttgagaaggngtctaagccagggggtgagtgcccaggccagagcctagcccagggaggcagggttgggtcccggttgggggctcttggagcctaggggctggcatcactgggggcctccccgagctgctgctggaactccaggcgtgtctgccggttggactccagcaactcctggaggccgggcgtggaagtggtcattcttntctcaagtggccaaacaggagttgatctggtccacattgaatttatngcncntatttttggaagaaaggcaaagacanancccaan

SEQ ID NO: 7904 - DNA, 496 bp, Homo sapiens
  misc_feature (450)..(450): "n" may be a, t, c, g, other or unknown
  misc_feature (453)..(453): "n" may be a, t, c, g, other or unknown
  misc_feature (456)..(456): "n" may be a, t, c, g, other or unknown
  misc_feature (466)..(466): "n" may be a, t, c, g, other or unknown
  misc_feature (480)..(480): "n" may be a, t, c, g, other or unknown
  misc_feature (484)..(484): "n" may be a, t, c, g, other or unknown
  misc_feature (494)..(494): "n" may be a, t, c, g, other or unknown
aagggtcaaaaattttattagcaggactttttgtgtttttgaatatacaggtttcctgctgtccagggtaaaggggaagtggtgtcttgtggcccgaggtttggggcgcttgccttgggactccatccccatctctttcccgctagcgcagctgggggaaggtgcctgcttgccggccccacggattcttcggctgtggcataaggcactgtgtgttctgcaggaaggcgctcatggctggctggtagatgagaggcggccttctcaggggctgcaaagctgaggctgttgaggggttgagttgaacttggggcccctagtgaggaggccccaggcgatgggagcgcggcctggtgagtctggtgccgctgcctccccactggccctgcaccaggtctcaggatgggatcatgcctttgctcctcttgcggtcggccatgggtctcccgntgnggntggctcttgncccttggtggcttncttntttctgcgtnct

SEQ ID NO: 7905 - DNA, 550 bp, Homo sapiens
  misc_feature (461)..(461): "n" may be a, t, c, g, other or unknown
  misc_feature (501)..(501): "n" may be a, t, c, g, other or unknown
  misc_feature (514)..(514): "n" may be a, t, c, g, other or unknown
  misc_feature (537)..(537): "n" may be a, t, c, g, other or unknown
agtgaatatttttaaattttattaatgacaaagcaaaatttaacacagaagtatatatacataggttgtattaaaactaaatgttttaactctcaaatgttttaactctcaaatagaaaacatacacatctattacaggaatcacaaaacttatctccataaggaaactttaaactccagaggcaaaaaaaaaaaaaattatctccaatttcccccatgagaatcaaaattgcaatttttttaaaaaaattgcaaattttaattttatactttaatacctttagttttaagacaacagttaacagaatcaattttagatacaggtattttttaaccttaatatttaaaagtccaaaattatatagaattaatccaaatcatatagcaaagaattctgaaaactgaatgcacaattggtcacatgatctttaatgacctggcactaccatcctgctattggnttcttttatgctggcgaatccaggtatattgggaacccgnagttttggtcaanaatgaaaataggggaccccatangggtcttttctta

SEQ ID NO: 7906 - DNA, 525 bp, Homo sapiens
  misc_feature (467)..(467): "n" may be a, t, c, g, other or unknown
  misc_feature (481)..(481): "n" may be a, t, c, g, other or unknown
  misc_feature (485)..(485): "n" may be a, t, c, g, other or unknown
  misc_feature (497)..(497): "n" may be a, t, c, g, other or unknown
  misc_feature (510)..(510): "n" may be a, t, c, g, other or unknown
  misc_feature (518)..(519): "n" may be a, t, c, g, other or unknown
cagatgtgttattttttattgttgaataatattccattatatgaatacatcacaattttctaatccatacctctgctgatggacatttagttttttaccagtttggggttattacaaataaagctgctaaaaccatttttgtccaagtgtttgtgtaaacatgtgatttaaagttccatgatagggtgtgggatggccgcggagccgggcggagctggcttacggctaccggggccggctctctggccggagacatggcccgggggcccggcccgctaggcaggcctcgccccgatacggtcgccatgcccaagagaggaaagcgactcaagttccgggcccacgacgcctgctccggccgagtgaccgtggcggattacaccgactcggatctggcggtcgtgaggtctggacgagtcaagaaagccgtaaccaacgctgttcggcaggaagtaaaatctctttgnggcttggaagcctntcanggtcctgcaaangaagctttttctngggcttgnnaaccct

SEQ ID NO: 7907 - DNA, 545 bp, Homo sapiens
  misc_feature (473)..(473): "n" may be a, t, c, g, other or unknown
  misc_feature (490)..(490): "n" may be a, t, c, g, other or unknown
  misc_feature (502)..(502): "n" may be a, t, c, g, other or unknown
  misc_feature (515)..(515): "n" may be a, t, c, g, other or unknown
  misc_feature (521)..(521): "n" may be a, t, c, g, other or unknown
  misc_feature (523)..(523): "n" may be a, t, c, g, other or unknown
  misc_feature (531)..(531): "n" may be a, t, c, g, other or unknown
gccttgggtttgccttaccatttattgaaggcatactatgtactaggtacatacatgatcacatttgatgttcacaacagccctgacaagtgggcttcttacccctatttccaaaagagttcattgaagttctgagagcttaatccccgctttaggctacacagtagtagctggatttcctggcatcagaaccctcacctaggctgcctctgagcatggcttctgtgtcccagtctcaatttccatgaagtttcaggtcctcctgttcccccgcatttgtagtcactcttggtgactgggaacaaagggctagagcgtgagctgaaactgagacagggagtggcaggcaggcagtggggagagaaacttttctcacatccacccatgtgaagaagatggacaaaagggtggtctttctggaaggaggctttcaagccacttttccaaactgctgatcttgggatgaatggcanggacctgattggggtangggatgggtggncacatggtttctnggctgnanacttattnccttcctttggaaa

SEQ ID NO: 7908 - DNA, 547 bp, Homo sapiens
  misc_feature (475)..(475): "n" may be a, t, c, g, other or unknown
  misc_feature (481)..(481): "n" may be a, t, c, g, other or unknown
  misc_feature (489)..(489): "n" may be a, t, c, g, other or unknown
  misc_feature (500)..(500): "n" may be a, t, c, g, other or unknown
  misc_feature (503)..(503): "n" may be a, t, c, g, other or unknown
  misc_feature (518)..(518): "n" may be a, t, c, g, other or unknown
  misc_feature (521)..(521): "n" may be a, t, c, g, other or unknown
gatacagggcctggctctgttgcccaggctggagtgcagtggagtaatcatggctcacctcagctttgacctccagggctcaagtaatcctcctaatacgggcatttctctcatcgcttcagaacccgccccacaaccaaacattcagatgcttattaaggcaacaaaacaagtgacagacgggacaatttttccaattctagatctaattgattaggctatgtctcatgaggaggctgtacttgacctctaagctagcatctggaatacaatcttccagcggcttagggaaggtcggtgatagtagtatcgtcaggatcaattccgaagtgcagcttgccgtccttggcggctgcccagggcatggaggtggaggtccactttgccacccagtctcctgttttgctaaccacgatgaggccacctaaacctttaacccttgacttcatataacccaacgataggtccgaacctnttttancggctttncttggctatgnggnacaaggtgaggttanccnggttaaccttaggaagctttcccaag

SEQ ID NO: 7909 - DNA, 556 bp, Homo sapiens
  misc_feature (420)..(420): "n" may be a, t, c, g, other or unknown
  misc_feature (473)..(473): "n" may be a, t, c, g, other or unknown
  misc_feature (504)..(504): "n" may be a, t, c, g, other or unknown
  misc_feature (511)..(511): "n" may be a, t, c, g, other or unknown
  misc_feature (522)..(522): "n" may be a, t, c, g, other or unknown
  misc_feature (528)..(528): "n" may be a, t, c, g, other or unknown
  misc_feature (542)..(542): "n" may be a, t, c, g, other or unknown
  misc_feature (549)..(549): "n" may be a, t, c, g, other or unknown
gccatttgcatgtcatctgtattgtcacatgaaatgcacatccaaaacgggtgacttggaaacgacctattaggtcacacggagtccggcccctgggggccaaagcctcatcgatgcccacgggcggtggccagcactttcctcgggctgtggcgtgtgcacccggcctccccagaggagagtcagctcacaccccaggccctttagctctctggcagcagctcccaaaacgcacttgaggaaccaataattccttgggggttaatagctgttccccaagaaaagggttctgtggtcaaataagtttagaaaacatgggttaaagaaggtttagcaagaagcttttctatagggcttgtcagagcctttacggcaataacggcctttgtgaatgtccaacttgggggacagagtgtgcancactttcgaaagttattgaaccacaaaaccccttttcccaaagcattttgcangcttggggtccatgggcaccccttgggaaantgcttgncctaactgtcnataccncttatgggaatggnacctgcntaaggca

SEQ ID NO: 7910 - DNA, 553 bp, Homo sapiens
  misc_feature (61)..(61): "n" may be a, t, c, g, other or unknown
  misc_feature (171)..(171): "n" may be a, t, c, g, other or unknown
  misc_feature (173)..(173): "n" may be a, t, c, g, other or unknown
  misc_feature (203)..(203): "n" may be a, t, c, g, other or unknown
  misc_feature (312)..(312): "n" may be a, t, c, g, other or unknown
  misc_feature (362)..(362): "n" may be a, t, c, g, other or unknown
  misc_feature (400)..(400): "n" may be a, t, c, g, other or unknown
  misc_feature (466)..(466): "n" may be a, t, c, g, other or unknown
  misc_feature (497)..(497): "n" may be a, t, c, g, other or unknown
  misc_feature (499)..(499): "n" may be a, t, c, g, other or unknown
  misc_feature (507)..(507): "n" may be a, t, c, g, other or unknown
  misc_feature (553)..(553): "n" may be a, t, c, g, other or unknown
gggacagagttttactctgttgcccaggctggagagcagtggtccaatctcaactcacggnaacctccacctcccgggttcaagtgattctcctgcctcagcctcctgagtagctgggactacaggcacatgccactatgcccaactagtttttttttctatttttagtananacggggtttcaccgtgttagccaggatggncttaatctcctgaccttatgatctgcccacctcggcttcccaaagtgctgggattccaggcgtgagccaccgcgcccggcccacagttttattctttacaggaggtcantgcccatcatgttccctgtctacagacaaataaaaagctgctctctccanaggggcggcagcagtcctgatggtccaatgagacccanaagctttcaggaaaaccttaatcccgagtccctttcagcattatcttctaaagctgactcttttgnggactcaaatgcccctttttggcaagtcgtntnccatttgntggaacctttccgactgggaatccccatgtttttgatggcactttn

SEQ ID NO: 7911 - DNA, 568 bp, Homo sapiens
  misc_feature (463)..(463): "n" may be a, t, c, g, other or unknown
  misc_feature (510)..(510): "n" may be a, t, c, g, other or unknown
aagtcataaaacaaatttattttaaaaatcaatatcttgcatttcagatatacagatgtatcttttaccagcaggtgaaagcaccttttccagaatctgcttccagcagaatcaatactgatttcgaaactggttgcttaggtcttggagctctgtcactaaggtgtccatagctgttatgtcatcagctaattccctggacatttctccagttgccacatctgtaaaaagttgctttgctttagataacaagccccgtaaattgagtcgaacagaagaaagcatttgtacagcttcttgggaactggatttgtttttactgcattttatggccacatgtgcaagtcctaaggctctttgaacaacttccttaaatggtgtaatatctttctcccaacaattggactgggtgtcacacttgtatgcctttgagaagcctggaatgccctttcattttcattangcttttcactctggccattttcatatacgtgggcatccagcctccanaattctccatcatttggcactcttgaagcactctggccaaataactccggcagcttct

SEQ ID NO: 7912 - DNA, 579 bp, Homo sapiens
  misc_feature (99)..(99): "n" may be a, t, c, g, other or unknown
  misc_feature (147)..(147): "n" may be a, t, c, g, other or unknown
  misc_feature (178)..(178): "n" may be a, t, c, g, other or unknown
  misc_feature (313)..(313): "n" may be a, t, c, g, other or unknown
  misc_feature (347)..(347): "n" may be a, t, c, g, other or unknown
  misc_feature (356)..(356): "n" may be a, t, c, g, other or unknown
  misc_feature (388)..(388): "n" may be a, t, c, g, other or unknown
  misc_feature (462)..(462): "n" may be a, t, c, g, other or unknown
  misc_feature (486)..(486): "n" may be a, t, c, g, other or unknown
  misc_feature (490)..(490): "n" may be a, t, c, g, other or unknown
  misc_feature (495)..(495): "n" may be a, t, c, g, other or unknown
  misc_feature (499)..(499): "n" may be a, t, c, g, other or unknown
  misc_feature (552)..(552): "n" may be a, t, c, g, other or unknown
  misc_feature (560)..(560): "n" may be a, t, c, g, other or unknown
  misc_feature (575)..(575): "n" may be a, t, c, g, other or unknown
gggacccaaaatggctgtaattgcagaaaggatggaggggtacagtgtgatgggagggaagcaggaatgcacctgctgtcagcaaagcgttcatcatanaacttcccagccagccactcgcgtcccagttccctcctagcaaagcanaaatacaactcctggccaccttacagggcanaggtgaggcgccaacggaatagcaaatgtcaaagtttcacttaagcccaatggaaaggtaggaggccttgccttcttgctcctttttggctttctcctgggccttcatggctgcgtaatcctgggccatgttganaatgtatatatgctcccggctgccaatggccttnagcaggcanaggagggcggctgcagcattccgagcaaaganagtgtcgaggccatcaaacaccactcctcggtagcagtcactcagcagcctcctctccttccttcatggactgntctatggcaccctgatgcaaactnacangcccngatncctgggaaggtggtgcttgttggcccaagtttcagcacaatggagtcatgctnagcagctnggttgtaaacttggncccc

SEQ ID NO: 7913 - DNA, 609 bp, Homo sapiens
  misc_feature (538)..(538): "n" may be a, t, c, g, other or unknown
  misc_feature (547)..(547): "n" may be a, t, c, g, other or unknown
  misc_feature (551)..(551): "n" may be a, t, c, g, other or unknown
  misc_feature (562)..(562): "n" may be a, t, c, g, other or unknown
  misc_feature (593)..(594): "n" may be a, t, c, g, other or unknown
  misc_feature (604)..(604): "n" may be a, t, c, g, other or unknown
gttaacctttattaaggtataatttataaaccataaaatccacccattttacacacacacatcaacgatttttaataaactgatcacgtagtgcaactattgccataatctagttttaggacatttccatcatctctgtaaggtaccctgtgcaatttatagttaactcccatttccacttctggcaaccactcacctcatgtctgtccctacagatttgctattctatacatttttattattattctgcacatttcacataaatgggaacatatactatgtggccttttgtgcctggcttcttgcatttagatcagtattttctaggttcacccatgttgtggcatgcatcgatactttattcctttttatagctgaatgtgaccacagtatataccactttggccattcacctgctgatggacactacagatgcttccatcggagcaaaacagactcatccctgctgaaggacaatcagagtcatccccgagttatctctgctgaaatcatccctgctgagttaatccttgcttanggggccggngctnagtcattcctngttggtcatgtctgttgaagggcaatgcttnngcattcctgntgggg

SEQ ID NO: 7914 - DNA, 607 bp, Homo sapiens
  misc_feature (516)..(516): "n" may be a, t, c, g, other or unknown
  misc_feature (524)..(524): "n" may be a, t, c, g, other or unknown
  misc_feature (566)..(566): "n" may be a, t, c, g, other or unknown
  misc_feature (568)..(568): "n" may be a, t, c, g, other or unknown
  misc_feature (570)..(570): "n" may be a, t, c, g, other or unknown
  misc_feature (591)..(591): "n" may be a, t, c, g, other or unknown
  misc_feature (599)..(599): "n" may be a, t, c, g, other or unknown
ctacaaaaaatgctttatttaaaaatatgatctttttaaaaaggagacttttatacacacttactttagaaacagtcaaaaacacaacagaatcaatccagatttagaaatgatgatttgtaacatacaatattggtatgctgaacaagacagtttaaatgtatgattctttttgtcccttcacatttcaataattcacatttgttaaaactagtggttgggactaaagaaaaggtcatatctgaatcctttccccttcagaaatctgtcacccttctgggcagttacagaaatggcagcagctaggcaatgtttgtatttctttgggtgcctctgtgtcaaaaaatatatctccgcttttattctttttctatgaaatttatatttatgtggctatagggcctggtcgtatgtcccacgccttttaaaatctaaatttctaaaaacagacactccgtaagggcaaggagcatacactgctatgacctcactggactcagagcttaatgctcttanggtatcancaagagacatggatttgaactttcagtagcacttcaagctgntntnaaccaacctttttagcacggnagtgaaanttttcaat

SEQ ID NO: 7915 - DNA, 599 bp, Homo sapiens
  misc_feature (595)..(595): "n" may be a, t, c, g, other or unknown
  misc_feature (598)..(598): "n" may be a, t, c, g, other or unknown
aacaagcaaggaatgttttattgtgtacattttctcaaaaaaaaaaaaaacccacaaaaacagaacccacaaataggagcaaagaacagttttctagcatctctgggatacacagggcaccatatcttatagaaacatagctagtacaagaacaaagtgtactaattaacattaccccttgcttccccagtcaaaaaaggctatagagaaaaacactttaaattgtactctaatacaaatttgttgcacaattaaacttcaacttactcaaagagttattgtattgtaaactgcagaaaatagaataggcattcaataaatctgctcacaattaacaattaagcaatagacacttgaataaatatagcatgtattacttatttgttaagccttacacttacgatgagcagatggtttatcactatatagtaacagattttttttacactttaggagatccatatccaataacggaagtagaagtctttaacgaaaactgattttagaaaaatatctccttgggctgaactactatgggaattattacatatttgggtcagttcccagtttaaaatataggactacaactggattnttnt

SEQ ID NO: 7916 - DNA, 572 bp, Homo sapiens
  misc_feature (99)..(99): "n" may be a, t, c, g, other or unknown
  misc_feature (234)..(234): "n" may be a, t, c, g, other or unknown
  misc_feature (302)..(302): "n" may be a, t, c, g, other or unknown
  misc_feature (498)..(498): "n" may be a, t, c, g, other or unknown
  misc_feature (523)..(523): "n" may be a, t, c, g, other or unknown
  misc_feature (535)..(535): "n" may be a, t, c, g, other or unknown
  misc_feature (537)..(537): "n" may be a, t, c, g, other or unknown
  misc_feature (542)..(542): "n" may be a, t, c, g, other or unknown
  misc_feature (558)..(558): "n" may be a, t, c, g, other or unknown
  misc_feature (572)..(572): "n" may be a, t, c, g, other or unknown
cagaacaatgtatttgtttattaaataaagattgcttgttacacagaaaattattttctttaattatcatacatagctctctttcacatcaggcagtanaacactgcatttacttcatctcaggatactggatacaagattaatagtcagtttgtctcaaaatatgtcaatgtgttctgtctgaaaacatgcagagggcttggagtaatcatatcattttacgaggtgctttanaaaaccaagctacaggtcctgaatacattccaaaaatcctaaataattaccaacagaagagagaactnttgccagccagtacactcaataaagaagtacaaaggtgcagacaatgtaactttaccaggaagcttaaggggtggcccagcttctcggcaggagtcagcaggcctggcagcctccatggctggcgctgctgtgtggaaacagggccatggtcttcttgagctcctggtagctccagtgcatctgctccacctcggntctgtgctgcgcccgcacctggctnacttctgcacangngtcantgggcttaccaagganctggggttttcttn

SEQ ID NO: 7917 - DNA, 509 bp, Homo sapiens
  misc_feature (307)..(307): "n" may be a, t, c, g, other or unknown
  misc_feature (341)..(341): "n" may be a, t, c, g, other or unknown
  misc_feature (453)..(453): "n" may be a, t, c, g, other or unknown
  misc_feature (456)..(456): "n" may be a, t, c, g, other or unknown
  misc_feature (476)..(476): "n" may be a, t, c, g, other or unknown
  misc_feature (479)..(479): "n" may be a, t, c, g, other or unknown
  misc_feature (482)..(482): "n" may be a, t, c, g, other or unknown
  misc_feature (485)..(485): "n" may be a, t, c, g, other or unknown
  misc_feature (507)..(507): "n" may be a, t, c, g, other or unknown
aaaaccaaaagcagtggacatttattccttaacttttgtgcaagagtgtaaagatgcatttgaaagaacctgatggctagagcatcagccatggctttcaggttggcctagtttacaattaggaaaagaaggggggaaaaaggtaacttgcctagttcacatgaatgatgtttctggcaaacacagttgtttacaagtttcaagctatattttactagggtcaagggaagacttcaaaaagccacatacagtacaatttaaaattgtgtgaacatcctgcaaatgttagtgcaaagtaattatgtanactctccaaacaagactgtgctcttggttcccangtttggtcaatgttgctcttttataattacaatcacagaagcttaacttaccaaatagcaatgcctctgtgttttatgtcctatgtaccaagggaatgtcacaaggtttttnatnaaatgcagcttagttcattnatnaancanattcttattgaatttaacaatnaa

SEQ ID NO: 7918 - DNA, 532 bp, Homo sapiens
  misc_feature (447)..(447): "n" may be a, t, c, g, other or unknown
  misc_feature (490)..(490): "n" may be a, t, c, g, other or unknown
  misc_feature (497)..(497): "n" may be a, t, c, g, other or unknown
  misc_feature (503)..(503): "n" may be a, t, c, g, other or unknown
  misc_feature (515)..(515): "n" may be a, t, c, g, other or unknown
  misc_feature (519)..(519): "n" may be a, t, c, g, other or unknown
  misc_feature (521)..(521): "n" may be a, t, c, g, other or unknown
acttattcactcaacaatcatttattgtttgtgtgcaaggcactgtgttaggtgccaagagcagaaggaagaagatacaaatatgaatgggcatattctgccctccaggaacatacaatctaagagtgattaattgcatacaaataattgtaataccagatagaatgtggtaagtgccatgggagatactactataggaagctttcttagctcttaacttcaaagaccaggtcaggttttgtcctactgtagtctgtggcaggcatgaaaaggcagctgaggggacctgctaggctttgatgaactgagctgcatcttggatttcgcttcctcttctttctcagccgaggttacggtgattagcaagggcagttgctaccactgaaaggatagaaggaaaaaggcaagggaaaatgatacgtactaagatgcacataggagcactcnatagtaagtctatggaccgggccctggggtactgccattatanagggaangggaanaggattggttanggananagaacacttgg

SEQ ID NO: 7919 - DNA, 574 bp, Homo sapiens
  misc_feature (12)..(12): "n" may be a, t, c, g, other or unknown
  misc_feature (30)..(30): "n" may be a, t, c, g, other or unknown
  misc_feature (57)..(57): "n" may be a, t, c, g, other or unknown
  misc_feature (87)..(87): "n" may be a, t, c, g, other or unknown
  misc_feature (146)..(146): "n" may be a, t, c, g, other or unknown
  misc_feature (436)..(436): "n" may be a, t, c, g, other or unknown
  misc_feature (473)..(473): "n" may be a, t, c, g, other or unknown
  misc_feature (478)..(478): "n" may be a, t, c, g, other or unknown
  misc_feature (500)..(500): "n" may be a, t, c, g, other or unknown
  misc_feature (521)..(521): "n" may be a, t, c, g, other or unknown
  misc_feature (535)..(535): "n" may be a, t, c, g, other or unknown
  misc_feature (574)..(574): "n" may be a, t, c, g, other or unknown
catggggcacanggctgcaattcttttaanggtgatgacagtaacgtaagtctgatncacaagcattatgtattcaacacactgatncctgatagcatgtcaggaaaaaagaataggcaatgcagtttaaggggggaaaaactganaagtcataactactccaaagatgtgcaggaaaccacaaaagacatggacctgcttctactataaaaagaaaatgaagcacttctctggggttgctataccaactgtttcagcccattgtagtcttgcctctttcagggctttagccactatttcatttcatggaaaagcagacatctcctaacaaacagagtgacatttaccaaaataaagagggcttctcagtgagaagcttaataaagaaaaatatttacctatgctttgcacaattttctttttttttttttttganacggtgtctcgctctgtcgccaggctggagtgcagtnggccncgatctcgctcactgcagcctncaccgggcccgggttcacgcnattctcctgcctancctcctggaaaactgggattacaggcacgtgccccatgn

SEQ ID NO: 7920 - DNA, 577 bp, Homo sapiens
  misc_feature (509)..(509): "n" may be a, t, c, g, other or unknown
  misc_feature (524)..(524): "n" may be a, t, c, g, other or unknown
  misc_feature (547)..(547): "n" may be a, t, c, g, other or unknown
  misc_feature (558)..(558): "n" may be a, t, c, g, other or unknown
  misc_feature (574)..(574): "n" may be a, t, c, g, other or unknown
  misc_feature (577)..(577): "n" may be a, t, c, g, other or unknown
gtgggaggaaggataagttcaaaacgaaaacaacaaaaaaccatgataaattaaaaccaaaaataaatattcttctgcacagagttgaaaattattgtgcatcttgcaggtgaagtactttcattggattgtatttccatttgttgaggcaccggcaaataataaaatttgttctaatgttttctcaagctgtacaaagctccaaggtcaaagctccccagaatacagaggaatatatacaagactgtcttctctgtgttcaccaaatatgggattcacagtgagtcattttaataactcctacgccaccccctagccgacggtaattcatcccgccatataacctccatgtattggcatcaggatcaaaaacttctatggtcttcaagtatgttgtgccatcaaaacctcctactgccatgagctgtccattgaccactgcaggccaactccactacggcgtgatgtcatggccaccactggagaccactggttggttctggggttgnatctcttagcactgntcaactctgtagggcatctttancttctacagcntagaacatgtcctggnatn

SEQ ID NO: 7921 - DNA, 563 bp, Homo sapiens
  misc_feature (148)..(148): "n" may be a, t, c, g, other or unknown
  misc_feature (517)..(517): "n" may be a, t, c, g, other or unknown
  misc_feature (552)..(552): "n" may be a, t, c, g, other or unknown
  misc_feature (554)..(554): "n" may be a, t, c, g, other or unknown
gagacggagtctcgctctgttgcccgatctcggctcactgcaagctctgcctcccaggttcacgccattctcctgcctcagtctcccgagtagctggcactacaggcgcccgccaccatgcccggctaattttttgtatttttagtanagacggggtttcactgtgttagccaggctggtctcgatctcctgacctcatgatctgcccgcctcggcctcccaaagtgctgggattacaggcgtaagccactgcgcccggccggccatcagctttaagatatcttctctgacagcagagcatccaaaagcagggaatccaccccttcctacaagggagggaggcctggacaggacttctctagacttctctaatctctctctctctcacacacacacacacacacacacacgcgtgcacacacacacacacacacacacttcatcctaaaatgggcattaagacagttgtgatcacaataaaaagttttgcttgatattaaaccattcttcccatatntgcagaaaaattagcaaggttaataaaaagcttgntntgggatgag

SEQ ID NO: 7922 - DNA, 580 bp, Homo sapiens
  misc_feature (550)..(550): "n" may be a, t, c, g, other or unknown
  misc_feature (558)..(558): "n" may be a, t, c, g, other or unknown
gtggagatgacaggtatgtttattaccctgattgtggtgatggtatcaaaggtgtgtgcatatagtcagacccatcaaattgtattcattaaatatgtaacaactgtacttctataaagctggtaaaaaacactgtacctgtttgtttttacttcaacgtggctataagaaaatataaaattacattacagcttgcattctatttgtatagtactgtcctgctcaagatggattaacaggtgtgtgacactcactgcctgctgagagcagggtgtagggaacctggggttggaaaggagacttgtcaccgtatgctcttccatttatcaatatttcatattttgagaagacatgaactttttgaacaaagataacagaaaatcattgtcaatagttaatctaccagagagattcagaaaccttgcatacttggttttcaggtcttggttgagagttctaacaccgttgaaaaatctcaagagtaacctggtaatgatatcttcattgaattaaaattacattttgctttaatctgatagtcctcttaatncaaaaggncacatcaagttaaacaacatcc

SEQ ID NO: 7923 - DNA, 581 bp, Homo sapiens
  misc_feature (548)..(548): "n" may be a, t, c, g, other or unknown
  misc_feature (556)..(556): "n" may be a, t, c, g, other or unknown
ctggtagacagtacacttgggaattatactgcaccaggcataaagagtaagttttctaccacagggacattttgtattcagaattcaatataaatatttctagtcagacatttccatggctacagatatttggttccttgatttatatgcatagaaagaaacagttgtcataactgtaaaaagcagtacttaataagtacttttaaatgattggaacagttttcctttaatattacaatactacttatttattggtttggaaactaggtcaccctacatgatgttttgatttttctcaaaggcatcatgagtactctgcttattctttcattcttgtatttttagccttctagttgagttagggaccattttatcagaaatcattttagcactgtaataagaaaagctctgttaagggtagattatataccataatgattttcagacttctttttataaaaaaggtatctggagactctgaacaggcacatgcatactcagggggaagggaacaaaacatggaggagtctgccaaagcacaaaacttncttctggncctcactggcttcaaataaatacca

SEQ ID NO: 7924 - DNA, 578 bp, Homo sapiens
  misc_feature (499)..(499): "n" may be a, t, c, g, other or unknown
  misc_feature (534)..(535): "n" may be a, t, c, g, other or unknown
  misc_feature (554)..(554): "n" may be a, t, c, g, other or unknown
  misc_feature (574)..(574): "n" may be a, t, c, g, other or unknown
  misc_feature (578)..(578): "n" may be a, t, c, g, other or unknown
gagacggagtctcgctctattgcccaggcttgcatgcagtggtgctatctcagctcactgcaatcactgcctcctgggttcaagcgattctcctgcctcagcctcccaagtagctgggatgacaggtgcccgccaccatgcctggctaattattgtatttttagtagagacagggttttgccatgttggccaggctggtctcgaactcctgatctcaggtgatccacctgcctcggcctcccaaagtactgggattacaggcatgatctaaattctttatacccttcaagggcaggaaaccagtatctctgaaaagcttgtttgttttaatacaattgaacatttcatctttccccccacagtaatcaaagcaaacattttatcattattattcttggtatctcaaagtaaattccaggaatgtaagaaagtctgacttggaaatattacatagaaaaaggctgaattaacacattacattttttaagtttttccttgnaaagtatacattgacatctacttatctgatagcannactgctgggttttaatganttttggtttgggtttggttncctn

SEQ ID NO: 7925 - DNA, 579 bp, Homo sapiens
  misc_feature (413)..(413): "n" may be a, t, c, g, other or unknown
  misc_feature (489)..(489): "n" may be a, t, c, g, other or unknown
  misc_feature (492)..(492): "n" may be a, t, c, g, other or unknown
  misc_feature (537)..(537): "n" may be a, t, c, g, other or unknown
  misc_feature (546)..(546): "n" may be a, t, c, g, other or unknown
  misc_feature (555)..(555): "n" may be a, t, c, g, other or unknown
  misc_feature (567)..(567): "n" may be a, t, c, g, other or unknown
  misc_feature (579)..(579): "n" may be a, t, c, g, other or unknown
ctagtgctggcagacactggctttttatttttaggataagaaaacaggcatattctttgtggtccattatctagagcccatacttgggcagcatttgaaatttcaccttaaccacagacagggctccagggaagtggagatgtaattcttacaacaacagttctgatcatggccatggtgatgactttccaggtctcgtgttcaagtggtgccagaatgcaggagccggtgggcagccctgaggggttgccttggccgcagcctctgtgcacgctcttcctggtgtcctcttacccggtagctgtgcgcttgttcccgtgagaacagcctgcttccagagtgcccaggagtgctggtcagggacagtgcccgtgaggctgcagaggaagtggggtccatggcccacccatctntccctcgcagcagccctggccagtgtcatcctggtgtaaaaagggttgcgcacaggataggaaggaaccacagttntgnttactgggcttacaaccggttgcagcctgggttcttaaaatgganttggaaggnaaatcctanaattttggaaantgggcttctggn

SEQ ID NO: 7926 - DNA, 587 bp, Homo sapiens
  misc_feature (416)..(416): "n" may be a, t, c, g, other or unknown
  misc_feature (494)..(494): "n" may be a, t, c, g, other or unknown
  misc_feature (521)..(521): "n" may be a, t, c, g, other or unknown
  misc_feature (535)..(535): "n" may be a, t, c, g, other or unknown
  misc_feature (552)..(552): "n" may be a, t, c, g, other or unknown
gagacagagtcttgctttgtcccccaggttgaagtgcagtagtgcgatctcggctcactgaaatctccacctcccgggttcaaccgattctcgtgcctcagcctcctgagtagctgggattacaggcatgtgccgtcacatctggctaatttttgtactttttagtagagatgaggttttgccatgttggccaggttggtctcaaactcctggcctcaagtgattcacctgccttagcctcccaaagtgctgggattacaggcgtgagcctccacacctggcttagacctgacttttatccaggctataaactcaccaactgcccaaccacagatgtttagcctttgggttctattgtgctgctgtggaaactgtcctgcttctggagtacagggactaggcttttaagtcactgntcaagtccctaccttactatgcaactttggacaagtccttttacctcttgggcctgagtttcttcactgaaatgaaanggctggactaaaattctaaggtctttncatatctaggattngtaccattggaaatggncccaattttttctggctttgggcctaaaactggat

SEQ ID NO: 7927 - DNA, 578 bp, Homo sapiens
  misc_feature (530)..(530): "n" may be a, t, c, g, other or unknown
  misc_feature (549)..(549): "n" may be a, t, c, g, other or unknown
aaaaacttcaaattttaggatgatttttatttacaaaacagattggtacttttgttttacaaaaattacaaaaaatgactcttaaaaatagaaatagcttctcagactcttgggaactacttttaagcaaccaaggagttagaactcagatggttttcttctttgtaacagcaacaatgaccacggctctgtgccatggcaatcactgctgagtgtcttctcctacaattacacaggcccgagctgtgtctggtggaaaggtctccactcaggtcagagtctgaaggagcaagatcttctcattaatgcagaacctgtgcagaaccaccatcagattctctccacagcgggagacctggcgctccatggccaggcgaaagtcctccttcacgcctttggtgatgcctcgagttacagtgtggtgcttgatcagcattccttggatggggtaagtaattccagatgaattttcccaccttcctgagtctcaagtaggcaaattccttcagcatatcataattgtaccgaantgaaaaaatctcatatggnaattccttgtggcaaatttattggcagct

SEQ ID NO: 7928 - DNA, 580 bp, Homo sapiens
  misc_feature (439)..(439): "n" may be a, t, c, g, other or unknown
  misc_feature (466)..(466): "n" may be a, t, c, g, other or unknown
  misc_feature (469)..(469): "n" may be a, t, c, g, other or unknown
  misc_feature (500)..(500): "n" may be a, t, c, g, other or unknown
  misc_feature (515)..(515): "n" may be a, t, c, g, other or unknown
  misc_feature (522)..(522): "n" may be a, t, c, g, other or unknown
  misc_feature (539)..(539): "n" may be a, t, c, g, other or unknown
acagagtgacacatgctacttaaaagaacaacaaaacagggagaagtgagaggcagcagccttcccttcctctcactaaaaaaaaaaatcaaagcatggattcctttttattgctcctcccgtgttttttgtttgtttgcttgtttgttttttttagatggagtttcgctcttgttgcccaggctggagtgcaatggtgcgatcttggctcgttgcaacctctgcctcctgggttcaagcgattctgctgcctcagcctccggagtagctgggattacaggtgcgtaccacaacgcccggctaattttttgtatttttagtagagatggggtttcaccatgttggccaggctggtctcgaactcctgacctcaggtgatccacccacctcagcctcgcaaagtgctgggattacaggcttgagccaccggcccaactgntccttccatggttttgcttcctaccanctntgatgaacccccagtttttttttttttggtnggtggttggttgaanctctggntttttttgagcttcctnttgggtaactgagtctttccacttaagggggaaaggatgat

SEQ ID NO: 7929 - DNA, 580 bp, Homo sapiens
  misc_feature (402)..(402): "n" may be a, t, c, g, other or unknown
  misc_feature (464)..(464): "n" may be a, t, c, g, other or unknown
  misc_feature (542)..(542): "n" may be a, t, c, g, other or unknown
  misc_feature (564)..(564): "n" may be a, t, c, g, other or unknown
agacacaaagttggatttatttttacaagatacaaaatgtaaacatggcaaaataaatagttaaaacaagtgatgcaggatcccatttcatgctcatgatcccattaaagaattattttttaaaatccattcagttgcaaattcaagtgcaaaagcatgatgatgaatatctactattcaagtaacagaaataatattgatgatacaaataaactattttacaaggtagtgattttcccaattttacaaaatatacatcatatatggatttaacatccaatatactatagtccatttaggtccattgttacactctgtgatccacagagtgttgccttttgcattcagctggaatatgaatgactgcacaccatcagcacaggtcagagccacgtgttttangttatgtcacttccatagctactggtgtctctgctattccatttaagcccaatctttctggntcgtgggtctctcttgctatgctgctgatggcactgctgggaagtaaccttggcactctgtcctactggcagcactgnggcaaggtttaaggttgtggcnatgggcctgaagccct

SEQ ID NO: 7930 - DNA, 572 bp, Homo sapiens
  misc_feature (358)..(358): "n" may be a, t, c, g, other or unknown
  misc_feature (390)..(390): "n" may be a, t, c, g, other or unknown
  misc_feature (413)..(413): "n" may be a, t, c, g, other or unknown
  misc_feature (424)..(424): "n" may be a, t, c, g, other or unknown
  misc_feature (454)..(454): "n" may be a, t, c, g, other or unknown
  misc_feature (466)..(466): "n" may be a, t, c, g, other or unknown
  misc_feature (479)..(479): "n" may be a, t, c, g, other or unknown
  misc_feature (498)..(498): "n" may be a, t, c, g, other or unknown
  misc_feature (509)..(509): "n" may be a, t, c, g, other or unknown
  misc_feature (517)..(517): "n" may be a, t, c, g, other or unknown
  misc_feature (530)..(530): "n" may be a, t, c, g, other or unknown
  misc_feature (564)..(564): "n" may be a, t, c, g, other or unknown
  misc_feature (572)..(572): "n" may be a, t, c, g, other or unknown
gcaagctaacaaaatgaccatgtattgaactgagtctcccattctttagtttttaactctatttcctttatatggggtaataatcagttcatgtagaaaataagttatcgacatacttttttaaataacagcctgggtatcttcagcttcacgaaacgggtgtaacagttttaatcggcacgcttgagagaacctagcattcaatctgagagcttggcactcgcctcatgttcagggcgtgacgatgtatctcttgcatctgtctgatgcggtccttctgccacatcaggttttgaggcatagggtatctctgtgtgccatgcaagtaccggtatgggatcctcacgtgacaagcagnggctctacaacgaggttgtggcataggaggangaagcatccacctcttcctcttncgacaatatcnggtaggcttctttccgatactggttatcantatcattactgnttttttcagcctnctataattgagacatcatnttttgtaatancaaaaggntggttcttttaangcttaaggacttcttggaggcaagctttcaaggntcttattn

SEQ ID NO: 7931 - DNA, 588 bp, Homo sapiens
  misc_feature (412)..(412): "n" may be a, t, c, g, other or unknown
  misc_feature (458)..(458): "n" may be a, t, c, g, other or unknown
  misc_feature (467)..(467): "n" may be a, t, c, g, other or unknown
  misc_feature (516)..(516): "n" may be a, t, c, g, other or unknown
  misc_feature (528)..(528): "n" may be a, t, c, g, other or unknown
  misc_feature (561)..(561): "n" may be a, t, c, g, other or unknown
  misc_feature (566)..(566): "n" may be a, t, c, g, other or unknown
aaggaaattgaaatctttaaaagctttcttgaaattgcattctttttattcttagatttgataaatagcatatgttttgggaggtggtgggggggcacagggcaccaggagagggaagattcgtgtttttacagctgacatgtcgcttgggaaaaagtcccagggaaaaacagtttggatggaggagaaagaaaaaaattttactgcaaccccatcttgcctagcttgctagcatctcctgctgcctggatattctggccaaagtggtaggtatcacctcaggtcacaaactgccaaataggaagacgacacttacagaagttattaaaatttgccttgaaaaacaaaataaaaatatagattagccagtgtgttcaaggagctcttttcttgccctagagggaaagcagangctaccctgctaaggtagcaggcagctgggattcaaaatgtcccangatttgaangcatgccctcttaaaaatcacttccatcaatgtattcacagcagaaccngtgacttgccanggtttgtggggatttaggaagggcaatggggcnttttnttcccccaaaaagaacaaaagg

SEQ ID NO: 7932 - DNA, 538 bp, Homo sapiens
  misc_feature (411)..(411): "n" may be a, t, c, g, other or unknown
  misc_feature (454)..(454): "n" may be a, t, c, g, other or unknown
  misc_feature (457)..(457): "n" may be a, t, c, g, other or unknown
  misc_feature (504)..(504): "n" may be a, t, c, g, other or unknown
  misc_feature (507)..(507): "n" may be a, t, c, g, other or unknown
  misc_feature (509)..(509): "n" may be a, t, c, g, other or unknown
  misc_feature (511)..(511): "n" may be a, t, c, g, other or unknown
  misc_feature (515)..(515): "n" may be a, t, c, g, other or unknown
aaaattgaaccttttttttttttttaaaaaaagcacataaaccctacatactaaaattatacacatcaagtactggtccaatcttatatcaatctatttacaattaaacagcaccatggttttcccacctaggttagttaaacatgcccagagaattgttattcaaagcatatgttcctttaaaataaaataaactcttaaaaagagagctcaaatcctcaacaaagaaagaccttttaccaatcgatatcatagatattgatgacatcaccaaatctgcttaagaaaaaaacagttttaaacacttttttccagttgacaaactttgagaagtgctgctattcgatgtggcacacaaatgaacaaaaactttgatgacaggagcaatatactgatttaccctaatatctncacctctaaacataaaaaaaatctcctttgggattaatgctgnggncttcacttggaattagattcaatcatcagccaaatttaaattagatntancncnatcntttaaaaggatggcttaaaaata

SEQ ID NO: 7933 - DNA, 598 bp, Homo sapiens
  misc_feature (469)..(469): "n" may be a, t, c, g, other or unknown
  misc_feature (496)..(496): "n" may be a, t, c, g, other or unknown
  misc_feature (498)..(498): "n" may be a, t, c, g, other or unknown
  misc_feature (516)..(516): "n" may be a, t, c, g, other or unknown
  misc_feature (527)..(527): "n" may be a, t, c, g, other or unknown
  misc_feature (562)..(562): "n" may be a, t, c, g, other or unknown
  misc_feature (588)..(588): "n" may be a, t, c, g, other or unknown
  misc_feature (596)..(597): "n" may be a, t, c, g, other or unknown
aaagttttgacacttacactttactcatagattgggcagttatacttctatgaggcaactaaattgaaatgtaaaacaaaagaactgttcaattatgatatcacaaagtcccagggaaaacctgggaataaaatctccctttgattaatgtttcccacttttaatgcaaagtgcaagagcaagggcttccaatggatgacacaggtgggaaagtcataagctcttcccccacatcccccaacttcattccccacacacaccacagatagtttatgagctaattctcaactctcctggtgcacgtatccaggactctattgaattatttatgaagtcaggcctcaattcccaatagtttaaagtaatgaaaaagaaagatatgaggaaatacattcaataagcaaaaataaaagaactctggaatctgacatatttcatgttatgaaagtaatggctgacataatgtcangggcatttaaaggtgagttagtaaccntncaaggaggatcagactgnttctggccggngctttccagaataacctggcaggttttcctggagntttcattctacaatctactctttcgngggttaanng

SEQ ID NO: 7934 - DNA, 581 bp, Homo sapiens
  misc_feature (485)..(485): "n" may be a, t, c, g, other or unknown
  misc_feature (514)..(514): "n" may be a, t, c, g, other or unknown
cacctgtaacactgactttatttttaagtctgaaaatgtcttgggaaagttttacaaaaaaaaaaatcaacagaagcaagttatgaaaatatttgaccagcttcatctttggttatttcttattgcagctctgtaaggacagactgttcccaaagctccagccatggcaggaagggaagcaaatcagtccctgtataaaccatttaaccaattgaatgtatcacatgttgataaatacatagaagcaggccctagggcctacaaaaccagccccactcccaaccacaaggttgaaagtcttatggggcagaacattaagactcctttataaatatgaaaatagattaatcaacaggaaaaggtctttgaataggttagctaagagccatgaccaccacgctgccttgctgtccccttgcatagaaatgtagtgacgtggtctgaccatgcagtaagtgcaaacagcaattactcaaatgtcttanaatactggcaagaagcaccccatattcangtctgggaaacagccatgaccgttacggcctttgacaagttcctggtccctcagaacttattgccca

SEQ ID NO: 7935 - DNA, 580 bp, Homo sapiens
  misc_feature (112)..(112): "n" may be a, t, c, g, other or unknown
  misc_feature (469)..(469): "n" may be a, t, c, g, other or unknown
  misc_feature (502)..(502): "n" may be a, t, c, g, other or unknown
  misc_feature (508)..(508): "n" may be a, t, c, g, other or unknown
  misc_feature (521)..(521): "n" may be a, t, c, g, other or unknown
  misc_feature (533)..(533): "n" may be a, t, c, g, other or unknown
  misc_feature (561)..(561): "n" may be a, t, c, g, other or unknown
  misc_feature (563)..(563): "n" may be a, t, c, g, other or unknown
  misc_feature (574)..(574): "n" may be a, t, c, g, other or unknown
catgcacacatatgtttattgcagcactattcacagtagcaaagacttagaaccaacccaaatgcccatcagtgacagactgaataaagaaaatgtggcacatctacaccgnggaatactatgcagccataaaaaaggatgagttcatgtcctttgcagggacatggatgaagctggaaaccatcattctcagcaaactaacacaagaacagaaaacaaaatactgcatgttctcactcataagtgggagttgaactatgagaacacatggacacagggaggggaacatcacacaccagggcctgtcagggagttgggggctaggggagggatagcattaggagaaatacctaatgtagatgacaggttgatgggttcagcaaaccaccatggcatgtgtatacctatgtaacaaatctgcacattctgcacatgtatcccagaacttaaagtacaataaaaacaaacnaaaaaaacagctaattaagcccttatattctgnaaatgnagggttatattgntgggacaaactnaaaaacatgcttgccaaatgcctgcaananaatcctgtgtncaaaaa

SEQ ID NO: 7936 - DNA, 577 bp, Homo sapiens
  misc_feature (427)..(427): "n" may be a, t, c, g, other or unknown
  misc_feature (505)..(505): "n" may be a, t, c, g, other or unknown
  misc_feature (531)..(531): "n" may be a, t, c, g, other or unknown
  misc_feature (541)..(541): "n" may be a, t, c, g, other or unknown
  misc_feature (549)..(549): "n" may be a, t, c, g, other or unknown
actgtaataaaagcagcttgttttctgcttgaacaatagctctgagagcaagaaggctggaaatgcacattcagaaatgaggtaagcaggacccagtgaggcacgacgtggtttactagaagtggccggtttcctggcagctttgtaaatggactctaacctcagtggaatctgggccccggctggatcaggaggcgaccatatggcttttcttgtttcacgtgaagaatctgttgcgctgagagcaccaggagcaggtagaagacccgggcagccatcctgcgggggctgagaggtgacaccaggctgctgaagtcgggctccctgttagcctgcagctccagtgccactgccctgtgcactgcttccagtgagagcagctcgagctctgggggcagcaccaaaggcatctccatgggcacctcanggagttcaggcaccacggcaatgcaggagcttctggcgccttcacctcagccaggcccaccgttcttctggtgggatnagctgatccggacttcttctctttanctggctttanggagactntaaagacccataaggggaacactggctc

SEQ ID NO: 7937 - DNA, 582 bp, Homo sapiens
  misc_feature (538)..(538): "n" may be a, t, c, g, other or unknown
  misc_feature (557)..(557): "n" may be a, t, c, g, other or unknown
  misc_feature (567)..(567): "n" may be a, t, c, g, other or unknown
ggggagaaaattaaaccttatttatttttaaagtcaaaccactaggaaaatatatcacagcctggaaacagcaaacggacaggctatattataatttcaagtaataagttggtgaaaattcaacgaagttgctatcaaaacaataaggtgccatgctggggcaggaacactgccagctgcacaagccccaggcaaaaatggtatttggtaatgggggctgtctctcctttgctctaagggagtcagctcatcctagcccaagttgcttactttttctcccttgaatttcctgttgccaggggtttgtctcaattgggctctgttaattcagggggctaagtaggcaatgctaggtgtaggctttcattccatatgttctaataaaaccaggttttcccaaatccagtacttcatttactctgttgtaatcaagtagccaactgctcctcttttactggtcattcctagatctagtatatatcacaatcaaaacccccttcttttaaaggggaaagtggtactgcagaatggctggcantttgtacacacaggcttangggccatcanccagtaatctgcttc

SEQ ID NO: 7938 - DNA, 601 bp, Homo sapiens
  misc_feature (464)..(464): "n" may be a, t, c, g, other or unknown
  misc_feature (475)..(475): "n" may be a, t, c, g, other or unknown
  misc_feature (515)..(515): "n" may be a, t, c, g, other or unknown
  misc_feature (533)..(533): "n" may be a, t, c, g, other or unknown
  misc_feature (540)..(540): "n" may be a, t, c, g, other or unknown
  misc_feature (554)..(554): "n" may be a, t, c, g, other or unknown
  misc_feature (575)..(575): "n" may be a, t, c, g, other or unknown
  misc_feature (581)..(581): "n" may be a, t, c, g, other or unknown
gtgttcatccacaacatttattttaaaatccatctcatgctttacctttggcaatttttttcttaaggatgtgttaccaggtggagaaaactaataaattatacaatctagcttcgctgaaaaagcaagatttcaatatctacttacaaaaatgaaaagtgctttttcatggcaaggttagatacctgcaaaagactgaaatagctcaacttttccattttctatttttttccttggaactacttgaagaagcactgtttttcacaatcataataagagtaattaaacagctagaagcaaatttagccacaatcctattccaacatacaaacatgtttattacaacacagtaattcctttaaataatttgtcaacataaatatgtcaaatgggttttaaaatcatttctctccctgttccccgacaaaaaaagtcctctggcgctatgagctatatattgctgntcacttactgntgaatccaaactagtgaaatgataccgggtaactattacncagagcattgacactaanttgaggnggaataatgaatanttaatggacctcctttaagcnggaacntatactttcatgggtgccct

SEQ ID NO: 7939 - DNA, 601 bp, Homo sapiens
  misc_feature (476)..(476): "n" may be a, t, c, g, other or unknown
  misc_feature (601)..(601): "n" may be a, t, c, g, other or unknown
agtttttaaggagatttatttttcgtacacaagtgatcaatttgtcacaatatgacaagttattgataacaagtattttaacttacaggtatgataaaagtctaacatttacaaaatggggatattactatataaaaaattgaaagtattagtttttatgtaaaatattagtttcttcattctgatacagtgctaaacttaatgtaaagccaaacttcaggacctactctagacataaaataattttcatttccatgtctctagaatctaaaatgctaagtaaattttctctattacttttcgtcaaaataacttaaagtattaaaagacaacctaatgacagtaataacatttttctttcctaaaaaatatttggtatctgatttaaagacatgaataacacaatagtaacaacttaaagatcgacaagatatactaaaaatgatatttgggcatcatatctacataataattgngaaacacctggtttcctaataactgagaaccatcagtaactttttcataaaaggacttcatagctctaaatatggaatcaaccctggaagccgaacccttacatggcaaacacctacgggggtan

SEQ ID NO: 7940 - DNA, 592 bp, Homo sapiens
  misc_feature (498)..(498): "n" may be a, t, c, g, other or unknown
  misc_feature (538)..(538): "n" may be a, t, c, g, other or unknown
  misc_feature (541)..(541): "n" may be a, t, c, g, other or unknown
  misc_feature (568)..(568): "n" may be a, t, c, g, other or unknown
  misc_feature (580)..(580): "n" may be a, t, c, g, other or unknown
  misc_feature (585)..(585): "n" may be a, t, c, g, other or unknown
gttttcattatgtttaatgtaaatactatggaaaacatgcataattactaggcaactcctttgtggaaaaaaaaagtctgcatgcttctaaactctgctacatctgttctgtgtaaaacatttctcctgataattttgtgttactttgttcaggctctttgtagcagctgtgtactgctaatgacttcccttattagtcagctccagtactttcttgggtttgaagcatatagtgtagaaaaatttggcttttcagcaacgttgtattaggctaatggatgacgtttaaatccacggccaaggtaggataagagtgttatttctgctactgctatttttccaaagaaggataacttttaaaatactagagttcacaaataatttgtcaagactgtatatatgagatatgaccattagttgggctgttattagggttatttcagcactgagtctttagagtcaatgcaccctcacaattataaaatgaggctataaggnctggaagcatattgcaaatcatggtagagattatccttcntanaaaatcccttcttcctttagactaagnaaatttttcccnggctnaagcctc

SEQ ID NO: 7941 - DNA, 601 bp, Homo sapiens
  misc_feature (460)..(460): "n" may be a, t, c, g, other or unknown
  misc_feature (517)..(517): "n" may be a, t, c, g, other or unknown
  misc_feature (543)..(543): "n" may be a, t, c, g, other or unknown
  misc_feature (548)..(548): "n" may be a, t, c, g, other or unknown
  misc_feature (564)..(564): "n" may be a, t, c, g, other or unknown
  misc_feature (573)..(573): "n" may be a, t, c, g, other or unknown
  misc_feature (588)..(588): "n" may be a, t, c, g, other or unknown
  misc_feature (595)..(595): "n" may be a, t, c, g, other or unknown
ctttgggttttgttttgattctgtttgacccacttaactaaaatgatactatagatccttcaaaagcagaatcatgccagttacacatctcaaatcctttgatctacttacttcgtactttaagaggtaaatttgagaatgaaaatgggagactccaatgcaataacacctacataaggaaaaacacacataaacacccacacatattccccagcctcaaaactaaagcaaggtacacatttacatttccaaaccccaaagcctaaactgtccaggaaaagattctagctttgtgggctgagtttattttgcttctggttataaacaaatgtagtgtatacacacatctgtccaagaaatcttgcacaaggtggattttacatggggtatcatgcacaagattaaaaacaagaccaaaaggtggaaattttaaaagaggaaaatataaaggctccaaggnttaactgctctggggtagaaaagatcacatctggtgactgaaggatcccagaaaggnccaaaacgtccataaatatccttggnttcgnactggcaaagtagtanttgctaccngaatccaactggggnaaaagtncctgcc

SEQ ID NO: 7942 - DNA, 557 bp, Homo sapiens
  misc_feature (505)..(505): "n" may be a, t, c, g, other or unknown
  misc_feature (531)..(531): "n" may be a, t, c, g, other or unknown
  misc_feature (541)..(541): "n" may be a, t, c, g, other or unknown
agggtataaaaagacagatgcaaccatacatttaatttttaaaaatggaatgtatcttacataaggattttgtgaaaaatcttatacctatctgagtattacagaagatgcatataccttccagagctcatggaggaaagagtgtataaacaattttgataaggagttgaaaaacaatttgaaaatagtttacaaagagagaatcaggaggcagaaaaagcttcaagaggcatggtcttcagaaattgttctggaatgctgtttcacttgtatcgatgtcatgttcctggttcaatttcttgaactccaccacttggaagaagacgtgctcaaggatatgtttggcatcctgttggtcctttggtagtttactgggttactccaagaatatcaccacacttcctgacataaaattccaggtcttcttcagtacacttattgggaatctgacccagcccgtgccttcttaaaggaaaaccgtttcatctaaatcaaaatagcttcngaaggaggaagggggtaactcccggnaacctggganggaaaaacccaggctg

SEQ ID NO: 7943 - DNA, 506 bp, Homo sapiens
  misc_feature (475)..(475): "n" may be a, t, c, g, other or unknown
  misc_feature (480)..(480): "n" may be a, t, c, g, other or unknown
  misc_feature (482)..(482): "n" may be a, t, c, g, other or unknown
  misc_feature (487)..(487): "n" may be a, t, c, g, other or unknown
  misc_feature (492)..(492): "n" may be a, t, c, g, other or unknown
  misc_feature (500)..(500): "n" may be a, t, c, g, other or unknown
  misc_feature (503)..(503): "n" may be a, t, c, g, other or unknown
cagtgaaagcaacatttcaattacaaattttaatgcctgttaaactacctatgggagaagctgagaagtcctaggcaaatgcactttggggtatactacagtgttccttcagtctgcacaaagattaaggtaatttacagtcaatctgtgaatgaatgttgagacaatgttacattatgtgtctgtacaattaattgtccttaaagagataaccagaatcagcttttctactgtattttcaacaaacctgactaaccggcacttttgctgggagatgtttgtcaaagatgctgtaagattctatacaattaggaaatactcagctttaagagtattttcttatcttcacttttttagttacaggtgttttgctcagagagcctattgcagtatgtttccagaaatgcagtcccaaatgtgcatactctatattggatacaaataaaacaaaattatcagtagtataaatcttacngcatngnttgcnaaaantgcatgcnaangtc

SEQ ID NO: 7944 - DNA, 560 bp, Homo sapiens
  misc_feature (500)..(500): "n" may be a, t, c, g, other or unknown
  misc_feature (520)..(520): "n" may be a, t, c, g, other or unknown
  misc_feature (527)..(527): "n" may be a, t, c, g, other or unknown
  misc_feature (536)..(536): "n" may be a, t, c, g, other or unknown
  misc_feature (542)..(542): "n" may be a, t, c, g, other or unknown
  misc_feature (548)..(548): "n" may be a, t, c, g, other or unknown
  misc_feature (552)..(552): "n" may be a, t, c, g, other or unknown
aattctgccatttcctcttaaaatttagggtttaacaaagacaacagggctgtttgccaaatcgcagctattaattcacagcatagaaaagtcaaagctatagcaaaaaattgctaatctgcacaactttaaaaaatagttcagtacatttttgttataaaattcatttacaggaggttattcacatgtacttgtcaaatttactcctgataattcacaaaaacatacaactcaacaaactgtgcacaataaatccaaggcaaattatatacaaagaaacaaaacaagcttttaagtagcacatattcatttgaaataactaatattgaaagaagacagggaactttcttttaatgccatggcaaagacgaagcgaagagccacacttcacaccttgtaaaaagaatagccctgttcaacaacgctgcgctgacagccacatcaggaggggccacggtgaacacaggaaatggctttggcaaatcttgtccactggaacnagtgaaagttcaaagtaatngggaagnccactgganttcctntgaaanggcngcaaggaa

SEQ ID NO: 7945 - DNA, 542 bp, Homo sapiens
  misc_feature (449)..(449): "n" may be a, t, c, g, other or unknown
  misc_feature (487)..(487): "n" may be a, t, c, g, other or unknown
  misc_feature (506)..(506): "n" may be a, t, c, g, other or unknown
  misc_feature (508)..(508): "n" may be a, t, c, g, other or unknown
  misc_feature (512)..(512): "n" may be a, t, c, g, other or unknown
  misc_feature (515)..(515): "n" may be a, t, c, g, other or unknown
  misc_feature (521)..(521): "n" may be a, t, c, g, other or unknown
acaaataccaaaagatttattgtagacaattttgttacacaattatacacattatgatacacgtttgaaacattaacacacgtggagactgctaaatcatttaatattccttttgcaaaaagataatttctttaggctgtgatacctgcaataaccaatctgttctcatttggatcagatctttctccctctgtcctggagatctcacagttcactttgctgaagcaatctatccacttccctatcgaccttgcttatagcagttcaggtatagactatttgagccttatatactaaactgttaagccagtgcgtgccctatgccctgctgagaatagattccttctgtacttgcagccctcagatgctgaattgatcaatcaatttttgagacggggtctcctctgtcaccagggctggagtgcagtggtatgatcttggcacactgnaaccttcggcttctgggtcaaggggatcttcctggctnaagcttccgagtagctggnantacnggnacacancaacatggccaagttaatttc

SEQ ID NO: 7946 - DNA, 516 bp, Homo sapiens
  misc_feature (19)..(19): "n" may be a, t, c, g, other or unknown
  misc_feature (476)..(476): "n" may be a, t, c, g, other or unknown
  misc_feature (479)..(479): "n" may be a, t, c, g, other or unknown
  misc_feature (484)..(484): "n" may be a, t, c, g, other or unknown
  misc_feature (494)..(494): "n" may be a, t, c, g, other or unknown
  misc_feature (500)..(500): "n" may be a, t, c, g, other or unknown
  misc_feature (503)..(503): "n" may be a, t, c, g, other or unknown
  misc_feature (508)..(508): "n" may be a, t, c, g, other or unknown
aaatgaggagatttaatgnctttacattatacatttcaaaggaacaaaacaccctttatgaattttctcatggagatagcatttacatcacagagctgttgtgaaaataaaataagaatgtacagcacacctggaatataaaaaacatcccaataacttacttggagccccgcagccatccatccctcacatataaatacaatgaaccagatgaagatccgtgtccgtgtccatgacagcaatccattcagaagatcaaagataaatagtctaatacaccaatttctgacatttgcttagcactgcaggactcatgaagagctgccactcatattatctcatttaatccctacaacaaaaaccaaggctcaaggaggtgagtccttgcagaaagaacagtaacagactccacaggtttgcaaaacagccatatgacagagggctgaggaagcctatgatagtaggctgaggaagcncangttgnactggagctntgaaantgntctancagcacga

SEQ ID NO: 7947 - DNA, 562 bp, Homo sapiens
  misc_feature (416)..(416): "n" may be a, t, c, g, other or unknown
  misc_feature (485)..(485): "n" may be a, t, c, g, other or unknown
  misc_feature (496)..(496): "n" may be a, t, c, g, other or unknown
  misc_feature (526)..(526): "n" may be a, t, c, g, other or unknown
  misc_feature (535)..(535): "n" may be a, t, c, g, other or unknown
  misc_feature (537)..(537): "n" may be a, t, c, g, other or unknown
  misc_feature (553)..(554): "n" may be a, t, c, g, other or unknown
catgactcaggaatgtatggactttatttatacttctatataatttttataattaaaatgaccctgtagtcaataacaatttaattgtacattaaaataatgaagtgtagaattggcttgtaatacaaaggataaatgctgaaggtaatagatactttatcctgatgtgactaatacatattatatgcctgtatcaaaacatgttatatattgcataaatatatacacatttggccaggtgcagtggctcatgcctgtggtcccagaactctgggaggccgaggcaggcagatcatgaggtcagaagatcgagaccatcctggccaacatggtgaaactccatctctactaaaaatacaaaaattagcctggtgtgatggtggacgcctgtaatcccagctattcgggaggctgangcaggagaatcactttgaaccggggaggtgggggttgcagtgagccaagatcatgccactgtcttcaanctgggtgacanaaccgagaattcattttcaaaaaaaacccnaacaagttntngcccctgtgggcccannttcttggg

SEQ ID NO: 7948 - DNA, 535 bp, Homo sapiens
  misc_feature (409)..(409): "n" may be a, t, c, g, other or unknown
  misc_feature (468)..(468): "n" may be a, t, c, g, other or unknown
  misc_feature (470)..(470): "n" may be a, t, c, g, other or unknown
  misc_feature (493)..(493): "n" may be a, t, c, g, other or unknown
  misc_feature (495)..(495): "n" may be a, t, c, g, other or unknown
  misc_feature (499)..(499): "n" may be a, t, c, g, other or unknown
  misc_feature (530)..(530): "n" may be a, t, c, g, other or unknown
  misc_feature (535)..(535): "n" may be a, t, c, g, other or unknown
gagaccaagtttcataaagtttttacttggaaaaaaaagttttacaaaatatctttccaaagaaattttcccatagagtacaattaattcatgtagctttcttccttaaagattacagtatgacattcagaggggcgaggtttcttgaatagccaactagccgcaaaacctacaagagaagtagatttttttaaagtgcctttaaaatgtgaaagcaagtaatgtaattgttgaatctatttgaaattttaaaattttctttaaaatggtccatatggtatgcacaatatcacagctggcacaaaactgcctgtatttagtttgaaacacaaaaacaatgcatatgaacagtattctttgaaaagtaattcaaaatgctgccactgcatcataaaggcaaacttagatnagagtgttgacagtattcagagaattcacaaaacaagctgatattaaagtattcagacngntaccttggattttttcaaatccncnggtnaagggtaaaagaacttgtttgccaagtactnaggan

SEQ ID NO: 7949 - DNA, 562 bp, Homo sapiens
  misc_feature (415)..(415): "n" may be a, t, c, g, other or unknown
  misc_feature (467)..(467): "n" may be a, t, c, g, other or unknown
  misc_feature (478)..(478): "n" may be a, t, c, g, other or unknown
  misc_feature (486)..(486): "n" may be a, t, c, g, other or unknown
  misc_feature (496)..(496): "n" may be a, t, c, g, other or unknown
  misc_feature (527)..(527): "n" may be a, t, c, g, other or unknown
acatacaaagtttggatttttattgaaatcttgttaggtatcaaacaaattctgctttcttcagataaaaatattctctcagatgtctccagataactgctaagtctaaattggtccttcaatgtcttatttttattgtcctcgtgaaatgttcatatacagttaagatgttcccaaaaggatttttatcgtgtaaaggagcgtacatgacgacctctaccactgcctccactaacaaactttcctcttgagcctccactgccgctatttgcactagcccaggaaggtccaagtcccccacgacctctagaagcacggtcccgaggacttgggcggtaacctgtagaactaaggggtcgtaatggtggaagagggcctctgttaaaattgctctggcctccacgactttcattgnaatttcctcgaggagtattctgagcactccaactggagcctcttggtccttnccgacgactgnaggttccntttgaagcangtggtgtgaaaaaccctattctgactggggnaagcccccggcctctttattggctggaaaaccacc

SEQ ID NO: 7950 - DNA, 561 bp, Homo sapiens
  misc_feature (510)..(510): "n" may be a, t, c, g, other or unknown
  misc_feature (516)..(516): "n" may be a, t, c, g, other or unknown
  misc_feature (526)..(526): "n" may be a, t, c, g, other or unknown
  misc_feature (534)..(534): "n" may be a, t, c, g, other or unknown
  misc_feature (561)..(561): "n" may be a, t, c, g, other or unknown
acgaagtagcttttattcccttgggtgaataagatgtgcacatttaataataaatttgcttactaaaggtccttttaggggaaaacaaccttaaaaatacagttctagtccttgggcagtgaacaaagaaaaaatgtgcttgagaaacacagtccaggttaaaggaaaactctcagatcggttaatgcagttgaatttttgcttgagaatgtgagcaacgtatcagcaaatacattcattcttgtgctactcttcattatttagcatagagctaccttaggtgtttctacacatgctctaaaccaagagtaagtttaacatgtcagcagtgaggagtagacattttctactatagcacactgggagatgtttactggtactctaggtagaaatgactccattgtccactaagtttgggaaataaataatatggcaacattgctactggagatacataatatcagaagcctaactattaagagatttgattaacgagacttaagcttaatncagaantttcccaaanttatgggnacattgggacatcatttttcatagccn

SEQ ID NO: 7951 - DNA, 551 bp, Homo sapiens
  misc_feature (446)..(446): "n" may be a, t, c, g, other or unknown
  misc_feature (517)..(517): "n" may be a, t, c, g, other or unknown
  misc_feature (531)..(531): "n" may be a, t, c, g, other or unknown
  misc_feature (541)..(541): "n" may be a, t, c, g, other or unknown
aaagcattgcaatggtttattcaattttatgagtctaaaaggtaccaacacttactgatctgagttttaagtgtgtaaaacttttgagtagctatggtgtaacctgatttttaagatttcaaaataagcttgaaaaaaaatcacatccattttacatgcatccattcattacttctaattgattatactacagataacttaagccttagttctttctctttaaggttccccccagttttacgagaggcatggacataattagcttttttcctttagtaaaaatgtgttatgtgctgtagcatacaccagagcttctactttccaatcaggcaacacagactccgagctgcttttgtttttggtccctggaggtgtatatgacaagttgacagaaacaaaaaggtgaagaccctgctccacccagtatagagcctcttttctttggnggctcatggaaacctattaacatgccttcacataagtctctatatataaaactatcaggcattatgaaatnaattgcagtacagncactttgganaaagtgctat

SEQ ID NO: 7952 - DNA, 548 bp, Homo sapiens
  misc_feature (448)..(448): "n" may be a, t, c, g, other or unknown
  misc_feature (484)..(484): "n" may be a, t, c, g, other or unknown
  misc_feature (493)..(493): "n" may be a, t, c, g, other or unknown
  misc_feature (500)..(500): "n" may be a, t, c, g, other or unknown
  misc_feature (512)..(512): "n" may be a, t, c, g, other or unknown
  misc_feature (545)..(545): "n" may be a, t, c, g, other or unknown
gcgattataaccttgaagtttttatttcaatattctcgttctggacaatttcttaacagctttaaaattcagtattttatttattaacattaaatgcgctagaactcaaacagccagaccaaactgtaaatacggaactaggcacatctcaatgttctgtctctgtgtttacattactggataagaaaattaagcattcttcaacttttctatgggtcttaaaattcatggaatatgtgcattttcctaatgaccctttaaaactaataccacatatgaaatgttatcaaggcagaaaactacattaatttcgactttaataagatgtaactcatacaaccactaagctaaagaataatctgaagtctcaagtgggcatgatgatcttatttccatcaaacactaaaaactggctctgtgcagattgagctctccttacctttactgntcagttgagaggctcttaattctctaaaggtagacnaactatgcnaaactgncaattaaacagnggatcattaaattccttataaaccttaatgggnccc

SEQ ID NO: 7953 - DNA, 541 bp, Homo sapiens
  misc_feature (459)..(459): "n" may be a, t, c, g, other or unknown
  misc_feature (507)..(507): "n" may be a, t, c, g, other or unknown
atttatttatttatttatttgagaaggagagttactctgttgcccaggctggactccgtctcaaaaaataaaaaataaaataaaaataaaaaggcccgaagcgtctctgaaacagacattcagtcatcagaaagtcacctatgagttcttaagaaccacaacacatggcaaacatgatatcagaagtcatcttgtatacgccagttccttctcttcacagttttgtttctcatttgaacatccaaagacagttttgcgagctgtgtgcagtcaccacaggccagtgaggtcactgtcattgtgacaataggtagttttcaggggcacagaccttgtgctgggtgatggaatctaagacccatttctcagacagatacttgactgttgctttcttctttccgctgtagggcccgatgacgatgctggcctggcgggggacttggctgacccggccttcgnacaggtggactagtcacagaacttgggcactggggggcttgttggcangcgaaacaacattactggcttggccggcaaaaag

SEQ ID NO: 7954 - DNA, 545 bp, Homo sapiens
  misc_feature (526)..(526): "n" may be a, t, c, g, other or unknown
  misc_feature (530)..(530): "n" may be a, t, c, g, other or unknown
  misc_feature (536)..(536): "n" may be a, t, c, g, other or unknown
acaaatactttattttattgattatagtgaaatgcctcaaaaaattccattttagtctttgtaaagtcctacagtttagatacacaaacccatgcatgtctgcttaggcagaaggagcagggaattactatttgttgaatgcctattaggtgctgtattagttcttgtactgctataaagaatacctgaggctgggcaatttataaagaaaagaggtttaattggctcatagttccacaggctgtacaggaggcatggcaggggaggcctcaggaaacttacaatcatggcagaaggtgaacaggaagcaggcacattgaacattgctggagcaggaggaaaagtggggtggggaggtgccacacacttttagacaaccagatctcacgagaactctatcatgagaacagctctagggagacagtgataaaccattagaaaccacccccatgattcaatcaccttccaccaggtccaccttcaacattacagattacatttcaacatgagaattggatggggatcngatnccaccnttttccggg

SEQ ID NO: 7955 - DNA, 546 bp, Homo sapiens
  misc_feature (454)..(454): "n" may be a, t, c, g, other or unknown
  misc_feature (499)..(499): "n" may be a, t, c, g, other or unknown
  misc_feature (509)..(509): "n" may be a, t, c, g, other or unknown
  misc_feature (514)..(514): "n" may be a, t, c, g, other or unknown
  misc_feature (516)..(516): "n" may be a, t, c, g, other or unknown
  misc_feature (532)..(532): "n" may be a, t, c, g, other or unknown
aaattttaaaaatttattctttctcttttgttgctgttgatttgttcttgagatggctacaacaccagacagaacagtgccctcatatctgatggctgtgaagggctgcactcctttgaaacattaagatctgctttgggcttccctcttcggcctcaccctccccttaaaatcaagtcatttccacactttttagtaacatactaaatgacacatcatcccttgttagccctgtaaacattttttctccacacaccctccctctttttttctctcatgtctgtgggtgaataattcactaagaaaaaaaccttaaaaaacaaaaacttacacatttatatcctgcactccccacccacccgcccaccccagttttggctcttctctccaaggcagacaacaaactgatgtggattggaagtggactgagagaatgaacggggtcagggttcanatatccataaattctgaccctgcaggtccccgggcataccaatgngaccacgatngaaancngaacaagttccttggntacttcctccttgg

SEQ ID NO: 7956 - DNA, 588 bp, Homo sapiens
  misc_feature (506)..(506): "n" may be a, t, c, g, other or unknown
  misc_feature (517)..(517): "n" may be a, t, c, g, other or unknown
  misc_feature (533)..(533): "n" may be a, t, c, g, other or unknown
  misc_feature (564)..(564): "n" may be a, t, c, g, other or unknown
  misc_feature (581)..(581): "n" may be a, t, c, g, other or unknown
cattcattcagtaaatatttattgaatgcttattgtgtccaggccctgttctcagctcttagaatacatccatgaacaaaccagataaaaacttctgcccttgcgcagcttatactctagatcgtaagggatgggattagcaataaatttacataaattcaaccatacctactggaaaaagacacatgcatggaaattattaatgctataagaatctcttgatatgcagtttgtatttttgtacttaatataagcataatatattcatacctacatatcactccacagggatttaaactttaagactacaaagagaaatttattggtaatttaggagattttcaaggaccattctgagcatgctcaattttgtccttaggcacggtctttaaaacctaaccaccttacaagttgtgactccactgtccaaaatgaagactctgagacttttgggcaaaagaaccattttaagtatttgacatgagaaagatgacaggatgaatccncattctctcanataatctgggaaccanggaccaggaaggagtccttcatctgaatatnctgggccaggtaccagnggaattc

SEQ ID NO: 7957 - DNA, 578 bp, Homo sapiens
  misc_feature (537)..(537): "n" may be a, t, c, g, other or unknown
  misc_feature (577)..(577): "n" may be a, t, c, g, other or unknown
aatttaaaatgttttactctgcataatattttttaaaaaatttccagaactgtacaaatctaaattcacttaaatcaaacagacatatggtgaagaaaacaccaagtaaaattaatgactgtattggtatagcaataaaatcaatcaaaatattgatgtaaaaacgtttcttacagagtagttagaggatatgattcaaatgaaaagtacagaaggacccttgtattttaaaaaaaataaagatatttaacctatgctttaaaattaaatgaaccaattaaaaactattaggacaacaaattaaatacaattcatatcagaattaacagtaaataatatttttctgaatatgcagcaagagtagaatccaaattatccttatgtaaatcataagaaacttataattaattatagatgatctggaccactatgcacatttgaaaaaagggaaaaaaacactaaatataccttacaaataattctaccaggtcttaaatttttatgagacgctatgggggtaaatgtatcattaaatgnataggttaccccatgacggtttctaatttatcctttattnc

SEQ ID NO: 7958 - DNA, 589 bp, Homo sapiens
  misc_feature (467)..(467): "n" may be a, t, c, g, other or unknown
  misc_feature (547)..(547): "n" may be a, t, c, g, other or unknown
  misc_feature (551)..(551): "n" may be a, t, c, g, other or unknown
  misc_feature (569)..(569): "n" may be a, t, c, g, other or unknown
  misc_feature (589)..(589): "n" may be a, t, c, g, other or unknown
gtgactgaaacagatttctgtattaccaacagaagacaatttccaagctataagtgaaaaaagcagtcagaacggtggtatataatacagaaccatttgtaatcaaaatcaatgtatacatgctactcgtttacaggtgtatattcagtcgctgaacaaatctccgttaggggcgctgttcgtgtgctgggaacacacaggtcaatgaagagcagccagaaagccccaagctctggaggcttccactctcgtgaatcagcaccgcttgatcatctccttccacaggggcacagtcagcggcgatagctgaggctggcagcctttgctgggtgagtcacagaccagaagttccgtcgagtctgaagtttctggaaggcgttgaagtttctcctcttctctctcttaaattttttaattttcttttccttccctcggtcaaactcttcgtcccagtcatcaaccacggnctcagtccggcctgtctgctggcttcaatagcatcctgactgaccgccgacattttggcattccaggcagaacttttttnccgnagccttatcagatgagtntttgagcaattcctggaccn

SEQ ID NO: 7959 - DNA, 512 bp, Homo sapiens
  misc_feature (486)..(486): "n" may be a, t, c, g, other or unknown
  misc_feature (490)..(490): "n" may be a, t, c, g, other or unknown
  misc_feature (493)..(493): "n" may be a, t, c, g, other or unknown
  misc_feature (495)..(495): "n" may be a, t, c, g, other or unknown
  misc_feature (500)..(500): "n" may be a, t, c, g, other or unknown
  misc_feature (503)..(503): "n" may be a, t, c, g, other or unknown
  misc_feature (509)..(509): "n" may be a, t, c, g, other or unknown
ggcaatttgaactacatttatttttcaacaagtgggggcaatatgaagtgttttgaatgttgtgtgcaaaacgaatccatctcaccgtctcactgtcatgatttaacacagcaaggtagatacactggtttccagcattacaggcaacactagatgtactttttttaatgaataatgtaaacttgagttttaaggcagcgggtactaatgctgcacacagacttagctcggtgcccatttcagaaacgggtcagtcagcactcgaaacaagaaactgtgaggggagaaaaggggagccaccagtgtcatctgacaaaaacgatccgtcaaagtgttttccctttcacacgcacaaaatgaaatatttgaacatttagaaaaacaaagcacccatcccaccaacttcggcctgttctttaacaaatatttcaaaatactggtaaataatagtgactgctagcagaattccgtgccagatccaatggncccnagnangtcanccngcactngaa

SEQ ID NO: 7960 - DNA, 593 bp, Homo sapiens
  misc_feature (561)..(561): "n" may be a, t, c, g, other or unknown
  misc_feature (566)..(566): "n" may be a, t, c, g, other or unknown
  misc_feature (580)..(580): "n" may be a, t, c, g, other or unknown
  misc_feature (592)..(592): "n" may be a, t, c, g, other or unknown
gttttttttttttttttaagtaaaagaaaatttattatgaaactaaaggaataaaagaatgaccactccataggcagagaaacgtcactttaaggttttgacgtcaattgatttttgtccaaatcaataattactgcaatgattgaaaaatgattattactaagtttgttttcattgtctcaaggtctgctgaactctggatccaggctgtgtcaacagggtagtgtggtgcctcctgtacctgtcttggcctcctacagtcctttttacttattttgttttttagaatagagacagggtcttactatgttgctcagactggtttcaaactcctaggctcaagcaatcttccagcctcagcctcctaaagtgctgggattacaggcatgagccaccacacccggccaagttctttaccatcttcagaaggcttagcttgcacttttggaagaagaatagactcccaggaagactgtgagagagatttggggcccaaattgatattaacaaataccctgaacttgctggattcaccatggtctggctcttgagaaatgaaantgctnatgaaggctggggnccctttggggtnt

SEQ ID NO: 7961 - DNA, 576 bp, Homo sapiens
  misc_feature (485)..(485): "n" may be a, t, c, g, other or unknown
  misc_feature (490)..(490): "n" may be a, t, c, g, other or unknown
  misc_feature (492)..(492): "n" may be a, t, c, g, other or unknown
  misc_feature (524)..(524): "n" may be a, t, c, g, other or unknown
  misc_feature (537)..(537): "n" may be a, t, c, g, other or unknown
  misc_feature (542)..(542): "n" may be a, t, c, g, other or unknown
  misc_feature (556)..(556): "n" may be a, t, c, g, other or unknown
aacatcaaatttggtttatttcaagtttgtaacaaaatatattctaggcaacttttcagacattgttttatagcatcataaaccccataccactgctgtcattccaaaagctgccaggacactggaagttatcaagtggtccagccctggaatacaggtagaattcacatgataggtgataagaaagcaatgtctgtgggccactctgatccctctttttaccttggtaggtaaggtatgatcttaagactatatgtactgagtcctattagtcagtgaaaaagattaaagtgacaagttatgtgctttgttcctatagctttgaagttcatccacctcaccagcaattggaaggtctcaggtcttgcaggctctacccatgtgtaatcctggggcaggtgtgaatcttgatttttttaagagattactcaagggagagaacaacagaaacggaagccatgagtactgccccaattctagattangttananggtagaataaattaactaatggggaatggtantgggtagcagcanacccnagagacagaattgngggggttcctggacttaaca

SEQ ID NO: 7962 - DNA, 589 bp, Homo sapiens
  misc_feature (472)..(472): "n" may be a, t, c, g, other or unknown
  misc_feature (478)..(478): "n" may be a, t, c, g, other or unknown
  misc_feature (535)..(535): "n" may be a, t, c, g, other or unknown
  misc_feature (566)..(566): "n" may be a, t, c, g, other or unknown
  misc_feature (572)..(572): "n" may be a, t, c, g, other or unknown
  misc_feature (582)..(582): "n" may be a, t, c, g, other or unknown
  misc_feature (588)..(588): "n" may be a, t, c, g, other or unknown
attggaaaagtaattatttattatgacaaaaataaaactgttgaatgaaaacaaatgaatgttacactatattgcaccatgattggaaatgagccaaaacctgtctaaaagatgaacattccagagcaaacagcatcgttttacttgggttaagtaggcatgcaaacaactcattataacataattgcagaaataaaaattatgagtactggcaacctaaacttaacatataaaagaagcacttcataactaataaagtattaaaaactttaaaacatgtcatttaaacaatcccaccatcaggaaaacatgctttgaaccattttcaagaagtgatcatgtgaatgcattaatttacttgttttaaattttttgttgttgttgttaatgcttatatattggaccaatggaacacatttgtttggctgggggttcagacacacagtttgtggtgtgaaagacattttctttnctctgnacaataccggaggaccacagagcaatccaattctaaatctgaccttataataccatnttccagttgaccaaccttataatggaagatntcttanagctttccanaaagcng

SEQ ID NO: 7963 - DNA, 578 bp, Homo sapiens
  misc_feature (515)..(515): "n" may be a, t, c, g, other or unknown
  misc_feature (533)..(533): "n" may be a, t, c, g, other or unknown
  misc_feature (576)..(576): "n" may be a, t, c, g, other or unknown
gtctttttttttgcgtttaaaacatttgggctattccctgacgatctatacatgtaaatttgattgctaaacattgtcactttgaatgtcaaactatttttaatctattgattttgattaaaaatcataatacaaacagagctaaaatcacgctaacaaaataaactaaatatgaaaagttgcattgaaagggcatcacattattcttaataggatcgtgtagaaacattccaatggcagtgttctcaaaataaaacaaaattacattagaagacctccagcctggccacttttgggaccttacctgtaactctggctggtgggtgtctttactcttgtactacatggctcacttacatcagacatcatatttgtataccctgagaaatctgacactgaagtccttactctatggtccacttctccattagagttagtgataaaggtcattggcaccctgctgcccgacttaaactgagaccaaacgcttggtgccaaggtctcaatctggaacngtggtctaagctctatgnctttctgaggactatctggctagctactccggaatggaactgnaa

SEQ ID NO: 7964 - DNA, 564 bp, Homo sapiens
  misc_feature (209)..(209): "n" may be a, t, c, g, other or unknown
  misc_feature (507)..(507): "n" may be a, t, c, g, other or unknown
  misc_feature (536)..(536): "n" may be a, t, c, g, other or unknown
  misc_feature (545)..(545): "n" may be a, t, c, g, other or unknown
gaggggagatgacgcctttttattaaggttaacaccaaggaaagcattgagaaggaatacacaaaggagggggagggcacacaaagtcaccacttgaggaggtggaagggcggcacatcggtaaaagaacctcaggacagccacatgctccatgccctggttgggggaagagggagagaaaagcgccattgatagcttggagctcgtanaagggtctgaagcccctgaacctaacaccagagccacaagccctgcccctgagggctcacacactactacacaagtagacacacataacacacacaagacattatgaaggcaacaccgagaggcagtgggcaaggacatattgacagaaaaaggaactgaagttaagcaggtgtagccaggagagacaagtttttggctgcggccccaagagtccctcaaatgtcccctaaatctgggcttctgttgagcaccccgatctttgcctgtgaaccgggctctttggtctttaagccccanggagtggaaaaccaatcccgatgaagtcntggacaagnaggatccctttttattcaa

SEQ ID NO: 7965 - DNA, 574 bp, Homo sapiens
  misc_feature (488)..(488): "n" may be a, t, c, g, other or unknown
  misc_feature (542)..(542): "n" may be a, t, c, g, other or unknown
  misc_feature (551)..(551): "n" may be a, t, c, g, other or unknown
acaaaagattattttattaattcaatttttgcataaaagactgttaaaagaacttgctaacttgaaaacaattttgagtatttatgatcgttccaacctgaaaacacctgaaccttatagaacagattgtgtaaagcagccagggccacaggagtgaaagaagatggagacccgccgtctggtcatgatatgagaggcctggacagtgacctcacgaacaaaaagaaatgatcctcttcagtccaaagtgtgtttgtgagactaatgactccatgccctcacatggccactcctctcacagcagacagcttcactccgctccagccccggtactgcggtctgtggtaatttacatgggaatgggatgagatctagtagttttagatccaacgcaattctgggaagggttggtaataaaccaaaactcaatctatgcagtatttaaaaaataagtgagaagttgtgacaacttcgattcttttcaggangtgctggcttaagatagaagaaagggatcagctcttatcttagaagcccagacnctttaactnagggaagtgcaatcaatggctaa

SEQ ID NO: 7966 - DNA, 570 bp, Homo sapiens
  misc_feature (513)..(513): "n" may be a, t, c, g, other or unknown
  misc_feature (524)..(524): "n" may be a, t, c, g, other or unknown
  misc_feature (552)..(552): "n" may be a, t, c, g, other or unknown
  misc_feature (563)..(563): "n" may be a, t, c, g, other or unknown
  misc_feature (570)..(570): "n" may be a, t, c, g, other or unknown
actttcaaagagcagaggaacattttatatagtgaacacatacacactgtggcaatgtaaaactacttaaggaaggaaaaatatccccctccccagccaggtactgagacctggggctaaaattttttgtcagtcagcccccatccccatcccttatcttcgagtgaccttaccaggaaacctggctttggtggaaaggagagctgtggggcttggggagcctgatgccttttcttttgggaggaaaggccacctgcacaatccacaggacaggagtggccagcagctatcctgagctgaggctccagaagagttcagatccaagagagcaagggatgaatggaaggaaagtcccacccaccttcatgtgtaaagtgattggcatttactcaaatctaaatctactcctctcctccctgcaatataccattgagcatgtgccaaataatggtttgaacaaaagccaacacagatgtcaacctggggcactttaacctaaggaacccctacagncgagcccttanccctaatgacttaggcataggttaagcnggaaatttaanttggctn

SEQ ID NO: 7967 - DNA, 566 bp, Homo sapiens
  misc_feature (49)..(49): "n" may be a, t, c, g, other or unknown
  misc_feature (185)..(185): "n" may be a, t, c, g, other or unknown
  misc_feature (216)..(216): "n" may be a, t, c, g, other or unknown
  misc_feature (218)..(218): "n" may be a, t, c, g, other or unknown
  misc_feature (385)..(385): "n" may be a, t, c, g, other or unknown
  misc_feature (429)..(429): "n" may be a, t, c, g, other or unknown
  misc_feature (437)..(437): "n" may be a, t, c, g, other or unknown
  misc_feature (449)..(449): "n" may be a, t, c, g, other or unknown
  misc_feature (494)..(494): "n" may be a, t, c, g, other or unknown
  misc_feature (513)..(513): "n" may be a, t, c, g, other or unknown
  misc_feature (525)..(525): "n" may be a, t, c, g, other or unknown
  misc_feature (535)..(535): "n" may be a, t, c, g, other or unknown
  misc_feature (551)..(551): "n" may be a, t, c, g, other or unknown
  misc_feature (553)..(553): "n" may be a, t, c, g, other or unknown
ggggctgttcacgctgtttatttgcttctctgggaaaaccaagaacatngggggcctcgtcacacaccagaagcagagggggttatagcaagggcacttcagcgaaggctcgcggctcgagggactcaggcagactccagggaggaggagggggttccacggctgacgcccaggtcacccccganagggcctctcctcccagccacccaggggcanancggaggcagggacccaggctcccatccgaggtggcccctgtacctgccctgccgaggctgcaggtggtgactggaccaggaggtggcctgagcactgggcaccaggctggaggtccctagggcagggaccaagttggggcctggttgtccaaagccaacgtgtgaanacggtgtcttgtgaaaaatgtgcaccaatgtgcctctggggacnagtgtaancttgcccccagnagggaagccctttgccacttccaatgaaaagggggcttggggcangctcacattggtctgggtngcaaatgaaggnctcttgttcnacccaaaaggtttctntnccaagcttggtcc

SEQ ID NO: 7968 - DNA, 535 bp, Homo sapiens
  misc_feature (32)..(32): "n" may be a, t, c, g, other or unknown
  misc_feature (335)..(335): "n" may be a, t, c, g, other or unknown
  misc_feature (340)..(340): "n" may be a, t, c, g, other or unknown
  misc_feature (459)..(459): "n" may be a, t, c, g, other or unknown
  misc_feature (471)..(471): "n" may be a, t, c, g, other or unknown
  misc_feature (479)..(479): "n" may be a, t, c, g, other or unknown
  misc_feature (490)..(491): "n" may be a, t, c, g, other or unknown
  misc_feature (503)..(503): "n" may be a, t, c, g, other or unknown
  misc_feature (525)..(525): "n" may be a, t, c, g, other or unknown
cctttttgcgcgcgtatgtatgtgtgtgcgcncaaagtatctctatctagggaatgaaaaatgggcgctggcggccggaggggagccctagggaggcagcgggggaggctgcgggtgcgcagggaggcaggccggccgctcccggctgcaggaggagaagtttttttttttttttggttttgttttgtggttatttttttttacaactttaaatacggaatataaataaattttacatttaaaaaataaaaggaaagcccccaaaaatataatcaccgactttacaaactgaaggaagcaggttttggaaggcgggaagggggaaagtgcattangtggnaagggaggtgggagctcaaatcccaccccagggggtcttggggaacttttcccttctctcccccattcccagcccacgagctggtttcctaggaggagccaccagaggtggagcctcanaaagggatcaangaatgggnaaagtgttcannccatggaagggnttccgggcaaaaagggcttganccttccttgg

SEQ ID NO: 7969 - DNA, 574 bp, Homo sapiens
  misc_feature (495)..(495): "n" may be a, t, c, g, other or unknown
  misc_feature (535)..(535): "n" may be a, t, c, g, other or unknown
  misc_feature (564)..(564): "n" may be a, t, c, g, other or unknown
  misc_feature (570)..(570): "n" may be a, t, c, g, other or unknown
aaaggtgggttttggggatgtttaccctattgttttttatttggatgccctaaggcatataaagcgcatagtgaattacctactggaatgtaaatggttctaaaattaaaactgttaaaatagaaagagggaaaaggaaggcccaagaactcttaaagagaggctgagaacaagaacaaaaaaacccagaagtgtaggtaatacgtaacagcgcagacagaaccgttgtaggccatgtataataaataatgcatgccccaaatttcagttaatcatataatttcaacttgagttctaatactggaaccagccaaccacttgggcttcaacactgtactagatgtcagtagaatcgcttgatggaattacagccttgttacagttgagatcaagagagggtgctttttttttttccttcttttattaaagctatcattccaggctttgatcaaagatccaagaatatttggtctaccaggctggaatgaatgtggnttggaagtcagagtacatttaaaagctgcaccaaaatttngtagcccacaatctcaaaatttggatcanccaaangaga

SEQ ID NO: 7970 - DNA, 550 bp, Homo sapiens
  misc_feature (376)..(376): "n" may be a, t, c, g, other or unknown
  misc_feature (386)..(386): "n" may be a, t, c, g, other or unknown
  misc_feature (410)..(410): "n" may be a, t, c, g, other or unknown
  misc_feature (430)..(430): "n" may be a, t, c, g, other or unknown
  misc_feature (457)..(457): "n" may be a, t, c, g, other or unknown
  misc_feature (486)..(486): "n" may be a, t, c, g, other or unknown
  misc_feature (499)..(499): "n" may be a, t, c, g, other or unknown
  misc_feature (534)..(534): "n" may be a, t, c, g, other or unknown
  misc_feature (544)..(544): "n" may be a, t, c, g, other or unknown
  misc_feature (549)..(550): "n" may be a, t, c, g, other or unknown
gctagttgagtctctttatttatttacttattttgagatggagtctcactctgtcacccaggctggagtgcagtgggacgatctgagctcgctgcaacttctgcccctcctccctccaggttcaagcaattctcctgcctcagcctcccaagtagctaggattacaggcacacgccaccttgcccggctaatttttgtatttttagtacagacagggttttgccatgttggccaggctggtctcaaattcctgacctcaggtgatccacctgccttggcctcccaaagtgctgggattacaggcatgaaccaccacacctggtcttgttgaggattcttgcatctatgttcatcagggatactggcctatagattntttttcttgngtccatatctagttttggaatcanggtaaatgctgccctcacangatgaagtttgagaactgggtatgaanttcttctttaactgtcagtatgaattcancagtgaagccatnagggcctggacttttctttgaagggagactctttntaactgattnaaatnn

SEQ ID NO: 7971 - DNA, 572 bp, Homo sapiens
  misc_feature (462)..(462): "n" may be a, t, c, g, other or unknown
  misc_feature (508)..(508): "n" may be a, t, c, g, other or unknown
  misc_feature (514)..(514): "n" may be a, t, c, g, other or unknown
  misc_feature (516)..(516): "n" may be a, t, c, g, other or unknown
  misc_feature (529)..(529): "n" may be a, t, c, g, other or unknown
  misc_feature (557)..(557): "n" may be a, t, c, g, other or unknown
  misc_feature (565)..(565): "n" may be a, t, c, g, other or unknown
  misc_feature (572)..(572): "n" may be a, t, c, g, other or unknown
gctgctcatagtttattttccaccaaccagtgatcagctgtgagtgatgtggctgtgacctatagctggtgcttggcgattacaaacacccaccagctggtggagcaggcgcctccctgccaggatgatgcttcaggaactttctgggcacaaagtgcttcttggtggacaatttttaaaaacacacagagccacgtgggtcacctattgtcaccaagagaaaaaagaacctcaaaatcagtgacgcgacaggaagaattcggacctgttctttctgaggaagttcttatttttcctgtaactgtatgacggcatcacaccttcctcctgaacgtgggggccatagtcactgactccgccagcctcccaccagtgtgctggtgtaggaggagctgcagacgtcctcaagcagaagtcacttctgcgtcctcagtggtaactcctgtccctgctcaagtcctncgcctccccgcactgcttttcctttgaaaagcaggatgcttgccgncatggncnaattgaagctgtncacaccaggcacaacggggatcaacaancttttgcncccgtgn

SEQ ID NO: 7972 - DNA, 563 bp, Homo sapiens
  misc_feature (528)..(528): "n" may be a, t, c, g, other or unknown
  misc_feature (532)..(532): "n" may be a, t, c, g, other or unknown
  misc_feature (557)..(557): "n" may be a, t, c, g, other or unknown
  misc_feature (563)..(563): "n" may be a, t, c, g, other or unknown
gtaagtagagacacatttcactgtgttggccaggctggtgtcgaactcctgggctcgagccattgcccacctcaaagtgctgggattacaagtgtgagccaccacacccaaccaggttatttgaacatttttaagtactgtattttctctattgtaatattgactgtcatctctgtgcaggttttttagtggttgctctaggttgaaacgctttgaattcttaggtatctaagagtgagcattttctttttttgactgctatactctcaccagttgccagcttctcatataaatattgtaaatgctctcgtttaggtaactcagcttctggagttgagggaacttcaaaatcagaagagctctgggaatctgcatttgtgctaagatttagcaaacttttttcctcgggtatatgtgtctcactgcttagagtagttggtctccagtactaggaactattggcacatctttatctctgctttcaaatcagagtaagtatcctttgggcaaattacatttggtcatganagangcaggaatatccctttgatggtggncggaan

SEQ ID NO: 7973 - DNA, 568 bp, Homo sapiens
  misc_feature (557)..(557): "n" may be a, t, c, g, other or unknown
catggtggacagaatgcgtttatttctccagtttggcctattttaactcctacatacatgaacagccaatacaattaaagtagaaacacaatttttaatattccttatcacagccatttgaagctcctttctgcccaaaaggtctagactgccagcagaggccctgagacaaaggcactgctataagatgcagactgtatcatggcacagtgggaaagtcaccatgtgcaaaatccacggcttgcctgcctctatgcctcagacaggaacaaatcatgggatggatctgggatctatacaacagctccatgaggcaggacaatcatatgaggttttatgctgaattacacccattttcccaatgaggacacataaaacctcccaaacatgtgagaagtttcagacccaaatataataagtgatgtataggcatgtgacctgcgaagtgagtttgtcaaccttgtttcacttgagtgtgaaaaatgctttataattttgataatcttacctttagcagctttttaagaaataacttgctccaagggcccggccccatnggcttatgcct

SEQ ID NO: 7974 - DNA, 563 bp, Homo sapiens
  misc_feature (465)..(465): "n" may be a, t, c, g, other or unknown
  misc_feature (491)..(491): "n" may be a, t, c, g, other or unknown
  misc_feature (555)..(555): "n" may be a, t, c, g, other or unknown
  misc_feature (563)..(563): "n" may be a, t, c, g, other or unknown
caccaaggaagaaatacctttattaggagtctaggcatgtcagaaaaacccagttcagtcacagaaaaggaggcaaatattggtacagagcaagaatccaagtgtgaaaataaaacctccatctaaatatcctaacagaaatgctgctgaatttagcccaggtgaaacttctgaaagctcctggtgaaatgagatttttgcataaagagagagctctccagcactgctgcatctgagcttcttataaagtgacgggtcttggccagcagtagaggaagagataaaggggatgtctcatcacccaagcaaggtcgtctgtgttcaagtgagagaagaaccttagggttttggacagagtaaactggggcagcagagggaaaatggctgaggaaacacaacgtctaggccgtgtgtggcataatgtggaggggtctgtgcagtctggtgtgagtgcatctccaggangtcttgggaaacactggcattccttnctgaggccatttgggtctggtctgacttcttcagaacagaactggccaatggtccacgccaatnctggatan

SEQ ID NO: 7975 - DNA, 586 bp, Homo sapiens
  misc_feature (521)..(521): "n" may be a, t, c, g, other or unknown
  misc_feature (529)..(529): "n" may be a, t, c, g, other or unknown
  misc_feature (537)..(537): "n" may be a, t, c, g, other or unknown
aaaagtatttattatagtaaaggttactgttgtaaaacattagtgactttggtccatatcttatttgccatttgtctttaaaacattttacattatttgcatcataaattgtaatttttatgactatacataattggtttttttcctgacccttggaatgttagtttcatgtaactttttaaaaaattaaaacattgcagactaaatgtactgataagtacatactgaacacatttaattaccacagtaattaaaaagtcctgatctttacttcttaagatgaaaattcattaacttgcaatctctgggatttctctattatccacaatgagagtatgaataatcccttctttccgcttcccactactgacagcctttatgtaacagtcatggttcccgatactgaagtgagtttcaagtcccatcatctacaaactcacccgctgctccaattttttaccattgaccatacgtccatagcatctttttccaaaacaattctaaggtctcaccatcctggnggtaatancccaagantggggggtttgaactggcctcatatacttcttgagacttttccataatt

SEQ ID NO: 7976 - DNA, 501 bp, Homo sapiens
  misc_feature (21)..(21): "n" may be a, t, c, g, other or unknown
  misc_feature (63)..(63): "n" may be a, t, c, g, other or unknown
  misc_feature (322)..(322): "n" may be a, t, c, g, other or unknown
  misc_feature (357)..(357): "n" may be a, t, c, g, other or unknown
  misc_feature (403)..(403): "n" may be a, t, c, g, other or unknown
  misc_feature (432)..(432): "n" may be a, t, c, g, other or unknown
  misc_feature (443)..(443): "n" may be a, t, c, g, other or unknown
  misc_feature (448)..(448): "n" may be a, t, c, g, other or unknown
  misc_feature (460)..(460): "n" may be a, t, c, g, other or unknown
  misc_feature (476)..(476): "n" may be a, t, c, g, other or unknown
  misc_feature (479)..(479): "n" may be a, t, c, g, other or unknown
ctagcaattaccaagacattnattagttgtcaaaaagctttacaatcagtttcatgatcaganaatagagcaaaatttcaatattggtttctttataaaattgatgaatttctgaaaagataaaggatcatttgatttttaaaaatgtcagcttcatcacatgatgttccagagatctgaccccaaaagcttctcaagttttactatccatagtgtccttatttgtaactgagacccatccgttattttccatctgaagcttcttcagcagtttataacaaagtgaaagaagttggactaagagagccatcatggatcttgncttcgtaatacacttgtcaacctttagaaatactntattctgcaaagaagtcttagttactgtctggagctggtggcatanaggaattagcttgttatttccaggagaancataagcttgncatcngctttcaactgnttttgaaaaagcttgnacnctggaagtaagctttaaaccct

SEQ ID NO: 7977 - DNA, 584 bp, Homo sapiens
  misc_feature (471)..(471): "n" may be a, t, c, g, other or unknown
  misc_feature (518)..(518): "n" may be a, t, c, g, other or unknown
  misc_feature (564)..(564): "n" may be a, t, c, g, other or unknown
  misc_feature (574)..(576): "n" may be a, t, c, g, other or unknown
cagttaggaagcatctttatttggcaaatgaggacactgaggctcagggaaaaaaagtgactcattccagagcatacatttaaaatgtacagctacatcatctatttgcaacaactgcctaacaactgtctcttagaaataaaagttatgtgatttcttgctaaaagcagataaataaatgagcagacaactaagatcacttcatcggatgccagagctgtctgtccaagaatgcaaccaagcaaaaataattttgtcttcaaaataacagaaaaacatattttttgtttgtttaaagcatagaagtactattattaagcacaaaaataaaaaaacgttttaggtagtttgaactacaatttaaaactgaattatataacaggtgccatctagtgttataaattaaaactgcacagaattataactaatgtgtagttattaaaagctaaattatatccaaagcaattcagngatgtcattgctcacaattcaaacttttcctgaatctggatgcctgnctggttaaagacattactattcattttctcaagtaaaatgggaaantttgacctcnnnggtactat

SEQ ID NO: 7978 - DNA, 589 bp, Homo sapiens
  misc_feature (500)..(500): "n" may be a, t, c, g, other or unknown
  misc_feature (550)..(550): "n" may be a, t, c, g, other or unknown
  misc_feature (556)..(556): "n" may be a, t, c, g, other or unknown
  misc_feature (563)..(563): "n" may be a, t, c, g, other or unknown
  misc_feature (585)..(585): "n" may be a, t, c, g, other or unknown
  misc_feature (589)..(589): "n" may be a, t, c, g, other or unknown
gagaaatgtagttttattaatagaagggcatgtcttaccatacacactgtccccagataaataaaatcccaacatctttgaaagcacacaaacacacagttttacagggtacaatacaaagtgaactttgatgatgttcttacttgcatttactaaaaatctgagaaagactgtaatcagtctctaaataattatcttgcgtaaagagaaaagtagagcacaatatatatatatcacaaaccaaatcacactctctgtaacattacaacatggaatttacttaatcaaaaataaaagcaaactggctgaagaaggctgtatcatttttttctcaatattacgctaatttctatttttggcatgaattattaaccttttccattagtaggcaaatgtgctctgcaaattctcggatggcaccacggccaccattacatttgcaaatgtatccaacagccttctgggcagtagaacaggcatcagcaggagccgccacttangcccacttcttttagcactcttcatcagacacttcattttccagaaatgncacttnttttcangacagggcctttctttcttcantcan

SEQ ID NO: 7979 - DNA, 561 bp, Homo sapiens
  misc_feature (454)..(454): "n" may be a, t, c, g, other or unknown
  misc_feature (498)..(498): "n" may be a, t, c, g, other or unknown
  misc_feature (514)..(514): "n" may be a, t, c, g, other or unknown
  misc_feature (558)..(558): "n" may be a, t, c, g, other or unknown
  misc_feature (560)..(560): "n" may be a, t, c, g, other or unknown
gtttttttgtttttttttgctttcttgtttttttaatgattgtaaaaaattatgcatgatcagtacagaaaatagaaatcgaggaaaatacagagtaaaagcttctataataacactgagacaactatactttcaccatcactgtatctgtagcaggtatcgtacagcaggtgctttaaaaacagttgttgaatgaatgattactgttaatatcttgcaaacatcctttttggtcttcagaccaaaaacgaatacataaataaatcctttctctgggttgtttcacctctaaaccagaagagctcagtaaagccaccagagactaaagctgttaggacaatatcaaatctcttacattgtaatatgtttcacaatgacagttgatatctgatgcctatggaatataaggaaacaataacatttaatccatcattctgataggcacaatatcaanggtggctcaattttgagcaatatcaagaaggctgcaaaacagtncacagtactttaactnaagccagaatggcttcggcacctgggaaattggcttgcctcctnanc

SEQ ID NO: 7980 - DNA, 555 bp, Homo sapiens
  misc_feature (436)..(436): "n" may be a, t, c, g, other or unknown
  misc_feature (485)..(485): "n" may be a, t, c, g, other or unknown
  misc_feature (507)..(507): "n" may be a, t, c, g, other or unknown
  misc_feature (522)..(522): "n" may be a, t, c, g, other or unknown
  misc_feature (527)..(527): "n" may be a, t, c, g, other or unknown
  misc_feature (529)..(529): "n" may be a, t, c, g, other or unknown
  misc_feature (551)..(551): "n" may be a, t, c, g, other or unknown
  misc_feature (553)..(553): "n" may be a, t, c, g, other or unknown
cacttgaggcactaatttattagccttatcacaatatcaaactgtgagctattctaagacacacatttatcagtttggatctagctagggttgtgtagtctaaaaagctctccaggcgatctgttttgcagtcctccccgtaaagggaaaaaccatgatagcgatactttctaattttaaggcgtataccaatcacatggggatttgttaagatgcaaattctgagtcatagatctggggctaagccagggattctgtgcttctaacatgcttcctgggtgataccgaggctgcttgtctgcagaccacacattgcatagtaaggccccagaacatcaaatattcatctgaacaaagtaatataaatatcctcaggtatttcctcctcttacacactgtattcccagcttcaaggcctgtagttcttttttctcanagggcctggaattggaaaagagatgaggaattaagaagatcacagcggnctgagctgcaaatcctgcctangagcacacccgtccnttgangntcaattctcttcaacaatttgncnct

SEQ ID NO: 7981 - DNA, 546 bp, Homo sapiens
  misc_feature (93)..(93): "n" may be a, t, c, g, other or unknown
  misc_feature (470)..(470): "n" may be a, t, c, g, other or unknown
  misc_feature (475)..(475): "n" may be a, t, c, g, other or unknown
  misc_feature (489)..(489): "n" may be a, t, c, g, other or unknown
  misc_feature (512)..(513): "n" may be a, t, c, g, other or unknown
  misc_feature (527)..(527): "n" may be a, t, c, g, other or unknown
atgttaaagctgatatattcacaccataaattataacaacacaggaaagtcctttatcaaagccataaaagtgctggaagccattaacaaggnaatttctacttctaaaaattcagggtaaagaaatcagaaagcaagtatccacatacaaatgtataatagtgaaacatgatagaaatgactcaagttgtggtacctcaaatcattaggctactatagaaataaaaccagtatcttgtattaaaaattccaattcattaccctaagccattccatgccttctacttggtaccatcgcatcactcctccagtgaagtgctttggttgttgaaaaggtactggctgaccattacacttccggactgggtcaaaaaagaatttagtattctgcctaaccgtttcagacaatctatctttaattatactattcgaatctttatttttctgaagatcttccacacagagattantagangaggagttttcatnctcatctccttttaattttttanncccagccaaaattnctaagaggttggggaaaca

SEQ ID NO: 7982 - DNA, 550 bp, Homo sapiens
  misc_feature (310)..(310): "n" may be a, t, c, g, other or unknown
  misc_feature (436)..(436): "n" may be a, t, c, g, other or unknown
  misc_feature (459)..(459): "n" may be a, t, c, g, other or unknown
  misc_feature (490)..(490): "n" may be a, t, c, g, other or unknown
  misc_feature (513)..(513): "n" may be a, t, c, g, other or unknown
  misc_feature (544)..(544): "n" may be a, t, c, g, other or unknown
  misc_feature (549)..(549): "n" may be a, t, c, g, other or unknown
catagttcatagtttattacaaatgcatattatccaactcagtagaaatccatgtaccccagaatgtacagaaggtatgcaatgttccagagtgtcattgtcagctctggttttatatatatattaaatatatacatattttgagacagggtctcgctgtcacccaggctggagtgcagtggcacaatctcagctcactgcaacctctgcctcccagcctcaagagatcctcccacctcatccttctgagtagctgggactacatgcgcatgccaccacacccagctattatttttatttctttttgtanagacaagggctcactatgtttctcaggctggtcttgaactcctggtctcaagtgatccttctgccttggcctcccaaagtgctggaattataggcatgagccactgagcctggcctgattatctgntttttgaatagtgaccctaatgngcttttccaagtccagtacttttgataaaantttttagcaagggcttcatctanggccatcttctgggcataatataatttcttnccaang

SEQ ID NO: 7983 - DNA, 556 bp, Homo sapiens
  misc_feature (473)..(473): "n" may be a, t, c, g, other or unknown
  misc_feature (504)..(504): "n" may be a, t, c, g, other or unknown
  misc_feature (517)..(517): "n" may be a, t, c, g, other or unknown
  misc_feature (520)..(520): "n" may be a, t, c, g, other or unknown
  misc_feature (535)..(535): "n" may be a, t, c, g, other or unknown
  misc_feature (547)..(547): "n" may be a, t, c, g, other or unknown
  misc_feature (555)..(555): "n" may be a, t, c, g, other or unknown
aaatcaaacccaaaccactactgtcctaagcattatggttcacagaatcaagtgaaatgtatggcattttttccttctctccatacaagggtactctgatcaagagctagtctatcaactattgatcaagcatttataatgacaagagtgtaagagtaactaactgcatggttacaaagtatgttatataaggtccaggggattttccccaacagtgtagaactgattggaggataatagtaaggttcttgaattggggaaattccattcaaatgataatcctcaccagtccatggagcttttaagcccctaagcagccataaacaaaagcccacttgacaaagaaatggtatgcttggttaccataggacatctcactcctctggcctcattgcttagatccttccttgaactcagaggttctaaagttacccatatcttctaataaagaagaaaattaaagtcaaaactgngtgaaaatcaggccaaaaagtctaaaaatcnccaaaatgggggnatnccccttttaaccacnggatagggatantttcttgnc

SEQ ID NO: 7984 - DNA, 559 bp, Homo sapiens
  misc_feature (482)..(482): "n" may be a, t, c, g, other or unknown
  misc_feature (545)..(545): "n" may be a, t, c, g, other or unknown
  misc_feature (548)..(548): "n" may be a, t, c, g, other or unknown
gagaagaataaggtactttattcttctgtggcagggaacccaacacttgggtttacgttgcagggcaacacctgtgatgaacaaaacacatggtagcgatagcccattcatgaaaaagcccattcatgaaaaactaacagctattcttttcacagggatagtcaaaaaatgagttgaagggaaaaaagtatctccagttggagccaaaacagccatctctagtttgaaaatacactcaacaaaatgttggtgattagagataacaggaaccgggcaagggaggaatttttacatacgttcaagcttttcactttgcagccacactctgattttatcaaaattcctatccatccaaccgatgttttcttcaatggtttcaattgtctgttggacacaacggagctgagaaccattttctttcaaagagctgaagaatccttttacctcttcaagccgggtcttgtggagaattgatttggtgnacccattaccatggtggctatgggaagatgaacccaggttcaaacttttggccaagtttggtnccngtttttcctca

SEQ ID NO: 7985 - DNA, 551 bp, Homo sapiens
  misc_feature (449)..(449): "n" may be a, t, c, g, other or unknown
  misc_feature (504)..(504): "n" may be a, t, c, g, other or unknown
  misc_feature (527)..(527): "n" may be a, t, c, g, other or unknown
  misc_feature (542)..(542): "n" may be a, t, c, g, other or unknown
gtatttgcaggacaagtacaactgaaccaacaaatttatttagttagtgctgataaagacagcagccttgagagacaagcagtaattacctggtctacttaatgatgccctttgttatattttacaggcaaaaagaatgattcctcagcagtcattgtgaaattttgtgggccacaagtattgtgcacacatgatccttgatttagagtcaacctgatgtccattatagctgtggaaaggcagcaggcagttgtgtcgctcttcacaataaggaacacatcttgctttcagcatgtgagaggaacaaaagcattgatgtaaatgtgcctcaaagtgagaactgaaaacattaacataaaataaaaaagtcaaataagactaagttcttacaactacctataaaaattgaattattacaactaaagcagcaaatcaaaacatctgctganggtttctggtagaacaaccaccaaattagttggggccatgttcaataagtactancattgccaaacttaatccaaatnggaaatggaaaggcnttatggaaa

SEQ ID NO: 7986 - DNA, 556 bp, Homo sapiens
  misc_feature (429)..(429): "n" may be a, t, c, g, other or unknown
  misc_feature (449)..(449): "n" may be a, t, c, g, other or unknown
  misc_feature (488)..(488): "n" may be a, t, c, g, other or unknown
  misc_feature (503)..(503): "n" may be a, t, c, g, other or unknown
  misc_feature (505)..(505): "n" may be a, t, c, g, other or unknown
  misc_feature (533)..(533): "n" may be a, t, c, g, other or unknown
  misc_feature (552)..(552): "n" may be a, t, c, g, other or unknown
  misc_feature (555)..(555): "n" may be a, t, c, g, other or unknown
aatgtgcaaattttaataaaagattagaatatatacaaaacagggcaatgcagtaccaacaaaattattataaatttttcagaaagaaataaaaaatgtatacattaattttaaaaacaaaacaaattgaatactcaatgagtaaaatatgaacacagagaactacagaaaatcagaaaactggaaataagaacagaaatatttaaaatattggaaaaacagaaattatggaggtaaaaaatataaaaaataacagaaatcttttaaaaagtgatgtaaaaatgaagaagctgaacaaacaaactagaatacaaagatatttatatcaaacacatatgtaagcacaattttaaaagtcacagaaaagagaatctcgggagctgcaagataaaagtgatgtgttggctgggcgcggtagctcaagcttgnaatcccggcactttgggaanctgaagtgggtgaatccctgaaggcaaggagatcgaganttggctgaccacatngngaaaacctggctttcttaaaatccaacnttacttggggggggggctnatnc

SEQ ID NO: 7987 - DNA, 555 bp, Homo sapiens; identical to SEQ ID NO: 7435
  misc_feature (1)..(555): "n" may be a, t, c, g, other or unknown

SEQ ID NO: 7988 - DNA, 549 bp, Homo sapiens
  misc_feature (473)..(473): "n" may be a, t, c, g, other or unknown
  misc_feature (525)..(526): "n" may be a, t, c, g, other or unknown
  misc_feature (534)..(534): "n" may be a, t, c, g, other or unknown
  misc_feature (548)..(548): "n" may be a, t, c, g, other or unknown
agagttgtgagtgaattgcatttttatttacgtttaagagtctctctccctccttgtgttctagtctgtgaatggctcacacttggacttagtgtaggctcctatgggaggagcgggcggtagtgagaatcttcatcaaatggagtaacatgacccaaatctctagaggtttcataattttgctcttgcttctaaaaacataatcatctcttatggggtgttatgtgctttgtatcctgaaattttccacttgctgcttcttggtgtgaggcgagaaatgccaccacgtggcactgcaggaggagactggtggaagccacagggctaggccttcacttcccagtgacactgttcccaattccctccaggataagctgagactcctcaggatgtggttctgcagcagatgaggtgcgaacaaagcctgctctgccctgggcacccaggatggcactgagttctaaaaggcaaanggtatgtggtgaagggccaagcttaaggcctggtgtgggacccttattggcnnaaaccccntttggggcccggtna

SEQ ID NO: 7989 - DNA, 552 bp, Homo sapiens
  misc_feature (479)..(479): "n" may be a, t, c, g, other or unknown
  misc_feature (506)..(506): "n" may be a, t, c, g, other or unknown
  misc_feature (512)..(512): "n" may be a, t, c, g, other or unknown
  misc_feature (546)..(546): "n" may be a, t, c, g, other or unknown
  misc_feature (550)..(551): "n" may be a, t, c, g, other or unknown
gctgaagataaatgtggctcttttattaatgcataaaaagaagatgtttcgaaatgtgagttgcagtcaggctggaaagaaaggaacagggatgtcccaatacctgaataggagaggcagcccagagtgtcgatataaacaccctttttgaatgaatattaaattcatcctgctaagtgttaataggagaatttgctttggctaaaaactgggtgtttttctaccagagacttgctggctggtcactgtggaccctgggcatgagaacctcctttaagattgggttcacagtagctacagaaacaaattgaagactgagcagagctgcaccccgaaagcaacggatgctactatggtaactcaggattgtacacaatccttgagaaaccatatccttcctcagataaatgtcaagggactttcctaagaaatagatacagtagagatttatttaggaaaaaacaatagctttcaaatgngctatccccttaccctgggagtagcanaataancttcgagtattaccattaattggcctggcctggnaccnnt

SEQ ID NO: 7990 - DNA, 543 bp, Homo sapiens
gatctgctggctcagggccaaatgtttaatttgcttctccaaagtcgttcatcttcaaaagtctgattctgggaaactgatgccactagcctaaaagcccactgaccatgtagtgtgcatcagtttcctcttgtccagtaagcatttatccaacagaagctaagataacatctacaggtgttctctctttacttctgacagtcacctgcatggtcactccatcggctaaggccagcctggacctcaccaataaatcatagccacctctgaatatacctgccagatagagcgaatgggaattcttgttctcaggtactttatcggacctctcacatggctgcatgcccagaaatgtgatgatattgttgacagcctcttcaagggttttggtagaactgagggcaaaggtttcctctttctcaaaggtatctcccacctcttcccaagcagcagcaaagttaggcttcagtactttctgaatatggtcagacccagcactttgagactttcagccatactcatcatatacccatcctattggga

SEQ ID NO: 7991 - DNA, 542 bp, Homo sapiens
  misc_feature (479)..(479): "n" may be a, t, c, g, other or unknown
  misc_feature (481)..(481): "n" may be a, t, c, g, other or unknown
  misc_feature (511)..(511): "n" may be a, t, c, g, other or unknown
  misc_feature (514)..(514): "n" may be a, t, c, g, other or unknown
  misc_feature (516)..(516): "n" may be a, t, c, g, other or unknown
cagggggccacaagagtattctctttttttaaaaaagaaaaagataaatgggcacatatatacaaaatactgtcaatttctactgggccaacacagtagccactgcaatgtttctccttcttccggagctttcctcccatagtctcacatgtactcctggcacagccacaataccagtctctgggaagcatatgtcacctactccacgtgggtcccattccagtcaccacagatggaagcacctgagcctccttgccagtctttccctgcagagtcactgcactggcagggagctggagtggagcacgtggttttcctgtcctatatctcctccccccaccgcagataatactgcttcctcgggtggcccttggggcaagtcatcaggctttatgggccaggagggtggtcagcttgatcttgccatccatggaggcggtgaagcaggtcccacagtccatggcagtgcttcaatcacngngaccacaagggctttggggggcacctaagnttnancaagttttccaaaccttttaatgccc

SEQ ID NO: 7992 - DNA, 546 bp, Homo sapiens
  misc_feature (470)..(470): "n" may be a, t, c, g, other or unknown
  misc_feature (507)..(507): "n" may be a, t, c, g, other or unknown
  misc_feature (509)..(509): "n" may be a, t, c, g, other or unknown
  misc_feature (515)..(515): "n" may be a, t, c, g, other or unknown
  misc_feature (542)..(542): "n" may be a, t, c, g, other or unknown
  misc_feature (546)..(546): "n" may be a, t, c, g, other or unknown
aacatttaagacagcttttattaaatacaaaagcaaaataagctctaaggagtaaggtagggctacttaagggcgttttctgtggacagcggacacagcaccattaaggttagcttagatttgaacaaaccatgagcagacagctaactacatgttatgtttctcttagtagttttagggtctgcccagtaatcaagaaattttacttctccagaatacatgaacatgggaaccaaagaaatgtaaatatttcgaaaaagcactacacaataaaatgagacgcaatccttatgcaggtcaagatgttctccacatctacaatgtgcattaacaaaattaatgcagataagaccttcactccaaccccaaagatcttacatggttaatactattttccaaaatcagcagaacaagctgcagttacttcttttagacatttagctttggaactttgaatttcaaaggaaaantggtataagaaagctaggccatatatttagccattgnanccctcntttacctttggaatcatccgggggatnaatn

SEQ ID NO: 7993 - DNA, 531 bp, Homo sapiens
  misc_feature (470)..(470): "n" may be a, t, c, g, other or unknown
  misc_feature (472)..(472): "n" may be a, t, c, g, other or unknown
  misc_feature (478)..(478): "n" may be a, t, c, g, other or unknown
  misc_feature (493)..(493): "n" may be a, t, c, g, other or unknown
  misc_feature (496)..(496): "n" may be a, t, c, g, other or unknown
  misc_feature (508)..(508): "n" may be a, t, c, g, other or unknown
  misc_feature (510)..(510): "n" may be a, t, c, g, other or unknown
gggttaaacagtatttattgaatgtaaagtaccccagccccatggggaagaaaattccaagaacggggaataatacagattaaatacccacctgtgcattcacactctcacacacacacacacatgccacgcacatatccaagctccaacggtgacaaatcaaacacctgttttcccccagcctgagggacagctggtaggaggtggttcagaggtggggctccaggatgggctctaatagcagcagccttgtctctccctgccccctgccctgccccaggggtcaaagggagctgggcggggcgcctaggaggttggcggcaactcttccccactctgccgcagacgcttcttggctctgatctcattcatagcctcttcaatggagcgtgtgtccctcttattggccacgggcacacaagccgtaggtcttattggcctgtaacatgtgggctgcgtcttttggctgntnccttgncgatgaagtggctgnacntggcccttgaancncttgcaagggttaacaacaca

SEQ ID NO: 7994 - DNA, 512 bp, Homo sapiens
  misc_feature (448)..(448): "n" may be a, t, c, g, other or unknown
  misc_feature (451)..(451): "n" may be a, t, c, g, other or unknown
  misc_feature (478)..(478): "n" may be a, t, c, g, other or unknown
  misc_feature (496)..(496): "n" may be a, t, c, g, other or unknown
  misc_feature (500)..(500): "n" may be a, t, c, g, other or unknown
  misc_feature (502)..(502): "n" may be a, t, c, g, other or unknown
  misc_feature (512)..(512): "n" may be a, t, c, g, other or unknown
ggttgcaacatgtttaattcctgctgttcacactggacactgcatcatactagtgtcggcccctgagggcaccccttcctcgcctgcacaaaggaggacgagagatgaacattcagaggcagaaaagggcaataaaaaaagagctgtgtatgtgacctccaactactcagaggtgggggaaaacagccccatctgtcttgcactaaaaggctcaccaagggcaggtgaggggcaaatggtaatactgggagggggtaacacaaggagaagcgacatgagtacaccaagatgtcaaagctgcgacgggctggatgagggagccccaagagggcatatgctcagggtgccagccggctgcttttccttgtgacagccttgcaaggaagctgtgaggccaggacactaggccagtggcatccacactgcgtccttcaggaagccaggcctntgngcctcattcttcaggaaggaaaaccanggcccccccgagcttttnccantngcaggaagtn

SEQ ID NO: 7995 - DNA, 557 bp, Homo sapiens
  misc_feature (495)..(495): "n" may be a, t, c, g, other or unknown
  misc_feature (497)..(497): "n" may be a, t, c, g, other or unknown
  misc_feature (501)..(501): "n" may be a, t, c, g, other or unknown
  misc_feature (509)..(510): "n" may be a, t, c, g, other or unknown
  misc_feature (529)..(529): "n" may be a, t, c, g, other or unknown
  misc_feature (532)..(532): "n" may be a, t, c, g, other or unknown
cacaaggcacgccattttttctttatgaggaaattcagtctggtcacattgtcagaaaaaaaatctaccaaaactaaatagtttctatatttttttcatttacaatctctgaatacaatgatctacacttcatgaaatgtcacccctcagtatccgtggatgcttggttccaggaccgccctccgataccaatatctgcagatgctcaagttcctgatataaaatggcacagtatttgcatataacctaggcacatcctcctgtatacttgctaaatcatctctagattgcttataacacctaatacaatgtaagcactatgtaaatagttgttatactgtattggtttttaaatttgtattatttttcatcgttatgtatattttttatctttttagaaaatattttcaggccgggtgcggtggctcacgcttgtaatcccagcaccttgggaggccaaagcgggcggatcacgaagtcaggagatcgagaccncngtgnaaccccgnnttacttaaaatccaaaaantanccggccttggtggcggccccttgaa

SEQ ID NO: 7996 - DNA, 550 bp, Homo sapiens
  misc_feature (460)..(460): "n" may be a, t, c, g, other or unknown
  misc_feature (477)..(477): "n" may be a, t, c, g, other or unknown
  misc_feature (479)..(479): "n" may be a, t, c, g, other or unknown
  misc_feature (494)..(494): "n" may be a, t, c, g, other or unknown
  misc_feature (516)..(516): "n" may be a, t, c, g, other or unknown
  misc_feature (531)..(531): "n" may be a, t, c, g, other or unknown
  misc_feature (538)..(538): "n" may be a, t, c, g, other or unknown
ccattaaaaattattttattcaaattatgttttccaaaagagagggttctgtgctagtcgtctttgaaagttttcataccatttcagaaccacatttgccggaatgaacatttcagatgggcttggtgtcatctgggcctgagagacagcaaatgatgaagcaaaattgtagaaattgtccaacatcttttgtgtgaactgagtgaatgagtcaactgaggatacagcagcattacctacaggagtctgctgagccatactgtctaataattccactgaaattccaatctgagcaacagatggagttcggacaatattcatggctccaaaaggatgttggcttccttctccagatttaagacctgaaattttgaagatggcacttggcttcccattcgtgacaaatcctaggagttgccatactggcattccatttgaatcaggataagaaaagttgacngatccttccattccctnangaaatgggaatggtnccagcattaaaacccccacctnggtggaaccttcatnatccggnaggccaaaccaa

SEQ ID NO: 7997 - DNA, 560 bp, Homo sapiens
  misc_feature (489)..(489): "n" may be a, t, c, g, other or unknown
  misc_feature (495)..(495): "n" may be a, t, c, g, other or unknown
  misc_feature (499)..(499): "n" may be a, t, c, g, other or unknown
  misc_feature (530)..(530): "n" may be a, t, c, g, other or unknown
  misc_feature (552)..(552): "n" may be a, t, c, g, other or unknown
  misc_feature (559)..(559): "n" may be a, t, c, g, other or unknown
ctaataagagttaatatctttgcttttgagttttttttccaaccttaaatattacatacatacaccaaaaattacatagctgcaatgtgctcaacagcatcctctcggcctggagcttcacattatcaaaagcttagaaaacttgtaaacctctgggcctgtctctgggcactaggagagcccccgccggccgtccccttcggattgagcctgcagtttgtaagcgaagggctgacagtaggccttctagtccaagagagggctggctcgcttggagttcagtgagctgcacgcctgtcccagtgtgaccatgtgatgggggaggggccctagcacttgccctggccttgtgcagctgctcttgcccccagcagcctccgacagaagagcaaggcacctatagctgttgctttccctgcagctccctggcctcaactccatgtgcatgtgtgaaggccaccaccttttctgggcgtacccggaacctancctggncccnaccttttttaaaagccaggttaacaaggctnagggcttaaaccggggtcaaanggccttnt

SEQ ID NO: 7998 - DNA, 560 bp, Homo sapiens
  misc_feature (457)..(457): "n" may be a, t, c, g, other or unknown
  misc_feature (518)..(518): "n" may be a, t, c, g, other or unknown
  misc_feature (520)..(520): "n" may be a, t, c, g, other or unknown
  misc_feature (525)..(525): "n" may be a, t, c, g, other or unknown
  misc_feature (527)..(527): "n" may be a, t, c, g, other or unknown
  misc_feature (553)..(553): "n" may be a, t, c, g, other or unknown
  misc_feature (557)..(557): "n" may be a, t, c, g, other or unknown
  misc_feature (559)..(559): "n" may be a, t, c, g, other or unknown
atttctgggctttttattttattccattggtctctatttctgtctttatgccagtcccacactgttttcattactgtggccgtatatagtaagttttgaaatcagcaagtgtgagttctccaactctgttctttcacaaaattgtttggcttctctgggtctcttgagactccgtataaactttagaagttttctgtatcttgggatccaccagggccccagccttgatgaggtacttcactgcttccagatggttgttttcggctgcttccatcaacggggtcctctggtcttctgagcaggtgtcaatattagcgcccgcctgaaccagcatgtggcagatgtccacgtgtccagcctctgccgcggcgtgcagtggagagcgcttattctggtgctccattttgaagttggggtcaattccgtccaccagcatgaggagcaccttctgaagctncccttgcctggccggaaaaatacagctgctttgggtggaaaccaaacttcttggggttttncnaatcnanggccatgaaagcgctttccaaggttncttncng

SEQ ID NO: 7999 - DNA, 576 bp, Homo sapiens
  misc_feature (432)..(432): "n" may be a, t, c, g, other or unknown
  misc_feature (477)..(477): "n" may be a, t, c, g, other or unknown
  misc_feature (508)..(508): "n" may be a, t, c, g, other or unknown
  misc_feature (511)..(511): "n" may be a, t, c, g, other or unknown
  misc_feature (520)..(520): "n" may be a, t, c, g, other or unknown
  misc_feature (533)..(533): "n" may be a, t, c, g, other or unknown
  misc_feature (576)..(576): "n" may be a, t, c, g, other or unknown
ccttgggtttgccttaccatttattgaaggcatactatgtactaggtacatacatgatcacatttgatgttcacaacagccctgacaagtgggcttcttacccctatttccaaaagagttcattgaagttctgagagcttaatccccgctttaggctacacagtagtagctggatttcctggcatcagaaccctcacctaggctgcctctgagcatggcttctgtgtcccagtctcaatttccatgaagtttcaggtcctcctgttcccccgcatttgtagtcactcttggtgactgggaacaaagggctagagcgtgagctgaaactgagacagggagtggcaggcaggcagtggggagagaaacttttctcacatccacccatgtgaagaagatggacaaaaggggtgggtctttctggagggaggcttncaagccactttcccaagaatgctgatcttgggatgaaatggccanggacctgatttggggtaaaggggatggggtnggncacattggntttctggggcttnaaactttatttccccttcctttggggaaaaaaaaaggggaaan

SEQ ID NO: 8000 - DNA, 567 bp, Homo sapiens
  misc_feature (467)..(467): "n" may be a, t, c, g, other or unknown
  misc_feature (542)..(542): "n" may be a, t, c, g, other or unknown
  misc_feature (547)..(547): "n" may be a, t, c, g, other or unknown
  misc_feature (549)..(549): "n" may be a, t, c, g, other or unknown
  misc_feature (560)..(560): "n" may be a, t, c, g, other or unknown
  misc_feature (565)..(565): "n" may be a, t, c, g, other or unknown
agtataaaaaaatggaatcattttatttaaatcccccaaataccagagatgaagtaaatcatcttttattttcatcttacatttggttatcatgagacatgcaaactcctccaattttaatgagaacagtgtttttgtgtctttttatcacatatccacttaatattaggtgtaatattgctaagtcggattcgcatatgaggtgcagcatcaagtcttttcctatattttgtttttgttgcagcgtaatatgaaaaccccgtttcacacaggtgcattgtagcaaaaggaagaagtacacgcactgcacgccttgcaatgcttgggtattcctgaattaggctactccaaaaatcatttagtgaaagttcactaaaattttgcttcacttgagaatcagatggttaaatcaatcaggctctcataagtcccgggctactaaatgaagctgggttaacagtaactgnaaatggatttctaacccaagcattattggcatttggtacaggaaagtattttaaccagagtacgcgcaaaccccntaagngnctgacaatggnattgnaa

SEQ ID NO: 8001 - DNA, 562 bp, Homo sapiens
  misc_feature (488)..(488): "n" may be a, t, c, g, other or unknown
  misc_feature (505)..(505): "n" may be a, t, c, g, other or unknown
  misc_feature (512)..(512): "n" may be a, t, c, g, other or unknown
  misc_feature (518)..(518): "n" may be a, t, c, g, other or unknown
  misc_feature (532)..(532): "n" may be a, t, c, g, other or unknown
  misc_feature (552)..(552): "n" may be a, t, c, g, other or unknown
  misc_feature (556)..(556): "n" may be a, t, c, g, other or unknown
ggttcaggttgtctttattgatatgttcactcaccagagattctacattctacgtaaaagctcaaatcgccagatactgttattactattttaggagggcttggctaatacaaatctggaccaaatgttggcccatgctaaattatatcaaaagaccaaacatccaagaaaggcaggaattcaaagatttcagaagataaaaatgcttgattgggtccctggcatgcaaccagcccatcaaccccctcactgccctctggcaggacccagaagatgagctcccttcttgccacgagaaatacattcatgaggctctgctgattttcctctctaggcctgggaggctgcttgaaagagctgctgtgaacgtgggctccctgatctcagcaacagagatagacagaaggaacaaaatagggcgctcatcgtaagggatagggcatggaaaccagacctcgagctgtgggtcccaggaatgaaaaaaggcngacgcccctaagatatnggctaantatggnccttacttaagaantttggggccaacaagttttngttnagggcc

SEQ ID NO: 8002 - DNA, 553 bp, Homo sapiens
  misc_feature (460)..(460): "n" may be a, t, c, g, other or unknown
  misc_feature (469)..(469): "n" may be a, t, c, g, other or unknown
  misc_feature (477)..(477): "n" may be a, t, c, g, other or unknown
  misc_feature (479)..(479): "n" may be a, t, c, g, other or unknown
  misc_feature (497)..(497): "n" may be a, t, c, g, other or unknown
  misc_feature (519)..(519): "n" may be a, t, c, g, other or unknown
  misc_feature (540)..(540): "n" may be a, t, c, g, other or unknown
gtttgtagaagctttattcataattgccataacttaaaagcaaccaagatgtccttcagtagaataatggataaagtgtagtacatccattctggctgggcatggtggctcatgcttgtaatcccagcactttgggaggccagtgcaggaggactgcttgaacccaggagttcaagaccagcctgggcaacatagcaagactccattctacaaaaaatttaaaaaatcagccacacatggtggcaagcacctgtagtcccagctgttcaggaggctgaggtgggagggtcacttaagccccagaggtcaaggctgcaagtgagccatgatcatgccattgcactccagcctggggatagaacaagaacctgtctcaaaaaaaaaaaattaccaaaaaaaaaaaaaaaaaagtatgctacataaatacaatgggatattagtgttaagaagaaataaggtntgaaacttntgaagatntntggaggcccctaaatgcntattagtaagtgagaaaagccngtgtgaaaggcccatactatntgaattccagttt

SEQ ID NO: 8003 - DNA, 514 bp, Homo sapiens
  misc_feature (264)..(264): "n" may be a, t, c, g, other or unknown
  misc_feature (434)..(434): "n" may be a, t, c, g, other or unknown
  misc_feature (448)..(448): "n" may be a, t, c, g, other or unknown
  misc_feature (452)..(452): "n" may be a, t, c, g, other or unknown
  misc_feature (460)..(460): "n" may be a, t, c, g, other or unknown
  misc_feature (476)..(476): "n" may be a, t, c, g, other or unknown
  misc_feature (485)..(485): "n" may be a, t, c, g, other or unknown
  misc_feature (512)..(512): "n" may be a, t, c, g, other or unknown
ctctgtaacagatttaattatttgttatgaaagagataccgagaacgtggattcctgtgtgaagtgcagggacagcctttacagaatccccatctgctgaaagatgacacctacctgatcctcctgaaggaacctctccacacttttgtaggctttcgtgaacttgtgcttaacaatgagttcacaccaccgatggcgaacctctgcatcctgatcctggaggtggtatgtcctctggaggctttgcagagttcgggggctcanagtcttctgctccaagagatgctccagaagcaagaccagctggtctggaagaagcttttcaaacacctcttccttctccctgcgcttccgttttcggggtctccggttcactccaatccatttcgtgacctcggcgcgcacttgccgcgcaagcccgactccgccccggngcgacgcttccttntgancggctttngtattccgaacttttnaagccagcntgggaaaatgttttcaacaagaacagntt

SEQ ID NO: 8004 - DNA, 560 bp, Homo sapiens
  misc_feature (470)..(470): "n" may be a, t, c, g, other or unknown
  misc_feature (505)..(505): "n" may be a, t, c, g, other or unknown
  misc_feature (517)..(517): "n" may be a, t, c, g, other or unknown
agcagtttaaattttattgacctcccagtttttaaaaaaagttaaatttaaggtcacacctctaagtttgatgtactatatacagatcgtgcagaatatgagttaaacagatacaaattagtccatgcccaaaaagatatactagggtacagaatcatcttcataaatacatataaaattcttgtgtagaagcgaactgtccaggttttctgagacacttctaagtgaatcaaggcacaaaatgtacatacaccattgtgaatacacacattctagactttgtgcctctgacatagcccaaggatttagcttcatgactcttataaaactaaatgtactgaatgagattctgcttcttgggtgaaaaaccacaggaactataaacatcatgtagataattactccaaaatatggagaatacaaatacgaccctttattttaaaaagcaacacaaaagaatggtgtaaatnccagtgttaaatgcctccgttttggataatttaantaagaaccgatncaggttggttccagaactatgcatactagctctactgaggaaa

SEQ ID NO: 8005 - DNA, 541 bp, Homo sapiens
  misc_feature (307)..(307): "n" may be a, t, c, g, other or unknown
  misc_feature (478)..(478): "n" may be a, t, c, g, other or unknown
  misc_feature (481)..(481): "n" may be a, t, c, g, other or unknown
  misc_feature (505)..(505): "n" may be a, t, c, g, other or unknown
  misc_feature (518)..(518): "n" may be a, t, c, g, other or unknown
  misc_feature (524)..(524): "n" may be a, t, c, g, other or unknown
  misc_feature (532)..(532): "n" may be a, t, c, g, other or unknown
  misc_feature (540)..(540): "n" may be a, t, c, g, other or unknown
ccatatttaacatttattttactttgctgagcaagaatcatagacagctactaccacggctgcttcgtttggacaaaaataacgaggaggcatccacgggattagttacacggtatcaacttaccaccacagcagaatcaacagtgactcgctaattaacagaaccgtttgctagaaagcactaatctagttatataaatactgaaataggtcacatgcaaaacactataaacgttttgtgtgatgtacttttagttctccatagttttgtttggtataaaggaaatataatttggctgtgacgtanactgttgatgtaattttcaagttttcctgtatggggaaagttgccctgactgtggcccttttcaaggtggagcctccaacaccacgttggcagattcagactccgtgaacagtctaaatgagcaagtcagctgaatgccctttcaaatggaagggaaatgagatggaaacnacnaaaaaaggactggcagcggacagntttcaacccgagntttcgntgaatggnggatccana

SEQ ID NO: 8006 - DNA, 568 bp, Homo sapiens
  misc_feature (507)..(507): "n" may be a, t, c, g, other or unknown
  misc_feature (532)..(532): "n" may be a, t, c, g, other or unknown
  misc_feature (539)..(539): "n" may be a, t, c, g, other or unknown
gaacttaaacacggagcatttattgttagaaagggcaagtcttacactcaaataggttttaacatgaacacattaaagggagatggccctggcccccacagtgtctgctctctccaaggcatgcttcagttatactgcagcctggccaaccactgttccctgtagaagttgaagttcctctgtattatccagcagctggaggagacggagtatggcagactctggaatgccatttgtgtgagttccacctactttctaggcttcagggtaaatggaaaaagtcgcaataggcgaaatgtatttcctaaaaagctggacagaggtatgtgacattcctttgcttaacaagcaaaacaaaatcaatgagtctggtgaactgacgccatgacagcaatgtggagaagactgggaagtctacactgggaatggtgctgtggacgctctgggcacagaagcccaatttggaacctcttcttaaaaacctgggaagggtggtggaaggccaanccaccaaaggcggggcttttcccanctgcttngggacaatctctgggtctcctgggccagg

SEQ ID NO: 8007 - DNA, 562 bp, Homo sapiens
  misc_feature (438)..(438): "n" may be a, t, c, g, other or unknown
  misc_feature (470)..(470): "n" may be a, t, c, g, other or unknown
  misc_feature (489)..(489): "n" may be a, t, c, g, other or unknown
  misc_feature (500)..(500): "n" may be a, t, c, g, other or unknown
  misc_feature (522)..(522): "n" may be a, t, c, g, other or unknown
  misc_feature (528)..(528): "n" may be a, t, c, g, other or unknown
  misc_feature (551)..(551): "n" may be a, t, c, g, other or unknown
  misc_feature (555)..(555): "n" may be a, t, c, g, other or unknown
aaattttttttaatagtcacattcagctcgcttgctcaaaccagactcccacattgggtgagcaagatgagcccataggattccagagttaatacgtaaccgtatatacaaacagccaaaaaaccataatggtgccacagggatggagcagggaagggcatctctaacgtgtcctctagtctatcttcgctaaacagaacccacgttacacatgataactagagagcacactgtgttgaaacgaggatgctgaccccaaatggcacttggcagcatgcagtttaaagcaaaagagacatcctttaataactgtataaaatccaggcagttccattaaaggggttaagaaaaccaacaacaacaaaaagcgagggactgtctgttgcactgtcaaaaaggccttggagttaatgggacccaggattggaggactcttanctgatacagatttcagtccatttcattaaaangcttggatgttaagaagangacacttaacnggttctgaaggaaacccttganatggancgttaaaaacggacagatgaacncaanggatcaa

SEQ ID NO: 8008 - DNA, 556 bp, Homo sapiens
  misc_feature (499)..(500): "n" may be a, t, c, g, other or unknown
  misc_feature (505)..(505): "n" may be a, t, c, g, other or unknown
  misc_feature (516)..(516): "n" may be a, t, c, g, other or unknown
  misc_feature (529)..(529): "n" may be a, t, c, g, other or unknown
  misc_feature (532)..(532): "n" may be a, t, c, g, other or unknown
  misc_feature (556)..(556): "n" may be a, t, c, g, other or unknown
acatggtggaagatttataggtaataaagggaacatgatgtacagaaatctgaagtgaggagtaaggtccagaagcaactgggtccgttacagttctcagcagtgaggtccagaaacaactggactggttacggtgctcagcatttgccttatttgaacacagctgaacactcagcagtgtgtgagtggcagaagtttggctgttgggattggccaggactcagctatagttacaggtgcatactccaaagttaggttatcagtctttctacctattaagttaggttgcagttcgtccacagggactcaaatctagaagtacagagtccttcccaggccatatttagttcactgtaacagttcctattatgacctcactgacagttctttttctctgaattttcctttcttctcaacagcttgtccaaatgttccattgggtccctgttcatcccaccctgaactcttcttgactgaatctggcctttgggggttgcanncctgnttctctacagnttgggcccccttnagncttttcatcggagggttaaaaccn

SEQ ID NO: 8009 - DNA, 561 bp, Homo sapiens
  misc_feature (488)..(488): "n" may be a, t, c, g, other or unknown
ggtgatttgtctcttatctttttaaagcaatcagcttattttcacagaaacaactctttcagcgctcatgttttattaattaatgtaatagctaagtaaactatgttattaccaataacacatacaacaggtatcatttgctaggaagcatcgggtccatcgatgagaacccaacagcaggtctgagaggtgccggttgcccagagcctctcaaaactcaggttctgacccagcaagtctgaggtgagacctgagattccccccatgttgtggtccacaggccacactttagtagcaagatggtggctgacattgtacattttacaaaggaaacgccagtgccagttagttaattcaggggatcaagtggaagtcaactgggaaagtgtccacaatgatacttcaacaaaaaaagtaaggaaaaggaaaggtggaagatgagtatgttaacttcctcatttttcatagcaaggagtacacaggtctgnctcaagccatcatttcaagaagtagatatctcaatattttggttaaaatccagtgggccatggtctacagaat

SEQ ID NO: 8010 - DNA, 560 bp, Homo sapiens
  misc_feature (422)..(422): "n" may be a, t, c, g, other or unknown
  misc_feature (430)..(430): "n" may be a, t, c, g, other or unknown
  misc_feature (514)..(514): "n" may be a, t, c, g, other or unknown
  misc_feature (519)..(519): "n" may be a, t, c, g, other or unknown
  misc_feature (536)..(536): "n" may be a, t, c, g, other or unknown
  misc_feature (539)..(539): "n" may be a, t, c, g, other or unknown
  misc_feature (556)..(556): "n" may be a, t, c, g, other or unknown
gcatcttaaaagtcatttttaatcctcgactgtacacaatccaaatcttggtagcagcatctgacagggtaaataccaactcttgtgcaagggtcttttatatcctcaacccctctgattctggaaccggttccctaaacaaaggcagacttcttcagcttcttccagaatagacattagacatggtgacagtgataaacctttggggtgggctagtctttttcaacattgatggagcagaatttacaccctctgattcaatccatctcagtaaatgtcaatgatgccttcctatctacttctgctatccaggaacccacctctttagagtcaatgcatgtgaaaggctcatgatttgtaatatcaagaagtaggaagacaaagaggtttgaaggattctgccaaaggcaaagctgtatgangctctctnctgactacatgtacaccctatatttggatactcattcccactggagtctgctcttaagggtccagaagcagggtcattgggtantatcntaactggcattgcccangtncctaaacagtgccagtncctg

SEQ ID NO: 8011 - DNA, 568 bp, Homo sapiens
  misc_feature (487)..(487): "n" may be a, t, c, g, other or unknown
  misc_feature (500)..(500): "n" may be a, t, c, g, other or unknown
  misc_feature (505)..(505): "n" may be a, t, c, g, other or unknown
  misc_feature (507)..(507): "n" may be a, t, c, g, other or unknown
  misc_feature (517)..(517): "n" may be a, t, c, g, other or unknown
  misc_feature (533)..(533): "n" may be a, t, c, g, other or unknown
  misc_feature (550)..(550): "n" may be a, t, c, g, other or unknown
gaagtaagatgaggaagacctggactcatatgctgagagctctggacaaagaagtaatgtaaagtaggggccacagagctagtgccgggccaagtgaaagcagggagagaaagccagaggcaggaaacaagacaaatgcagaagtgtgaggaatgagaccctgatggcttcctggttcccatctgctgcagggccctgctttctgtgatcaggtccctggaataaatcttccttaagctaaatctggtcactggtcctactcctagcaatcaaatgactcctagccacagatgtgtggccttgctatgtaacacttttccccgagcctaaatttccccaccaggaaaactggtgacaaggacctacatgatgctggctgattaggaggattcaaagtcacaggaaacagcatgttgccacatgggtgagatgcttacaagacagtagcaatcatcactgttccagaaaaggaacctgggatctgganaggaaggggcttnacaangncatgccgatnttaagggacgcccccnttttttttaaccagggnggggggcctcaaaattga

SEQ ID NO: 8012 - DNA, 582 bp, Homo sapiens
  misc_feature (502)..(502): "n" may be a, t, c, g, other or unknown
  misc_feature (517)..(517): "n" may be a, t, c, g, other or unknown
  misc_feature (531)..(531): "n" may be a, t, c, g, other or unknown
atattctttgctagaacaaccaatctttattagaaagttgtagtcacgtttacaataaatatcaacaatataatgaaaaagtagaacaaattagtttccaaatactgaactcctgtaaccaaaacacattttggatttgggaaaacacagtaaacacataccaaaaacacagccacaaataccaaaaacaaaaaccagctcaagtataggattgaactggctggaaaacacttattgtgttactgccttaagaaccccacggagcaccttgtagctcattaactgcacattttccttaggggggaaacaaggtcctctctcagtcacatatgcataaggaaatctcaaaacccaaaggccatcaggtggaagggtgatttcttgtttttctgggtagaataccggacatggtggtgggcctggctgaacctgaggcattagtattatctgcaaaggagcatcaggaacccaacaaaaagcctcataagttgagcataatganggttcagccctttanctttgagaggtgcngaatatttaagggcatgttactatttaaggctttttaaagtgatcctttgg

SEQ ID NO: 8013 - DNA, 560 bp, Homo sapiens
  misc_feature (1)..(560): "n" may be a, t, c, g, other or unknown
nnnnnnnnnnnnnnnnnnnnnnnnnnnnnnnnnnnnnnnnnnnnnnnnnnnnnnnnnnnnnnnnnnnnnnnnnnnnnnnnnnnnnnnnnnnnnnnnnnnnnnnnnnnnnnnnnnnnnnnnnnnnnnnnnnnnnnnnnnnnnnnnnnnnnnnnnnnnnnnnnnnnnnnnnnnnnnnnnnnnnnnnnnnnnnnnnnnnnnnnnnnnnnnnnnnnnnnnnnnnnnnnnnnnnnnnnnnnnnnnnnnnnnnnnnnnnnnnnnnnnnnnnnnnnnnnnnnnnnnnnnnnnnnnnnnnnnnnnnnnnnnnnnnnnnnnnnnnnnnnnnnnnnnnnnnnnnnnnnnnnnnnnnnnnnnnnnnnnnnnnnnnnnnnnnnnnnnnnnnnnnnnnnnnnnnnnnnnnnnnnnnnnnnnnnnnnnnnnnnnnnnnnnnnnnnnnnnnnnnnnnnnnnnnnnnnnnnnnnnnnnnnnnnnnnnnnnnnnnnnnnnnnnnnnnnnnnnnnnnnnnnnnnnnnnnnnnnnnnnnnnnnnnnnnnnnnnnnnnnnnnnnnnnnnnnnnnnnnnnn

SEQ ID NO: 8014 - DNA, 547 bp, Homo sapiens
  misc_feature (2)..(2): "n" may be a, t, c, g, other or unknown
  misc_feature (199)..(199): "n" may be a, t, c, g, other or unknown
  misc_feature (498)..(498): "n" may be a, t, c, g, other or unknown
  misc_feature (513)..(513): "n" may be a, t, c, g, other or unknown
  misc_feature (547)..(547): "n" may be a, t, c, g, other or unknown
gntatttaaggatttgtttaatgttttaaaattcaaagcactttaaattattttaagacaaaagattaataaaaacaacattacctttcaaatacaactttataacagcacagtggaagaatggtaaacagtccctctttttttaaaaaaaaatcagtacttaaaaccaaaggaaggcttatatgtacagctaattcanaaagggaacaatgacacctaaagacatagataaatgcttcattttaatccaataaatgtcctacctactggatcttaataatgatgttttcaatatgccatttaaaataaactatccttgaaaataaagttttaaatcattcaatataatctatgaaatagcatctagttaactagattaccttaaatataccaaatattataatcagcaaaataaaaaccagtaaatcaatttgtatctgaaagcctgaggtctggatctactgggattttaattttttttccctaagattaacaatntaaacaaatcttttnggtactcacatattttgacagctcaggctggtcn

SEQ ID NO: 8015 - DNA, 569 bp, Homo sapiens
  misc_feature (439)..(439): "n" may be a, t, c, g, other or unknown
  misc_feature (470)..(470): "n" may be a, t, c, g, other or unknown
  misc_feature (528)..(528): "n" may be a, t, c, g, other or unknown
  misc_feature (532)..(532): "n" may be a, t, c, g, other or unknown
gaaaaatgtaacttttattctgaacatgtagtatttatctttattagcaatttttttcataatataagcatgcctcaatcatccaaaagctatctacctatctatataaattgatatacatgctactgaattgacttcttaatagaatcatatggtaagtgttataatgactaatcaacctacttctgataattttggtgtaaacaaaaatgatatttaatttttattaaatcaagtttacctatcaaattcccttttagaaaaacactgcaagtttagtcttaccaagattgcaagtaaattttaaaattatggtgctgtaaataaaaaggttttaagttgaaatgtgtactgagattagccatatcacaaaagtcctatcatgggtaatgaaaagtcttatttttaatatattttggttccttttctttgacatggnggcccaagataagaagggcttatttttaaangccaagaacagtttcacaaaatcgaattaaatttattctaccaaaaccttgaactggntagnctatcagcaattggccaatggatggatccaaataatg

SEQ ID NO: 8016 - DNA, 579 bp, Homo sapiens
  misc_feature (463)..(463): "n" may be a, t, c, g, other or unknown
  misc_feature (579)..(579): "n" may be a, t, c, g, other or unknown
atgttttaattgcctatggcatatattacataatggctcaaaattaatagtctggctgaaattaagaaaaacagctgatgatgacttagtaaatccttaattttaagtaagcttttggccaaaagtcaggggtagaattgactcaaaattaacagccttcaccatcttttattcattctgctgtgatacaactaaaatggccagtaaattctcccctgggtctcaggtaacagttttccaaaagtgaagtatcactttctctgcacagtggtgaaagccggcatttggatgggctggatcgggtggacaggctgaaacactggcttctttctcacttcagagtgtgttttcactgcagggagcagctgattccttttgatgatctgtaaggccagctgagtattaccattctgcagttcaaggtagactgccagcaagatggcctcagggggcacctctttangatggatcattgaagccgctggtggagacctttcgggctttggcataattcgtcttaagcagtaaccgctgccaaggttgacaagattacagtcctgcaaaatgacggactgggtn

SEQ ID NO: 8017 - DNA, 587 bp, Homo sapiens
  misc_feature (455)..(455): "n" may be a, t, c, g, other or unknown
  misc_feature (494)..(494): "n" may be a, t, c, g, other or unknown
  misc_feature (500)..(500): "n" may be a, t, c, g, other or unknown
  misc_feature (515)..(515): "n" may be a, t, c, g, other or unknown
  misc_feature (541)..(541): "n" may be a, t, c, g, other or unknown
  misc_feature (546)..(546): "n" may be a, t, c, g, other or unknown
  misc_feature (555)..(555): "n" may be a, t, c, g, other or unknown
  misc_feature (587)..(587): "n" may be a, t, c, g, other or unknown
ccttatccagaaacattttaatctcttaaaaaacaaagcaaaacaaacaaacaacaaaaaacccaaaactacgttgctccttttcacaatagtgcacatttttaccataatttagttatggctacaaaacatcagaagattttttttaatgtatcttctctatggtaattaaaaaaaaagttgtgcccttctagtctttaattggcagaaatatgtcccaaaaaagaaactattgcatttaagccacatcaccaaaaaacaaaaaagaaaaaaaaaaaaaaaagcaaaacaaaaaaacaaaaccaacagagcataatacccttttactgatgtgtcttacagattgacatgaccaaagtcataggttttcatttaatttccaattcccccttccacaacatgcaccaactgaatatatgctctgggagccataaaatgtaccaaacatctacctnttcaaaagaatgcattaaaatatttaaagaattttttgntaaaanggggaaaaaatttanccagaaactggttccttccttacttnaggcntccttaatntaaacccaaaaccgaaattttaagccaggaan

SEQ ID NO: 8018 - DNA, 577 bp, Homo sapiens
  misc_feature (464)..(464): "n" may be a, t, c, g, other or unknown
  misc_feature (488)..(488): "n" may be a, t, c, g, other or unknown
  misc_feature (491)..(491): "n" may be a, t, c, g, other or unknown
  misc_feature (511)..(511): "n" may be a, t, c, g, other or unknown
  misc_feature (533)..(533): "n" may be a, t, c, g, other or unknown
  misc_feature (535)..(535): "n" may be a, t, c, g, other or unknown
  misc_feature (537)..(537): "n" may be a, t, c, g, other or unknown
  misc_feature (576)..(576): "n" may be a, t, c, g, other or unknown
gggattaggagaacactctttaatgataaagcctgtccaagtactaaggacaattagagtaggcaggtgacctgtacaaagtattagtgataacacaacattcagcttcctaagagttaaaacgtgctgcttacatgaagggagatgatactgagctaagaagtcctggtatagagaagcagagagaccaacctacttcatattatttataaaatagagaatattctcagctaacatgctgggagaaaaaattcttccaaaaaggcagaattacaatcaatgccaagatttacaaattccatcatgtttaaatataaggacaaaaataaacatttcttatttaaaaaaaacccacaaatttccccaactatagcttatctgttagcacttctttatcagtctgactattctttaaaggccttaaaacatgaatttgggataaaaacaaataaaagtgcccaagntttaagaagccatatgttacttangangtatctatatatttttagancaatcaatggtttttaaaaagngnanaaactgggacttttctctttaaaaaagggtaaatattcnc

SEQ ID NO: 8019 - DNA, 583 bp, Homo sapiens
  misc_feature (524)..(524): "n" may be a, t, c, g, other or unknown
  misc_feature (550)..(550): "n" may be a, t, c, g, other or unknown
  misc_feature (559)..(559): "n" may be a, t, c, g, other or unknown
  misc_feature (569)..(569): "n" may be a, t, c, g, other or unknown
  misc_feature (571)..(571): "n" may be a, t, c, g, other or unknown
  misc_feature (573)..(573): "n" may be a, t, c, g, other or unknown
atgacaaaaccagaatgttgaatgtttattgcatcaaacaacttgatcattatcattagtagcaagctgccacacaattgcaaccgctgtgtttttgccataggcgcccgctgggacacccaagcaggaaccattgttgaagcccgtctcaaggagctggcatgccctatgccggtcatctttgcaaaagccacccccgtggacagacaagaaaccaaacagacctacgagtgccctgtgtatagaaccaaactgagaggccccagctacatctggaccttcaggctgaagagcgaagagaagactgcaaaatgggttctggctggagtggctctgcttctagaagcgtaaggtaacactggcattcctctagcctctgctggagtgcagtgaggattttctagcatgttgctgcactgttcccatgcacattattctaactttttagtaactcacacgtgcattcttttttcaacgctatccttagagtgaaagtcagaaaaaaatactagaaactaactcanggctgaacgtggtggcacacgactgnaatcccagntactcaggangnangagaatcctt

SEQ ID NO: 8020 - DNA, 582 bp, Homo sapiens
  misc_feature (508)..(508): "n" may be a, t, c, g, other or unknown
  misc_feature (540)..(540): "n" may be a, t, c, g, other or unknown
  misc_feature (573)..(573): "n" may be a, t, c, g, other or unknown
gttttctgtaaaatattgaagagatttattctgagccaaatatgagtgaccatggcccatgacacagtcctcaggaggtcctgagaacatgtgcccaaggtggtcggggcacagcttggttttatgtattttagggaggcatgagacatcaatcaaatacatttgagaaatacattggtttggtccagaaaggcgggacaactcaaaggtcggagcaggggagggaagcttccaggctacaagtgaatttaaacattttctggttgacaattggttgagtttgtctgaagacctgggattgatagaaaggaaatgttcaagttaagataaagattgtggagaccaaagttctttgaagtctaatagtcgctgcccttagagacaatagatgacaactgtttcctattcagatctttcaaaaggtgctagagttttaatctcctcaggattgggagggtctggaagaaaaagatctagctatgttaacaggagattctttacagatgcnaattttcccccacacaaaacactttgtagggncatttcaaaatatgggtaaacccattttgaggnaaactcttt

SEQ ID NO: 8021 - DNA, 572 bp, Homo sapiens
  misc_feature (201)..(201): "n" may be a, t, c, g, other or unknown
  misc_feature (273)..(273): "n" may be a, t, c, g, other or unknown
  misc_feature (325)..(325): "n" may be a, t, c, g, other or unknown
  misc_feature (462)..(462): "n" may be a, t, c, g, other or unknown
  misc_feature (534)..(534): "n" may be a, t, c, g, other or unknown
  misc_feature (541)..(541): "n" may be a, t, c, g, other or unknown
  misc_feature (553)..(553): "n" may be a, t, c, g, other or unknown
  misc_feature (558)..(558): "n" may be a, t, c, g, other or unknown
  misc_feature (562)..(562): "n" may be a, t, c, g, other or unknown
  misc_feature (570)..(570): "n" may be a, t, c, g, other or unknown
ctgactcttttaaattgtatttattcactccccaccaatttgaaaaatcttgtaaattacagagggtttcctagtcattaacatgaattagtaatgctataacttaattcaaaagcaattacttcttaaaaatagggcgcataccaggaaagcttagcatcagccaaagctactagcacaccacgggcaaaaggccaactntgcagggatatgtaaaggtcattttatggataatccatataaaaactgctctcaagatattttgcccatcanaatttgtttacaaatggaaatctaatttgatgattttaggcctttgtgctanaatctcacaaccagaaagaataacacctttaatatgaattcttatgatattgtcagaaagtttaacaggagttattttaactcctgttaaaataatagatgacagtaaaaagaaattcaaaggggaaagaaacaatntacgaaaaagctttggggtaacagatgttgagcctacattaaaaactatttattttaaaggtttcctatgtntaagacngaaatcccagcnctttntacntttggggngg

SEQ ID NO: 8022 - DNA, 528 bp, Homo sapiens
  misc_feature (277)..(277): "n" may be a, t, c, g, other or unknown
  misc_feature (353)..(353): "n" may be a, t, c, g, other or unknown
  misc_feature (396)..(396): "n" may be a, t, c, g, other or unknown
  misc_feature (437)..(437): "n" may be a, t, c, g, other or unknown
  misc_feature (447)..(447): "n" may be a, t, c, g, other or unknown
  misc_feature (453)..(453): "n" may be a, t, c, g, other or unknown
  misc_feature (456)..(456): "n" may be a, t, c, g, other or unknown
  misc_feature (477)..(477): "n" may be a, t, c, g, other or unknown
  misc_feature (508)..(508): "n" may be a, t, c, g, other or unknown
  misc_feature (528)..(528): "n" may be a, t, c, g, other or unknown
cagacagacagatctttattagtgttttcaacttattttgctcacaacttcccagcaagaaatgtcttacattgcaaccagttctcacatttagatgtatgggtgaaaagtttcacaaaacagtatttgcctttactacatgatgcattctggcctactttattctgctccattgctgtgtaatgctggtgaccacttgctaattgatttcccattttactaaatgggctgggacccacggtctgaaaaccctgccttaggctgcaagcatttctgngatctctgcgagctactccatataggtaaacacacgcgaggtaaactaggaaacagcttctgcttttgcagattanaagtgaagttgacatcacgccaagtacgaaaaggctaaacagntgacaaaatttccacttgagcaaccctggggagcgcaaacntgaggaatcngggcanggntgacttgaagaaagcactgcngatcacgcactttaaggcaacctttaactgnacaatgcaaataacctaacn

SEQ ID NO: 8023 - DNA, 588 bp, Homo sapiens
  misc_feature (451)..(451): "n" may be a, t, c, g, other or unknown
  misc_feature (518)..(518): "n" may be a, t, c, g, other or unknown
  misc_feature (521)..(521): "n" may be a, t, c, g, other or unknown
  misc_feature (571)..(571): "n" may be a, t, c, g, other or unknown
  misc_feature (579)..(579): "n" may be a, t, c, g, other or unknown
agttcttcatgaggttatgtttactacaaatttttattgttaatgtttctcatcctgaaattatgggatacagcctagcagtttgtcctcacttggcagagtaggtaaccctggctctcacactgagcccccaagagtccttttggttttactggtgtcagggattacagtcagcaaaccccactcatttacagggtcaggtgtacagggctgagctggagggttagggtcagggcccctcaggaaactctggtctggcacagcagcagcagggatgccactctccctttgtggaatccttcttaatacaagagtgagaagcagaagagcaaaccacaaaggaattccagctcagaccccaaagtacctgggagagctgcaaacagccatggagataagagaggcggggagggaacacagtgactgagtctgagagacagcaaagcacctntccagcgaaagccactccgagatgcagcctaacttcctaatttgcatcagcaaggatgaagcaggcncancatggaaagaacacctgggggtgtaactggttaccacagcttaaccacanttccccanaaacggagg

SEQ ID NO: 8024 - DNA, 583 bp, Homo sapiens
  misc_feature (493)..(493): "n" may be a, t, c, g, other or unknown
  misc_feature (551)..(551): "n" may be a, t, c, g, other or unknown
ggttttctctttcatgtatttacacaagttcaaaatgatattcacagcatcttctaaattttggccaagagtcaaaaaaatgcatttaaactttggaacgtgcccacataagacaggaggctgatcccaacagtagttggggcagatacccacaaaccaaagggctgggaaagtcaggaagagctgaaaggattcttcagtcagtttatgaactcggtgcagtgagacctctagactgacacgtacaacagagatgcagtttcgtctaactggcacctgtcccttccattacttgctgggcctgcttctgtcccatgcagcactgtgcgaccgactggaataacttttcgatttctggggcacagtgtacaaattcatggttccagaacttaaacgctgggtttttaatcagctcaatgaaggtaataagaagaccccaaggatgtggcctatttacaatcaacccgttccaagagaactcttggtgatctgntcttggatggcttccgtattggccttgcaaaaaggtacagcatggtgcaactgaatantgagtgtggctatttgggtaccggaacttgat

SEQ ID NO: 8025 - DNA, 508 bp, Homo sapiens
  misc_feature (396)..(396): "n" may be a, t, c, g, other or unknown
  misc_feature (451)..(451): "n" may be a, t, c, g, other or unknown
  misc_feature (458)..(458): "n" may be a, t, c, g, other or unknown
  misc_feature (467)..(467): "n" may be a, t, c, g, other or unknown
  misc_feature (483)..(483): "n" may be a, t, c, g, other or unknown
  misc_feature (497)..(498): "n" may be a, t, c, g, other or unknown
  misc_feature (505)..(505): "n" may be a, t, c, g, other or unknown
caatggaaaaattttttagtaaaactggaaaaggctctataaaatgtcctgactccagcagtcttgaggcagcacacaatggcatcagtgtctaggtggcaggcactccgggctgacagcttccttctatggctctatgaccaagcaacccagcccgaggcagctcccaccagtgaggccctgatattgcagggctaagcacctaggatccaattctagtacatgccacctcatgctaggctctacaaagtggggagcagaggagcttggtacccactgtatcaccctttgactttgaaagcctaggctggagtttcgcatgaagtccccgattcccctccaggttcatgcggcctgacctcactgccttgaatctgacctgctcattcctacctnagggcttggatttccttttctctctgcctgggtccccttcgccggatgttcacgnggctctntccttctanttgtttaggccccaanttcacatgcccttnngtttcanaaa

SEQ ID NO: 8026 - DNA, 596 bp, Homo sapiens
  misc_feature (485)..(485): "n" may be a, t, c, g, other or unknown
  misc_feature (515)..(515): "n" may be a, t, c, g, other or unknown
  misc_feature (539)..(539): "n" may be a, t, c, g, other or unknown
  misc_feature (555)..(555): "n" may be a, t, c, g, other or unknown
  misc_feature (577)..(577): "n" may be a, t, c, g, other or unknown
  misc_feature (588)..(588): "n" may be a, t, c, g, other or unknown
  misc_feature (594)..(594): "n" may be a, t, c, g, other or unknown
gttaatagtgatggggtttcaccatggtgcccaggctggttttgaattcctgggctgaggagatccacctgccttggcctcccaaagtgctgggattacaggtatgagctaccaagcccagcctgcttgacatttatcctatggaacactccaacaagtaaaatttaaagccagctctcatgacaacaaagactctaccctcagcgccaacatttctcactacttacgcatttcattttggttaagtatgatgtgcctgcctctaacctactaaggcaagaacaataaaacatatacaagggacagccagcctcaaaaaggtgacttgtctcccacaagccaggttctctgcatggaaactgaaggtgctcttatcttccgattgtggagtttattacattttggtatcacaaaggaaccaactatccagaataacaacacaagatgttttaccttatatatcttagaaattttaaaagcatganctgtgcgcctccggatgacatctggatcantcgtgggaaggaaatggattgtanaataagggtttggcanttggaaagggcttaaaaaccangaccccttggnttaaangg

SEQ ID NO: 8027 - DNA, 589 bp, Homo sapiens
  misc_feature (539)..(539): "n" may be a, t, c, g, other or unknown
  misc_feature (552)..(552): "n" may be a, t, c, g, other or unknown
  misc_feature (557)..(557): "n" may be a, t, c, g, other or unknown
  misc_feature (561)..(561): "n" may be a, t, c, g, other or unknown
  misc_feature (566)..(566): "n" may be a, t, c, g, other or unknown
  misc_feature (581)..(581): "n" may be a, t, c, g, other or unknown
  misc_feature (587)..(587): "n" may be a, t, c, g, other or unknown
gcttaggctaaaaaagtttataaaaagcttcaccttgattccattatgacttcttattattcagtttcccgcctgtacctactcattatgaactacagtactggtgtcacttatacgttatcatatttcttcatatctttgcagcactgcagatgacaatctacaaagaacaagttacacagcaaaatatcagtccataaaatgaagtccttccttatttaggttagctcagtgattaaggatcttcttccatatcatctggattaggagccataatgaagtgccttgggtatacaaggttatgtgtgtatgcatgtatttcccagcgagcatcatcactttcatgtgtaatgtaacgttctccaatgcgagtttcaaattctctaaggtcaagccaagtctgatagtcctgtagccagggatgactaagagatttgtcaacactgtaacgttttctcatcttcacttgaagcagattggttatcagaacaattgcttcaccagaaattctctccatggatttggggggacataaagcngcattttggattnggcanttanacttnatcccattaaaaggnaagggncc

SEQ ID NO: 8028 - DNA, 570 bp, Homo sapiens
  misc_feature (306)..(306): "n" may be a, t, c, g, other or unknown
  misc_feature (509)..(510): "n" may be a, t, c, g, other or unknown
  misc_feature (518)..(518): "n" may be a, t, c, g, other or unknown
  misc_feature (538)..(538): "n" may be a, t, c, g, other or unknown
  misc_feature (548)..(548): "n" may be a, t, c, g, other or unknown
  misc_feature (555)..(555): "n" may be a, t, c, g, other or unknown
  misc_feature (557)..(557): "n" may be a, t, c, g, other or unknown
actggttcaaacatttgcttttattgcgttatatacattctgcagctgtagaatcagaatctgggggaagccaactgagaccccgaaggcccagcaggagtccatctgaggtacagaacctgtgcttctgccatgttcctggggcaggggcattccatttccccctgatgctttctcttcctgaagagaagtccaacagactgccagcccaggtctgaaatgcagggtgggactcctgaacacagtcggggggatggggcagaggcaaacagccctcctgtttcacctgcagacagggtgggccanagtgctatggagcagactgggttgtggaagcctcgtgtgctgaggaatcagtccctgcacacaggagcctgtgcgggggccagcacgcatcgcagcctgcagtacaagcctgtgcttttccatgccttccggtgccaacaccccgcacggtgccacaccaactgttccaactaacatgctcaagtggcacaaggcacaagcannaaacgttnttccaacccaacctgggcanaaaaaaggcnagcccangngaaccaaagtcct

SEQ ID NO: 8029 - DNA, 531 bp, Homo sapiens
  misc_feature (31)..(31): "n" may be a, t, c, g, other or unknown
  misc_feature (34)..(34): "n" may be a, t, c, g, other or unknown
  misc_feature (158)..(158): "n" may be a, t, c, g, other or unknown
  misc_feature (174)..(174): "n" may be a, t, c, g, other or unknown
  misc_feature (240)..(240): "n" may be a, t, c, g, other or unknown
  misc_feature (248)..(248): "n" may be a, t, c, g, other or unknown
  misc_feature (380)..(380): "n" may be a, t, c, g, other or unknown
  misc_feature (398)..(398): "n" may be a, t, c, g, other or unknown
  misc_feature (413)..(413): "n" may be a, t, c, g, other or unknown
  misc_feature (450)..(450): "n" may be a, t, c, g, other or unknown
  misc_feature (463)..(464): "n" may be a, t, c, g, other or unknown
  misc_feature (470)..(470): "n" may be a, t, c, g, other or unknown
  misc_feature (485)..(485): "n" may be a, t, c, g, other or unknown
  misc_feature (508)..(508): "n" may be a, t, c, g, other or unknown
  misc_feature (522)..(522): "n" may be a, t, c, g, other or unknown
catgagaattattacttatattttacatttnggnctaatatttttttctgacaggtatcaatgaaagcagaagaaaatccactccaatacttagttttcaagacacgatcctaaatatttaaaccccttgtagctggcctataatatatatatattanatgttatatacagtanacttaccaagtcaatagtttaagcaatcaagccacttcactgttcagtttctttacatcatgaaangaatactnggtattaacctctcaaatttcaagaaaatgtagaataactacagatgtatataattagcatttaactgtccacaaatactttaggaaatcctatcatagggtttcctctatataaaactgggaaaaaaccangaattaagtccttttggngaatatacaaggcantgtttagttcatttggcctggaaaatatatattaganggtatatcccggnngacttnccaggtcaatggttnaggcaatcaagccccttcactgntcaggttctttacntcttgaaaa

SEQ ID NO: 8030 - DNA, 465 bp, Homo sapiens
  misc_feature (135)..(135): "n" may be a, t, c, g, other or unknown
  misc_feature (177)..(177): "n" may be a, t, c, g, other or unknown
  misc_feature (206)..(206): "n" may be a, t, c, g, other or unknown
  misc_feature (250)..(250): "n" may be a, t, c, g, other or unknown
  misc_feature (300)..(300): "n" may be a, t, c, g, other or unknown
  misc_feature (352)..(352): "n" may be a, t, c, g, other or unknown
  misc_feature (400)..(400): "n" may be a, t, c, g, other or unknown
  misc_feature (411)..(411): "n" may be a, t, c, g, other or unknown
  misc_feature (415)..(415): "n" may be a, t, c, g, other or unknown
  misc_feature (421)..(421): "n" may be a, t, c, g, other or unknown
  misc_feature (426)..(426): "n" may be a, t, c, g, other or unknown
  misc_feature (448)..(448): "n" may be a, t, c, g, other or unknown
  misc_feature (456)..(456): "n" may be a, t, c, g, other or unknown
cagagtgaaacaggagtgctttatggtctgagtggagtgtttgggaggagtgcctcccggctcctgccttcgggctcacctgagcgggggcgcagctgaggccactgtgggaaacacaacccccactcccagganaggcctcacatgctgccttcggtctcgccagccttctaacgnggggcctgggccgccctttagggtgagtntgcacacccgtgttcagggctcccggccggaagcggaaccatangcatgctgcggccccagatgagcgcggagggcaagcaggtgccggggcancgcacaccccacagccaagcggtccctgcccagcctttgtaaacagaccctnacaggtccctcctgggcctcagtcacatccctgagaaacactggcggntctgccccganaggnccaggngtgtncaccgaacctggctgaaccagntgcccttncttcttgca

SEQ ID NO: 8031 - DNA, 575 bp, Homo sapiens
  misc_feature (24)..(24): "n" may be a, t, c, g, other or unknown
  misc_feature (501)..(501): "n" may be a, t, c, g, other or unknown
  misc_feature (506)..(506): "n" may be a, t, c, g, other or unknown
  misc_feature (542)..(542): "n" may be a, t, c, g, other or unknown
  misc_feature (550)..(550): "n" may be a, t, c, g, other or unknown
  misc_feature (558)..(558): "n" may be a, t, c, g, other or unknown
  misc_feature (563)..(563): "n" may be a, t, c, g, other or unknown
  misc_feature (569)..(569): "n" may be a, t, c, g, other or unknown
aggagatatttaaccttttattgncctttagagcacatctcaatttggactaaccatatttcaaatgctcaacagctacatatgggtagtggctactgcactggacatcgaagttctagaactctctcttacaaatgaacactatcactgtcgttgaaaactttcttgagatagtttattttatacaaacaaactgtatttcttattattcctgaaatatctcatattggcatcctgccatttcattgtagtgcctatcatttttccattgatactgataaagttgcctaagacacaacttcctacatagaggaaataagaggaacaaaccccttttggacagaatctattaaaactcattccactatccctatgtacataaataacattgcctctgctgagtggaatttgcattcgttacttcaaaattcagactcatctacctttccaagttagacagttggggaaagaacttcctaaatcttaagggtgaaggcaganggctnaccccacttcagatcaggcaaggggaataggaaagnaaagtgcnagataganctggnggcctnttgggg

SEQ ID NO: 8032 - DNA, 566 bp, Homo sapiens
  misc_feature (407)..(407): "n" may be a, t, c, g, other or unknown
  misc_feature (444)..(444): "n" may be a, t, c, g, other or unknown
  misc_feature (486)..(486): "n" may be a, t, c, g, other or unknown
  misc_feature (522)..(522): "n" may be a, t, c, g, other or unknown
  misc_feature (539)..(539): "n" may be a, t, c, g, other or unknown
  misc_feature (544)..(546): "n" may be a, t, c, g, other or unknown
  misc_feature (549)..(549): "n" may be a, t, c, g, other or unknown
agcatgcaactaaatgtatgtttttattatgaaatgtaatatgccaagattatgtaaaagatacagttctaatttccacaaagttcaccagtaatgggtctcccagcttgccagttaggaagtgctctgggggagccacgtggccaccacccaccccagcacactcagcagcatcgcatgtacacatggcctgagtgagggacaatgagggtaattctttggtagtgaccctcaagacatctctctctgtgcacttgtgttcccctgagctcagagaagacctaactccatgatttgatgtgcatgatgagactcaaacaagggctttgtatagattttttaaaaagggtgggttgggggggagcggaaaaaacctataaatatgcctatattcaaacattaactgntttacttaatatcaaatcacttcagtacaaatgtcanaagagaagtattatttgcatctaattaacctaaagacacagngacacgggatatactatacttccagaaaaatcccantatctaccttcaaaggngactnnnaanaaagaccaagggatttt

SEQ ID NO: 8033 - DNA, 574 bp, Homo sapiens
  misc_feature (478)..(478): "n" may be a, t, c, g, other or unknown
  misc_feature (507)..(507): "n" may be a, t, c, g, other or unknown
  misc_feature (535)..(535): "n" may be a, t, c, g, other or unknown
  misc_feature (543)..(543): "n" may be a, t, c, g, other or unknown
acatggataagtgtattataaatttcagtgaaataaagcatctgcagtgtacagtttacaaatatagtatacagtactcatttttgtaaattgtatatgaccaattgattctcgcagaaaacatcggctcatttctggaaaactcgtatctgcagggagactgtagctgtatttgaccagggagggtaggcccgacacagatgctagtgaatgttcttatttgcattaatgagtaagacaaaaccaaaacgacaaagcagtcagtgtgatctcgtttgtcagtgacttctctgctgaactgagtaattgtttttaaatgccagaagagttcttcaatttttttgctgttcacagtgcaatggcttcaacacttttaagtctaatctgcattattaacaccttctccatcagtctgagttaaaggccagctctgggtttgtagcacttgctgccgtctgcagcgtcaatgcatcaccgngagcccacttcaagctttcaccttggcanggctgacaggaacacccggcgtgggacncctaaacnggagacgcttctggggaccgtccagcttgtt

SEQ ID NO: 8034 - DNA, 538 bp, Homo sapiens
  misc_feature (505)..(505): "n" may be a, t, c, g, other or unknown
  misc_feature (509)..(509): "n" may be a, t, c, g, other or unknown
  misc_feature (517)..(518): "n" may be a, t, c, g, other or unknown
  misc_feature (530)..(530): "n" may be a, t, c, g, other or unknown
  misc_feature (536)..(537): "n" may be a, t, c, g, other or unknown
ggaacattagccatgattattttaatattctcacagctttgcaattttgagaatatactagcattatataagaaggaagaggagaaggaggaataagagggaaaggaggagaaagagaagttggtaaacagaggcctagttaagaattccttgccctagtggtgaacaaggactaaacacagacaatgggtgaaacacagacgctaattcacataacagagagtaggcaaccttaagaatgaattgatgcagactcctatagaattcctctgttatgactgggttcttattttctcctccttgtatgtagttggaatttcatcattatgaatagttccttggatctttttttaaagttgtgaatgcaagtgtttggctttgtaatacaactttttagtatccagaagataaccagtgctctaccaataaagatcttttgatcaaagggttttacttctgccagtcttactcattttttcaggtttttatactttcttaaaccacncctnccttatgnnaaatttaagaantaatgnnc

SEQ ID NO: 8035 - DNA, 577 bp, Homo sapiens
  misc_feature (464)..(464): "n" may be a, t, c, g, other or unknown
  misc_feature (481)..(481): "n" may be a, t, c, g, other or unknown
  misc_feature (519)..(520): "n" may be a, t, c, g, other or unknown
  misc_feature (554)..(554): "n" may be a, t, c, g, other or unknown
  misc_feature (563)..(563): "n" may be a, t, c, g, other or unknown
  misc_feature (566)..(566): "n" may be a, t, c, g, other or unknown
agtttacaaaatgaattactgtcacttttaaacattgtgaaacaagaaatggatgtgcacaactcgacacttttctagcattcttgaactaattcacaaatgcaagaaaataaaagaaaaatgagggaaatgatgaatgtaggtagtctggtgttaaaaactaatgcaggaatgatgcgcattgtcacagaaagaagaggggaaattccccatcctgttttgcgtgctatgagggtcatttttaaaatttttattataaacactattaaattcagaccgcttttttggttttttttttctttatctgaatatacaagaacattcattatcaaatgttcatcatcaatactacaaagaacgagacacaagtcgcaagaaacaatggaaaatgttaataaagctgaaagaatccgttgagtatttttttggttcttttaaaggttttttttaaatttgagttctgnaagttcatctttttggnatcgaagcaggttttctggggcagaaaaaccaagagcnnggaaagagagagcccgagaggaaagatgtgtganaaaggccanccnccaattaagga

SEQ ID NO: 8036 - DNA, 555 bp, Homo sapiens
  misc_feature (18)..(18): "n" may be a, t, c, g, other or unknown
  misc_feature (40)..(40): "n" may be a, t, c, g, other or unknown
  misc_feature (167)..(167): "n" may be a, t, c, g, other or unknown
  misc_feature (218)..(218): "n" may be a, t, c, g, other or unknown
  misc_feature (395)..(395): "n" may be a, t, c, g, other or unknown
  misc_feature (421)..(421): "n" may be a, t, c, g, other or unknown
  misc_feature (441)..(441): "n" may be a, t, c, g, other or unknown
  misc_feature (496)..(496): "n" may be a, t, c, g, other or unknown
  misc_feature (500)..(500): "n" may be a, t, c, g, other or unknown
  misc_feature (512)..(512): "n" may be a, t, c, g, other or unknown
  misc_feature (518)..(518): "n" may be a, t, c, g, other or unknown
gagacagagtcttgctgngtcacccaggctggagtgcagnggcgcgatctcagctcactgcaacctccgcgtcccggggtcacgccattctcctgcctcagcctcccaagtagctgggactacagacgccgccaccacgcccagctaattttttgtatttttagtanagacggggtttcaccatgttagccaggatgatctcgatctcccgacctcgngattcgcccacctcggcctcccaaagtgctgggattacagatgtgagccaccgcgcccggccagatttccttttatacctcagtctacaaggggaggggggagcctagctgaagcaattttacagaagcagaacaggcaaaaagttaaaaagataaatgggtacagaaacagttacngaaaaaatgaacagttccaggtgcangggcttaaactatcccaagngataaacccaggggctttgagcgcattccaggagctgctggtccagcttggctantatntatcagtaaggnattccngaagggcttggagtcaacttggctgggtatgccttaa

SEQ ID NO: 8037 - DNA, 567 bp, Homo sapiens
  misc_feature (483)..(483): "n" may be a, t, c, g, other or unknown
  misc_feature (511)..(511): "n" may be a, t, c, g, other or unknown
  misc_feature (521)..(521): "n" may be a, t, c, g, other or unknown
  misc_feature (532)..(532): "n" may be a, t, c, g, other or unknown
  misc_feature (548)..(548): "n" may be a, t, c, g, other or unknown
  misc_feature (551)..(551): "n" may be a, t, c, g, other or unknown
ctttgtgtaccggttttatcaaaagttgagagaaaacttcaacaggtgaatatgcataggtctatttaaaccttaccctttaaattaggtagttctccaagactacatgctattgtggttctcaatctttgttccactggagaaaacttaattagtggtgaaagagaccgttttctttcaccgatggacgtgcgtaaagatggctttatatgctcagtatgcaaatcacaggtgtccaaaaagttaagcgtatcatctgtttgtacattttggggagtagggctcaattctggtttgtgtctttcgggtgtttgggaattcgagaggtaagattcttcccttttcttggaaagagatttcttcagagcctcgtatctactgcgaagagcctgtaaattaaagtctgattctggagtaagtctgctccctcccacaacatcttctagaagagtgccaccatgcataggactatttggcttcagnttaaaaatggcccctgactactggactnttaaacttanatgaccacttntttccggaaaagtttnggnaatatgcccaaatctt

SEQ ID NO: 8038 - DNA, 581 bp, Homo sapiens
  misc_feature (486)..(486): "n" may be a, t, c, g, other or unknown
  misc_feature (522)..(522): "n" may be a, t, c, g, other or unknown
  misc_feature (546)..(546): "n" may be a, t, c, g, other or unknown
  misc_feature (560)..(560): "n" may be a, t, c, g, other or unknown
  misc_feature (570)..(570): "n" may be a, t, c, g, other or unknown
  misc_feature (577)..(577): "n" may be a, t, c, g, other or unknown
  misc_feature (579)..(579): "n" may be a, t, c, g, other or unknown
atgtcactgacaaagaacttttatttctttttaatgacattaaacacaactgctacaagggaaaaaacatgataaagaggaggcaccaaacttcagtttcataattgaaactgacaacgccagtaaatcagggcctgcattcgaaactacaggttatttcaggctccttacttgtaagtaaacaatgtaaacagcatatttttactctgctttgtcaagacccccatggtgggaatgtcgtcatggatgaagaaagcagttaaatgcacctaacacttgcttaaaaaataatacagcaagaattccaactgcaatattagacttagaggccaataccaaatatgagagatatgcagctttgaaaagagatgaaaactccagattctacccagtaccatctttaaggcgaacatgccagataatgagttttccttggctttggtttttcttcttaaagaatccatgttaaccactagagaacagctnttttcttccccagtcccacagatttaaataaactgnttaaacttttggaaaaacccgaantatttgagcctaanaaggaaatgnggaatgncnca

SEQ ID NO: 8039 - DNA, 577 bp, Homo sapiens
  misc_feature (446)..(446): "n" may be a, t, c, g, other or unknown
  misc_feature (496)..(496): "n" may be a, t, c, g, other or unknown
  misc_feature (514)..(514): "n" may be a, t, c, g, other or unknown
  misc_feature (526)..(526): "n" may be a, t, c, g, other or unknown
  misc_feature (530)..(530): "n" may be a, t, c, g, other or unknown
  misc_feature (536)..(536): "n" may be a, t, c, g, other or unknown
agttgtctttatttaaaaaatgaaacacattagttacaaaaaccgttgctccaaatagataccgtgtatcttacaaatgttttttgcttggttttgagtgtttactgtagaaattttcaatatcataaataaatgattatttctttctcagaaagctgatttttgtagtgtagtatttacaaataccgtaagtgaaaaatgatagtttataaatttgtaccatttaggaaaaaatgttttatgtagtgttgtttgtgtaacagcaaataaaaccatttgagattatagtttttacaagggtggtaaaacctttaaaacagcataatgtgcatcgtatgcctttctgacattagcatgcaaaaacaaagctatttgttaaaatagacttatttttgctccaactaagtaaacatgtaaaattatttttaataagctcaatagcttanaaggcatcttggttaaaatgaaaattatttaaaacaatatctagcactgnacccaaagcttacagacnactgcaatggcnctgngcctanttcaaccaaattttaaaaatggaaaccttccaagtggagaa

SEQ ID NO: 8040 - DNA, 543 bp, Homo sapiens
  misc_feature (445)..(445): "n" may be a, t, c, g, other or unknown
  misc_feature (477)..(477): "n" may be a, t, c, g, other or unknown
  misc_feature (487)..(487): "n" may be a, t, c, g, other or unknown
  misc_feature (490)..(490): "n" may be a, t, c, g, other or unknown
  misc_feature (500)..(500): "n" may be a, t, c, g, other or unknown
  misc_feature (534)..(534): "n" may be a, t, c, g, other or unknown
  misc_feature (542)..(542): "n" may be a, t, c, g, other or unknown
gtttgtttttgttttttagcatccagaatacagggtacttgaaatcatttctgtaatatgcttcccaaacaggttttggaaggtagtctaggagctgtaatcacttattgctgtgtgtcttcaggcagtgttctctgtcagaggctcggagaaggttctcttgcttcttgtagctttgtgaggatccacctggcatcctctggggtcttgaagttaattatttttccaaactctctggcatgaaatacagacttcactcgttcctttgcttcaatgcgcaatcttctcccatgaacaatgaatggctctttggtaaattcatcaaaactatactgccactcacacgtgagttgtccaaatgttccctttgttacaaacaatacaccacgtctggttatcattagcatatctgtcttattgatcatgacatgggtaaaatatttgnattttgcaaatcttccattttccatgacctgnaacatttganttncaagcccatnccttaacctgtaccggctgatactccatcttcantgaagaanc

SEQ ID NO: 8041 - DNA, 574 bp, Homo sapiens
  misc_feature (504)..(504): "n" may be a, t, c, g, other or unknown
  misc_feature (512)..(512): "n" may be a, t, c, g, other or unknown
  misc_feature (532)..(532): "n" may be a, t, c, g, other or unknown
  misc_feature (536)..(536): "n" may be a, t, c, g, other or unknown
  misc_feature (549)..(549): "n" may be a, t, c, g, other or unknown
gcatgaactttaggaaatcattttggtcggttttatacaatgtgtaagttaatgtctggaaagatgttttgaacaggatgcaggaattagaaggcacagaaatggtaatataaaaatttagatcatatatgaattttttctaaatgttcaagctaattgctttcattagtcatcctgaactgctgcaggtttcatttcccaccaggacagctgtgccttttaaagtaaaaatagtcatttgtattaactataaggaaaaagtggcttcagctggaagaacttaccaaccgaaacactcttgagcttatagaaataactttggtaagtggcctctcttaaaaaggctgctgaaagctctaaaatataaggataaaacatacggtttcagactgtacactttgctgctacaaactacatcttgatgggattaagaggctacattgattcttgggtttattgcaccaccatccctctctgacctacccatggctgcatctgaaacanggaaactnccagaagaaatgaaaacagngggncctaaagcacttnttccaacagccattcttacatggtt

SEQ ID NO: 8042 - DNA, 576 bp, Homo sapiens
  misc_feature (437)..(437): "n" may be a, t, c, g, other or unknown
  misc_feature (465)..(465): "n" may be a, t, c, g, other or unknown
  misc_feature (495)..(495): "n" may be a, t, c, g, other or unknown
  misc_feature (502)..(502): "n" may be a, t, c, g, other or unknown
  misc_feature (557)..(557): "n" may be a, t, c, g, other or unknown
  misc_feature (567)..(567): "n" may be a, t, c, g, other or unknown
  misc_feature (575)..(575): "n" may be a, t, c, g, other or unknown
attttttaaaggtcacctttacaaagtagcatttaaaaataaatccatctcacagctcaaagaaatttctgacagtactgccctcatgctggtcagccattatttactgtgtgtctgccacatgtcggcacatatatatagctcttcctctcctttcctgggagcaaacccttagcgtttcttccacgtaaactttctgcgggctccctcttggcctggcttcttccgttccctcacacgtggatcagtagtaagtagtccagcttgtctcatccactcgacctcgtcctcggtgacaaagctgcacaaggcttttgccattgccagtcgtattgctccagcctgcgctgacctcccgccccctgagactgtgcaggtcacgtcgtgctttcccagccggtcaacaaagtggaaagggaacatcagctggtctctgncctgtggtgatcgggaagtaaagctggnaatcattaaatgaatagtatgactggttgncagtatngaagaaaatagtgaaatggaccgggcatttttttcccactggaatggtcttggcnttggaaaaanctggtcang

SEQ ID NO: 8043 - DNA, 569 bp, Homo sapiens
  misc_feature (459)..(459): "n" may be a, t, c, g, other or unknown
  misc_feature (506)..(506): "n" may be a, t, c, g, other or unknown
  misc_feature (535)..(535): "n" may be a, t, c, g, other or unknown
aaactgatgaactttattggagttaaaactataacaaagttcatcctaaaacactttgcaatgcaaaattatttcactcaaggagtgtttaataatttgaaggctaggaattacaagcaattttcaaaagcagaaactcacattcataaaactttatacatcatttgaactaaaatacatttatactactaaaatcaaacatgcatcaccttcaaacattcttatatcatgatttttatatattacattatttaacaccattcctcatcactacatggattttatcatacactggcaccattctccttggatttttgatctttgtcttcattctttacattatccttcttgagaacagtgtggatttcatccattaccgtagataagtttctgattgtcttattcatttggttttcaaattgtaaactcatgttttctgaaatctttaagttttcttgnaactgactaagggcctttttaacttctctgagttccccagaagagcntttgttggaaatctccaatttaatatggnttttcatcttcatccggtttttcttctaagaacc

SEQ ID NO: 8044 - DNA, 565 bp, Homo sapiens
  misc_feature (492)..(492): "n" may be a, t, c, g, other or unknown
  misc_feature (497)..(497): "n" may be a, t, c, g, other or unknown
  misc_feature (526)..(526): "n" may be a, t, c, g, other or unknown
  misc_feature (534)..(534): "n" may be a, t, c, g, other or unknown
gcgtgtatgcactgtaaagactcttttattgagcctacttcaggtactggtatgaaaaacaaaggtgttaaaaagccagtgttcattgatgttatccaaatgatcaaaataatgtatgcaggaaaagcatatgaattagtcctgtactgagaatcatatatttcaaaaaaattaagattagtaacctaatttttagtgacaatagattcatgtactatgcaatagaaccaattgaatgtcactggtggtagtcttactcctacaagaacatactcaaaggcaaatgccttatatccacagattcaaattgaaatttcttatatttgaattttctcttctccaaatgcttgtatcagtaagtgccagatcaaggcaatccttgtatatatcccaaaactgtatctataattcaatgccatccttttctccttcatctcctaccaaattagggggtagagtcaactttttttttttgagaatggaggcttactntgtcnccatctggaatcaggggcacaatcttggntactgganctggacttccaggtcaagcattttaagcttg

SEQ ID NO: 8045 - DNA, 574 bp, Homo sapiens
  misc_feature (508)..(508): "n" may be a, t, c, g, other or unknown
  misc_feature (574)..(574): "n" may be a, t, c, g, other or unknown
ggatttgaattatctgactttatttagcatgcaatgcaatttattctggcaataaattaatatgtgcagttataaaaagtgttgggtactttttccaagaaaaatgtttctgaatgtgcacactagaatatatgcagaatcctttaaacagtcgacttcatattttaaacttgtaagtgtggtaacatcaagttttggaagaatggactttttctgtaattcatgatttagtttgagtttataaaggttttaattgcaatttcagttcctacaagctaccaagcctgaaattagagaactgacagctgagaaaggcaatcacctgatcgagtctcctaattgtacagctgaagaatccaatggccttgccaaagattacgaagctaaagagacatagcctggattacaagtcagtttttataggtgctccaggaatgtcttgagctaaataaggcacacgtatcacacagaactttagtcgtatcttcaaaagtccagtttactctgntttctctttaatttttaagcatgaaggcttgcctgttacacagcttgaaccccatgggggtaacan

SEQ ID NO: 8046 - DNA, 578 bp, Homo sapiens
  misc_feature (465)..(465): "n" may be a, t, c, g, other or unknown
  misc_feature (505)..(505): "n" may be a, t, c, g, other or unknown
  misc_feature (530)..(530): "n" may be a, t, c, g, other or unknown
  misc_feature (549)..(549): "n" may be a, t, c, g, other or unknown
  misc_feature (561)..(561): "n" may be a, t, c, g, other or unknown
  misc_feature (565)..(565): "n" may be a, t, c, g, other or unknown
  misc_feature (572)..(572): "n" may be a, t, c, g, other or unknown
cagtccaacacactttattcatttttaacttttttcttaattttcaataatcaagtattcaagatgctgtaaaccaagattagtacatcgacaacagatttcattaaacacacggaaattatacatcttttaaattaccttaaaaagtctccaaatgaatatcattttaaaaatcacaaaatcaaacttctttatgcaacagtgcaaaacctttcatcacaaacatacctctacacaaaacacacacacacacacacaaacacacactccactaagaacctaatgccagtttagttgacacagtattacatttccttaaacaaaagagtcagagcctgacctgcctgtttcaggattctaaattaacatttggggtttggggtagaggtatgtattttaagaaaaatgcccactatttggtactactcttaccaattatcaattaccaattggccaataatcggnactagtcttaccaatgattcttatttttcattctagaatncaaactttaaacctcttttggtcanccctttgggttaaaggggncctggaattacnttangttcaanaatatt

SEQ ID NO: 8047 - DNA, 558 bp, Homo sapiens
  misc_feature (187)..(187): "n" may be a, t, c, g, other or unknown
  misc_feature (435)..(435): "n" may be a, t, c, g, other or unknown
  misc_feature (462)..(462): "n" may be a, t, c, g, other or unknown
  misc_feature (464)..(464): "n" may be a, t, c, g, other or unknown
  misc_feature (507)..(507): "n" may be a, t, c, g, other or unknown
  misc_feature (530)..(530): "n" may be a, t, c, g, other or unknown
  misc_feature (533)..(533): "n" may be a, t, c, g, other or unknown
  misc_feature (537)..(537): "n" may be a, t, c, g, other or unknown
  misc_feature (541)..(541): "n" may be a, t, c, g, other or unknown
cagtacaattcattttattattttagtgcaacaaaacatttccagatttatttccaatttcagtttcaaaacaaactgacctgaaatttttagtatttactatctgtgacaatgaccaataaaatgtgtaagaatataaaaaataaattcattcattgttggtagtactccaaattcaatgcataanaaccttttctatctaaagcattttcctaaaactgcaaactaaaaatctgatatttaaaacatttatgtggtaaaataatctcatttgattatggatatcataaatagaatataaaagatattacatttcttcaaataccatttgtttcactgtgttcaattttgagtttcctaacatccattctacaggtcaatcaaaatacaaaggcgtgcaaatgaaacaagctattgaaatgaaataaaattcangaataaaagttagaattaacttatgangnaacttttatgtaagccaacatcccagtgtaagaaatgcctctntttacaaaaagcattaagaagcncantttnctanaactattatttcatggg

SEQ ID NO: 8048 - DNA, 598 bp, Homo sapiens
  misc_feature (482)..(482): "n" may be a, t, c, g, other or unknown
  misc_feature (492)..(492): "n" may be a, t, c, g, other or unknown
  misc_feature (537)..(537): "n" may be a, t, c, g, other or unknown
  misc_feature (577)..(577): "n" may be a, t, c, g, other or unknown
  misc_feature (587)..(587): "n" may be a, t, c, g, other or unknown
  misc_feature (591)..(591): "n" may be a, t, c, g, other or unknown
aaacactggaagcaaatgattatcaaaatgagactgcaacttaaggcattttaaaagaaaaaataattaggtgccatatagcattttatttcaaaagtatattttgtcccacttttctcactagcaagagtaaaacacaaaccttttttcataaatatgactacagtaatcataacacaaaaaagggttgataggcattgcttagatatttaaaacaagggtaatactttcccactcacctaaaagaaaaaacctttttgattaccagtttataaacatcggatttgctatgttaaaaagtccagcagaattttaattcagcaacactggagaatgaatatatatatacaggcatacatgtgtatgtatatattcattttatatatagtcaatgtatttattaggcattcccccacaaaagtaatttatatttaattgccatttttaataaacacttatgttcacagatcatccatctggcntatatgaaantaggcaatatcaaatgtcctggtatgggctccgcttcttcggaancatccctggaagttccagacttcctatggggcctgaaaanttcttggcanggtnataaatc

SEQ ID NO: 8049 - DNA, 604 bp, Homo sapiens
  misc_feature (478)..(478): "n" may be a, t, c, g, other or unknown
  misc_feature (499)..(499): "n" may be a, t, c, g, other or unknown
  misc_feature (578)..(578): "n" may be a, t, c, g, other or unknown
  misc_feature (581)..(581): "n" may be a, t, c, g, other or unknown
  misc_feature (590)..(590): "n" may be a, t, c, g, other or unknown
  misc_feature (598)..(598): "n" may be a, t, c, g, other or unknown
  misc_feature (600)..(600): "n" may be a, t, c, g, other or unknown
agaaaaaacaagatttgtattttatttccttgtaaaaatctttacacatgcagacaaaccagtgttaagaaagtattcaccatcatttaaacaaataaccacttaaatagaacagtgtctgcaattttatctgtataaaaataagatacatttttacagaattcacgctccagttcttatagcaataaacaatacacaactataataaagtacaattgaacctgaccatggtttttaattagatactgctagggcattttaatgtgcaaaaaaattaacatagttcttttcaaaagaaactgtcctcagtgttctagagacctagagggtttcaagaaatcaaatcctaatcagtttgcgtttaatgtttttgattgagtccatacatcacactgtagataggcaaaaccaagaactgatgcaggctcaaaggaagagaaagtcagcgcctgtgcctgccatggtcctgagcgactgncccatggtgcttgcttttatngggacctcttcaaaggaccgaagaacggttcacgccctggtccctatgatggccccttttatgcctgggggttcttggntgnatctgagtngatcccananttgg

SEQ ID NO: 8050 - DNA, 571 bp, Homo sapiens
  misc_feature (514)..(514): "n" may be a, t, c, g, other or unknown
  misc_feature (543)..(543): "n" may be a, t, c, g, other or unknown
  misc_feature (549)..(549): "n" may be a, t, c, g, other or unknown
  misc_feature (566)..(566): "n" may be a, t, c, g, other or unknown
  misc_feature (568)..(568): "n" may be a, t, c, g, other or unknown
ctttcccaaccaggttgtcctggctcgagaactggcaacctccagagaatatgcgagtgagtatgggctgcagggagctgtgcgtccgggagcagggcaagcggctccgtgcagggcggctggggtggcagggccggtgtttctgtgctgatttcagggtacaggacactgttggctttagagaccaccaggctgttgtgtacaatgtttgaaagactttaatttgtaccagttacctttgtgagtcatgtctttagtgttttttgttgtttctgatagtaactcacttctctctcacctgaagttaaaattctggagaagcgacatatcataaaagagaacaaggtcccctatgtaaccagagagcgggatgtcatgtcgcgcctggatcaccccttctttgttaagctttacttcacatttcaggacgacgagaagctgtgtatcctttgcgtggttggtgcccgctgaagccacaccagtcaccccttttacttggaatcagaccctgtgngttccacaagcagccccgttccttgccantggggncccttaggccgttacantnagg

SEQ ID NO: 8051 - DNA, 574 bp, Homo sapiens
  misc_feature (429)..(429): "n" may be a, t, c, g, other or unknown
  misc_feature (472)..(472): "n" may be a, t, c, g, other or unknown
  misc_feature (517)..(517): "n" may be a, t, c, g, other or unknown
  misc_feature (564)..(564): "n" may be a, t, c, g, other or unknown
  misc_feature (574)..(574): "n" may be a, t, c, g, other or unknown
aatgaagaaacttgtttaaaattgtaaaggaaaaaatgggaatgggacggcaaaatcttagcagcaaagtggttaaacaaattgaaaatattaatgcacaaacattaaaatattaaagcatatatgttgcatataaaatacagtacagaaccaggagttgcactatactgattagtgcttaacagaagaaatgattaaatttgttcctcccagaagtatatacacagttcatttccacagcattttcctatatagccagcaagttattttcttcagttattcacaccttgatcaaacctgaattataaacttagcacttacaaatatgaaaattcattcacaaggaaaaacagtatttccatttcaccaataaaaattttgaaagttaacagtctattctaggaaaccaagtttagctgaaaacttcanggatgaagatcatctgttgtagcagcattcaaatatataaacnggtaaaaataagacttaaaactggtggctacagggtcatggtttnggattaattcatccattgattttagtccaaacttgaatacccttttntttataacan

SEQ ID NO: 8052 - DNA, 571 bp, Homo sapiens
  misc_feature (507)..(507): "n" may be a, t, c, g, other or unknown
  misc_feature (511)..(511): "n" may be a, t, c, g, other or unknown
  misc_feature (552)..(552): "n" may be a, t, c, g, other or unknown
  misc_feature (563)..(563): "n" may be a, t, c, g, other or unknown
  misc_feature (566)..(566): "n" may be a, t, c, g, other or unknown
cgtttatgccaacaactttattgagcaccaattagggcaagggactaccaccttcacagttctcttgggcttattaacgtcgtggcccactcatttatttcacaaatgaggaaaccgaggaccctgctgggagagtttggggcccaaccagggctcccactgagtctggggcaccctcagctcctgcaccacaaagcttcggttgacttgtttcaatgtaaagaacgttacttaaacaggtctgagtgctaggcaaactcacaagacctagctcaaagtttgagcacattggtatgaaaaaaagaaaaaaggagaatcagcaccttgtgatatttaagcaggggcatttggcattagccaaccaagcccagaaagtcggcaaaattcttagcctgaggcatccccagaacacctgagactagctcctgcagctgagggttaaactcgtgcacctgcacttgcaccacatcctgtctgactcttgctgacagcccgtctctgggttgngaancttctggcaagggttggggggacttcagaacagaccagccnggatcccaggncanaaggg

SEQ ID NO: 8053 - DNA, 537 bp, Homo sapiens
  misc_feature (469)..(469): "n" may be a, t, c, g, other or unknown
  misc_feature (496)..(496): "n" may be a, t, c, g, other or unknown
  misc_feature (498)..(498): "n" may be a, t, c, g, other or unknown
  misc_feature (512)..(512): "n" may be a, t, c, g, other or unknown
  misc_feature (514)..(514): "n" may be a, t, c, g, other or unknown
  misc_feature (524)..(524): "n" may be a, t, c, g, other or unknown
  misc_feature (530)..(530): "n" may be a, t, c, g, other or unknown
gagacggagtcctgctttgtcacccaggctggagtgcaatggtgcagtctcaactcactgcagcctccacctcccaggttcaagctattctcctgcctcagcctcccaagtagctgggactacaggcacacgccaccacgcctggctactttttgtatttttagtagagacggggtttcaccatgttggccaggctggtctcaaacttctgacctcaggtgatccacctgccttggcctcccaatgtgctgggattacaggcgtgagccaccacacccggttgaatctttcaagaggcaggttaacaatcacatttttaaaagggaaccgaaaggaaaactgaaagacctaagtcaaacaagccctgatactgtccattggaacccgagcgggacacagcacgagggaaatgcagaaagagtaccgatgagtgtgcacactggagaatcctttctcttcaatccactgngcaagtaagtatacttggataaatatncntagacctgccaaantnaatatcctgnaaatanacatagc

SEQ ID NO: 8054 - DNA, 573 bp, Homo sapiens
  misc_feature (443)..(443): "n" may be a, t, c, g, other or unknown
  misc_feature (478)..(478): "n" may be a, t, c, g, other or unknown
  misc_feature (493)..(493): "n" may be a, t, c, g, other or unknown
  misc_feature (552)..(552): "n" may be a, t, c, g, other or unknown
  misc_feature (560)..(560): "n" may be a, t, c, g, other or unknown
  misc_feature (573)..(573): "n" may be a, t, c, g, other or unknown
catgtcatcatgaatttattttcaggcaatatgataatctattaacactcagcatactctgaacttacagaataagtaccacgccatacttcctcattaatgactatcattttacatgagcttcttccacaatcacaatgagagaacagattgctacatgtttgctggtaaatgcattcagtaaggcactcaaatcctagacacgaactaaccacagaacgctcttccctgctttaataaattgaaacatgatctcatttccttcattttcaatactttttatagaaagacacgcttgtcttgaacttgtctaaacataggtttatataaactaatccattatcattatagttataatcaaggaaatgatttcacattgacggttttttaggtagggataagcgaaagcactgcagcagtttctgagggaatgtcttctctgnggttccccatacttagtacaatgcctggaatgtancagggactaaattcngtggacaaatgggcaaacctttaattccagggatctggtcaaattggcttgactggganaacatttntcaagaaaaaagn

SEQ ID NO: 8055 - DNA, 567 bp, Homo sapiens
  misc_feature (486)..(486): "n" may be a, t, c, g, other or unknown
  misc_feature (504)..(504): "n" may be a, t, c, g, other or unknown
  misc_feature (523)..(523): "n" may be a, t, c, g, other or unknown
  misc_feature (547)..(547): "n" may be a, t, c, g, other or unknown
  misc_feature (565)..(565): "n" may be a, t, c, g, other or unknown
aaacaaatggagaaaagacagaccagccaggatgacttcccacagggaagggatttaagggctgcccccatgaatttcttcaggccacgacagctacttcctcctcttgtatctggatttagatttaaagtttcctcctcgtctctggtggggcaagcccaactgtttcctttcttcaaaggaagggccagctcgatactgtttcagggccttcttgcttgtgttggtgagttcttcatcaaatacagatttcttcccctgcttttgcttcttggcaggacctctcactggctcctcctcgggcattgctcgggcccgcttggctctgcgattcctcttcgctagccgttcagcaaacatctgcgccttgaggatttcaaactgagacctttcctctgctgtcatctcccccttttttttggcatccttcataaacttcttccttttcttctttcctcttaaggccaaagtcaaattcctgcaaanctttggcaaatttctccntcttcctctcttctttggnctggaaccagttctttttgggctnttggaccatggcttcttncc

SEQ ID NO: 8056 - DNA, 557 bp, Homo sapiens
  misc_feature (500)..(500): "n" may be a, t, c, g, other or unknown
  misc_feature (550)..(550): "n" may be a, t, c, g, other or unknown
  misc_feature (552)..(552): "n" may be a, t, c, g, other or unknown
  misc_feature (557)..(557): "n" may be a, t, c, g, other or unknown
gagtcagggtcttgctttgctgcccatgctgaagtgcagtggcgtgatcacagctcactgcagcctcgaactcctaggctcaagcaatcctcctgcttcagtctcccaagtagctgggactacaggcatgagccaccaccatgcctggcccctaatttcagtattgctgtgtctcaaggatagggaggtctgagcagaaggagagagatagggaggcagctggtcagtgcagtggtcagaacacataaaacatttatcgactcagtttgctgtcttatataggggtggttcatggtgccccccaagcaattatgacagtaatatcaaagatcactaatcacagatcactataactgatttaataacggaaacattccaagaattaccaaaatgtgagagagacatgaagtgagcacatactgttagaaagatggtgctgacagacttgctccatgcagggctgcacaaacctcactttgtaagaaacatatgatacctgngaagtgccataagggatcccctgaaaacagtgggcctgtcatgactattncnccctn

SEQ ID NO: 8057 - DNA, 555 bp, Homo sapiens
  misc_feature (41)..(41): "n" may be a, t, c, g, other or unknown
  misc_feature (284)..(284): "n" may be a, t, c, g, other or unknown
  misc_feature (413)..(413): "n" may be a, t, c, g, other or unknown
  misc_feature (449)..(449): "n" may be a, t, c, g, other or unknown
  misc_feature (504)..(504): "n" may be a, t, c, g, other or unknown
  misc_feature (530)..(530): "n" may be a, t, c, g, other or unknown
  misc_feature (532)..(532): "n" may be a, t, c, g, other or unknown
  misc_feature (535)..(535): "n" may be a, t, c, g, other or unknown
  misc_feature (537)..(537): "n" may be a, t, c, g, other or unknown
  misc_feature (551)..(551): "n" may be a, t, c, g, other or unknown
  misc_feature (555)..(555): "n" may be a, t, c, g, other or unknown
acttagtattagcatttgttgaaaaaataaatggccaaagngctttaattttcatttagaatgaaataatctggcttacctttgactaattaaagaaaatatagggtaatacaattgttcaaaatctaacacaaataggagcgtttactatttttgtctgctttaagattttaacttgatcgaaaataccaacatccccaaacaaaatttactgacctgacatcagcttactatagactgaatacactttcaacatcagtccttagctacctcaaataatgacncaaagtcttagtttcttttgcataaggatcaagatcaagctatttttaaaacaatttaaatggtctcaaaacattctccaacttaagtgcaaatttgagtcacataatatttccaaagagtagaactgnttttagattatctttggattctaataaccattttgnccatttttaaataaattaccaaaaataccagtcagggtttttttcttcaaatttnctaaggccttggtatggcaccccatntntcntnacagggcagcttgnaacn

SEQ ID NO: 8058 - DNA, 575 bp, Homo sapiens
  misc_feature (221)..(221): "n" may be a, t, c, g, other or unknown
  misc_feature (473)..(473): "n" may be a, t, c, g, other or unknown
  misc_feature (475)..(475): "n" may be a, t, c, g, other or unknown
  misc_feature (558)..(558): "n" may be a, t, c, g, other or unknown
caaagcttaaattttatttcaaaatggcatattttgggtcaaagtatgaaaaaacaagggcatagttatgtttttgttaaagtgaaaaaaattaggtaaagtttatgtaagtagactgatgacttttgaaaatatatcattaagcatgtacttaagtgtcaaaaacctcaagtcaaatcttacaatgtatttcaaaagcaaagctaaaattcattcactgnggttaaactgcatttcataaaatatctgttgaaataaacctcattaaaacataattatacagatattttaattgtatatatatcaggtacacggaataaaagtcctactctctagaacatgagaagtcaataaatagaaaagatatacaaagtggaatgaacatagaaatgactaagcatgtgatcttcacattcatacagtttttcaactaatcttttacaattaaaaaggtcatttatttgaaactgtanangttgatatatgccatattagtttggaaccttccaaacaactttagtgggggtaattatgtgtggagaagaaaactgggtatgnaactatcatggttcaag

SEQ ID NO: 8059 - DNA, 550 bp, Homo sapiens
  misc_feature (282)..(282): "n" may be a, t, c, g, other or unknown
  misc_feature (473)..(473): "n" may be a, t, c, g, other or unknown
  misc_feature (499)..(500): "n" may be a, t, c, g, other or unknown
  misc_feature (506)..(506): "n" may be a, t, c, g, other or unknown
  misc_feature (525)..(525): "n" may be a, t, c, g, other or unknown
  misc_feature (550)..(550): "n" may be a, t, c, g, other or unknown
cctgggtactgggttgctcagcactggcctctcaagttgctaactttttgaaatcctgaggtatagaattcttcgttctattcctggtctagctggtataactcagcccatgcaaactgtcctggcccttcagtcttttcatgctccataactttcacaagatgctgtacacctgctacagacattggtctctaaggagttattctctagtgaatctctttctcccactcaactccatgtggggatatctgacccttctatcagtacaacgataagactcanattgggtcttttgtttgtttgtttgttttgagacagagtctcgctccgtcgcccaggctggagtgcagtggcgcaatctcagctcactgcaagctccgccttccaggttcatgccattctcctgcctcagcctccgagtagctgggactacaggcgctcgcacacgcccagctaatttttggatttttagnggaaatgggggttcaccgggtagccnngatggnctcgatctctgactcgganccgccgctgggctccaaaggctggn

SEQ ID NO: 8060 - DNA, 559 bp, Homo sapiens
  misc_feature (56)..(56): "n" may be a, t, c, g, other or unknown
  misc_feature (499)..(499): "n" may be a, t, c, g, other or unknown
  misc_feature (526)..(526): "n" may be a, t, c, g, other or unknown
  misc_feature (540)..(540): "n" may be a, t, c, g, other or unknown
  misc_feature (557)..(557): "n" may be a, t, c, g, other or unknown
  misc_feature (559)..(559): "n" may be a, t, c, g, other or unknown
aaagttataaaaatattttatttaaatgatacagaaaaaaatgtatacttaaaagngattaaaacttcacattaggaaatgctaaaaacccagtaatgtacataatgataaaatctaaagtgatgagaaaacataaaatattttcatttggtcctgtcacctaacagaactatcataaatatgagattatagtaattactaaagctggttaaaggcacatgacaacataattcctttatactcatccagtcattttatacaaggaactgctatcccttaaatggaagagtgaactacttgtttaaaatattaacagtgcactatgtacctacaatgaaaccactttctccaaagactcaaacagattaacattgcaaaatagtacttctgtatcactgcttctgaaaattttaataatttatgcatatgcaagtgaaatataatttattctgggttcaacaacaggtatacaaaggcacaatttttccccaggaacccntcactttataagtgcaaaacaccctgnagcttttctggtanggcttgcctgcttttancn

SEQ ID NO: 8061 - DNA, 559 bp, Homo sapiens
  misc_feature (446)..(446): "n" may be a, t, c, g, other or unknown
  misc_feature (470)..(470): "n" may be a, t, c, g, other or unknown
  misc_feature (480)..(480): "n" may be a, t, c, g, other or unknown
  misc_feature (510)..(510): "n" may be a, t, c, g, other or unknown
  misc_feature (520)..(520): "n" may be a, t, c, g, other or unknown
  misc_feature (529)..(529): "n" may be a, t, c, g, other or unknown
  misc_feature (539)..(539): "n" may be a, t, c, g, other or unknown
  misc_feature (554)..(554): "n" may be a, t, c, g, other or unknown
cattaaaaaatttattttcatataaaagtgccaaaatatccaccaatgtcataatctatctcaataaccagtttacactagtaatcaaaacacaagcctctttattcacattgtttaaaaatccaattattttcacacattcccacagtaactcgagtctctagacagtgggaaatttgcattcctattcgctgtggtagtccatatgtccaggttcatataggcgcgaaacgggttgaaccccgggtagtattccttgcacacgaccgcttggttttccatgtgggtcgaatgttccgtggtggggttgatggggcagcaattttcatacacatcgctttgcggggcccagatggaaccaaaaagtccagacattggagacaagcttcgggtgcttgtgaggtagggcggaaagctgatgaaactggcatgtccccaggcagcangcatgttgggttggggtgttccangtagactganagttgtgatcaataaaggctgctgaacatntgcaggacanggggaagcnttgggcatantcaagtttctttggnaaggc

SEQ ID NO: 8062 - DNA, 590 bp, Homo sapiens
  misc_feature (533)..(533): "n" may be a, t, c, g, other or unknown
  misc_feature (541)..(541): "n" may be a, t, c, g, other or unknown
  misc_feature (543)..(543): "n" may be a, t, c, g, other or unknown
  misc_feature (552)..(552): "n" may be a, t, c, g, other or unknown
  misc_feature (560)..(560): "n" may be a, t, c, g, other or unknown
  misc_feature (564)..(564): "n" may be a, t, c, g, other or unknown
  misc_feature (574)..(574): "n" may be a, t, c, g, other or unknown
agttttttacaattttattccgtttcatcattctcaaaatatatcccccaaaagtaatctacaaaagagtgcaggctgctccccttaaaggaatggacaagtaatatacactacaaaacaatgtttaagatcatgtataaatgttactctgaatctcatttgttgtcatcaatttctttagtatctcagtgctttggggaatattcttaaccaaacccttcaagcttctggtagaaagtataggcttaaaagcttccactgtgattaggtctaatttcatcacatcagtataacacaagtacagaattgccgggattttccatacttgacagtagcttagaactgctgcaggaaggtcgtgtactatattcggttgttctagcaatggacaacacgccgagtctttgaaattctgtgtttttagggctctcaggaaaggagaaggaaggctgccggtggattctgagggtttataatcggtaacatgtcgacatgtgagaataggtatctgcatggtctttcttgggcaaaancccaaaancntttccagcnctggtacngggngaacttttgnacataacacctggccc

SEQ ID NO: 8063 - DNA, 520 bp, Homo sapiens
  misc_feature (453)..(453): "n" may be a, t, c, g, other or unknown
  misc_feature (484)..(484): "n" may be a, t, c, g, other or unknown
  misc_feature (494)..(494): "n" may be a, t, c, g, other or unknown
  misc_feature (499)..(499): "n" may be a, t, c, g, other or unknown
  misc_feature (509)..(509): "n" may be a, t, c, g, other or unknown
  misc_feature (512)..(512): "n" may be a, t, c, g, other or unknown
  misc_feature (514)..(514): "n" may be a, t, c, g, other or unknown
aatacaaacaacttggggaaggtagataagtgcaatgggagggaggattgaattgaatagtaaaacgtaagcgtatgtgatttcttactttggaagagaggccctttgttataataaaaaaaaaatcgagaaagagaaaacaaataaaaacaacaacaataaaccaaactcctacttccaatgttctctagactgttcaaaatgcctttccctcggtttccatcagtacctgggagggaagaatgggcgttttggtgcaaagaacggagggcccctagcaaaaggtggcctgggtctctttaaactgtgaaatgggtctctgctgagaaaaggttccctaggccgaaagtctggccggggactccgtaagattataccactccggctgatggtgtctctgtgtgaagggacccaagggggggccactgctgctggtgctgcctcccccaactnctccttcatggggtgggcccaagtgttccanaaaatggganggtanggtgaagctnttntngtacac

SEQ ID NO: 8064 - DNA, 600 bp, Homo sapiens
  misc_feature (459)..(459): "n" may be a, t, c, g, other or unknown
  misc_feature (476)..(476): "n" may be a, t, c, g, other or unknown
  misc_feature (531)..(531): "n" may be a, t, c, g, other or unknown
  misc_feature (574)..(574): "n" may be a, t, c, g, other or unknown
  misc_feature (579)..(579): "n" may be a, t, c, g, other or unknown
gaagtaaacaaaatataaaactttattggtttggagtgtgcagtagcaggtgttcctgggagcggcccttacagacttggggtgtggctgggagggcaggtggggctgctcggcagcagtcctgcccctgccagggagttggcatccatctctgcagtgtgaaggtcggtgcggcgctgagagcacacccacggggaatggtgctcagtctagagaaaggcccagggtctgctgctggccctgccacgtcgcttccctttcccgggcctcagtcccgggaacaatgggcacctggactgaacaatgggcacccggagcttctttcaggcttgtcaggatatgtgcaaatgcccacagggcgggcagctgggaggccctccgtgagagcccttagatgatgttggctgaggccaggcgcggtggctcacgcctgtaatcccagcattttgggaagccgangcggccggcaaggtcangcattcaagaacaagctgggccaacacagcgaaagcctgtcttctactaaaaatncaaattaactgggcattggtggcgcacacctttagtcccaagnaactngggaagcttaaggcaggaaaa

SEQ ID NO: 8065 - DNA, 594 bp, Homo sapiens
  misc_feature (484)..(484): "n" may be a, t, c, g, other or unknown
  misc_feature (497)..(497): "n" may be a, t, c, g, other or unknown
  misc_feature (549)..(549): "n" may be a, t, c, g, other or unknown
  misc_feature (555)..(555): "n" may be a, t, c, g, other or unknown
  misc_feature (558)..(558): "n" may be a, t, c, g, other or unknown
  misc_feature (560)..(560): "n" may be a, t, c, g, other or unknown
  misc_feature (581)..(581): "n" may be a, t, c, g, other or unknown
aatgtgtaaacgagtttaatataataagtaaaatttcatcctttccatctcatttcacctcaactccacaatcatgtcccataatgcattcacaaatcaaatacaaatgattttaggactatccatagtgcagcaagcaagcaggtggcatatcaataagtgatacatattactgagtccacgaaatacttgagaatattctccagctctcacctggagttctgggacagaaagcacagattcctcagaagctgatgacatttcatcttcctcatcttgggtgaggtcatcaaagtcctcttcttcctcttcttctggcccattcttctctcctccagtttctggcccaactggagtccccactgactgaccatcaacactggatgaatcttctggcttccctggggggctactaagcctcacttcaggatccattgaggacaaagcattctttgatgatcctttgttcacatctgtccctgangttccttcatcanggggctctttgagaagatgaaaggggtttaagttggctgactctttctcttnctttgnaanantgctggttcgtactttttcangactggttaactc

SEQ ID NO: 8066 - DNA, 602 bp, Homo sapiens
  misc_feature (456)..(456): "n" may be a, t, c, g, other or unknown
  misc_feature (488)..(488): "n" may be a, t, c, g, other or unknown
  misc_feature (495)..(495): "n" may be a, t, c, g, other or unknown
  misc_feature (502)..(502): "n" may be a, t, c, g, other or unknown
  misc_feature (505)..(505): "n" may be a, t, c, g, other or unknown
  misc_feature (536)..(536): "n" may be a, t, c, g, other or unknown
  misc_feature (551)..(551): "n" may be a, t, c, g, other or unknown
  misc_feature (586)..(586): "n" may be a, t, c, g, other or unknown
  misc_feature (602)..(602): "n" may be a, t, c, g, other or unknown
aaattttaaaaggattttgttatttgctatacaaatatacatttcaacttttacaacattcactccagtctgacctccttgtctatagaagactaagagatcaacatttccagtctctgacttcaaggacattattacggatacacaatgccctctgaaagcttttgcaaatgacagaaaatactgaagatgaccagaggctcaggtgttaaggatgcattttccatgttttccaacagcacacaaactccttacaaaaaacaagcttatctagatggtcccacgagctggtcatcttcagtttacaatatgctgtggctgctggcccatgtcactgggctttcctataaaagctttcttttcttggaactgctgtcctcctgctccagtgtcctcttgtcccacctagagttcctcctggtgtgatgggtctcggaaccacacttcttcctgctncccttcactgaaagccctggcctctcttctgngacagancttcctnttncgggcatacatttgctctgacaccgtggaancttcgggactggcanctggaaggttcgcccccgcacgggagggttttggnttgttaaaacaacccn

SEQ ID NO: 8067 - DNA, 606 bp, Homo sapiens
  misc_feature (450)..(450): "n" may be a, t, c, g, other or unknown
  misc_feature (514)..(514): "n" may be a, t, c, g, other or unknown
  misc_feature (519)..(519): "n" may be a, t, c, g, other or unknown
  misc_feature (548)..(548): "n" may be a, t, c, g, other or unknown
  misc_feature (581)..(581): "n" may be a, t, c, g, other or unknown
  misc_feature (583)..(583): "n" may be a, t, c, g, other or unknown
  misc_feature (593)..(593): "n" may be a, t, c, g, other or unknown
atatgaaagcagccttctcttttaatataaaatcatatcaaccaaataaaacctgccaaagctacatcatttaaaatatgtacagtttcacacacaatattacaactttaaggaaaataaaacatacttttcaatatgatacaaagcatgcatctcaaagtcattactttaaaagagagcaacacaggtaaaattcaatgataaacttcacttcttggcagtactatagctggaatgagatctgtggcatgatcagcccaagatggatgcattgagtcttcatagactcattcgacaaaaacacccagaaagaaaggcttttgctaagaacacttcaaaaggtttagaacattgcaatgtaacttgcaccctggcagcacctgtcaccagactgtcagtgcaaaactgaaagaaaaacattaaaaggagatcgtgaaatgatacagtggnagcggggcagtttatgctaaaaccaatcacaccagaattctagatgaagaaggaccatgaatangcttngcccaatttcggtgacacttgacacagtnaaagatccaaattttcaagttggaagggggtananaagggggccntcaaggggaaaaa

SEQ ID NO: 8068 - DNA, 595 bp, Homo sapiens
  misc_feature (480)..(480): "n" may be a, t, c, g, other or unknown
  misc_feature (537)..(537): "n" may be a, t, c, g, other or unknown
  misc_feature (562)..(562): "n" may be a, t, c, g, other or unknown
  misc_feature (583)..(583): "n" may be a, t, c, g, other or unknown
  misc_feature (586)..(586): "n" may be a, t, c, g, other or unknown
  misc_feature (595)..(595): "n" may be a, t, c, g, other or unknown
gtttttttataaaaaaagctttattagtgcatatatacaaatttacaaggtcagaaactggagaaatacaaagagctttaaaacacaatttgccgtttcctcagtttaaagtgacttttacctgattgtgatacaacagaaagtacagaacagtaaactgctttttaaatactggaattttatggagaatacattcacataaagaaaggaggtgaattttgttttggaacagggttaagacaatggagacattaatacatagagtgtcttgttgtatttactgccacatacttgaggggaaattctcaaaatcaaggatatgaacacctgctgctgcctgtatgccacctagtgtgcgaaacgaccgagctaccagttctagaacttatgagaactactctaaagagtgtggccatctatcagcacgaggtaaaccacttagacctcagcacttcaggggtggcccgctagagaaaagangcctgaaaagcttcagacaattccgtcaagccaaggtataatgccaaacttgccttntgaattgcacttggtctggaagganaagttaattctttacttttgncangggggtctn

SEQ ID NO: 8069 - DNA, 587 bp, Homo sapiens
  misc_feature (513)..(513): "n" may be a, t, c, g, other or unknown
  misc_feature (545)..(545): "n" may be a, t, c, g, other or unknown
  misc_feature (569)..(569): "n" may be a, t, c, g, other or unknown
caaagtacatattttatttatatagattagtgcaagctgaacaagaatatggtttgtaatccaatttatacagcatcacgtagtggctgactgtcctgaccatgggtggaagcagggatgactggccttggtaaaggaaatgacacacattcccccaatttggaagcaatcttaattagccagggagtgatttttttccttcagcaacgtagtccccaaagtacagacagcttctctcttccttataggccgagtcgtaggagtagcaagcttctaaattttggctgtgcctctgagcttttggcctaagtcccaccagccccgaagtttccatgacaacaaaacaaggatcaacgtgcctctgacactcccttcagccccaaattgttctcttactcccattttcttcctacctcccaagtatcactgggatacaagcagaacagggctggggtgctgaactcacccttggggaggactcattatagcatcctgcttttctccattatcggncaactggctaaggcccaattaataacagctgnttggcttcctggaaccgctggccntttggacatggtagcctt

SEQ ID NO: 8070 - DNA, 543 bp, Homo sapiens
  misc_feature (326)..(326): "n" may be a, t, c, g, other or unknown
  misc_feature (470)..(470): "n" may be a, t, c, g, other or unknown
  misc_feature (506)..(506): "n" may be a, t, c, g, other or unknown
  misc_feature (510)..(510): "n" may be a, t, c, g, other or unknown
  misc_feature (512)..(512): "n" may be a, t, c, g, other or unknown
  misc_feature (518)..(518): "n" may be a, t, c, g, other or unknown
  misc_feature (520)..(520): "n" may be a, t, c, g, other or unknown
  misc_feature (542)..(542): "n" may be a, t, c, g, other or unknown
caaaaacagattctaacaagtacaaagaaataattaacaaaagctcatgtgtgcccaaaataaagatagagatgtaggcataaactctataccatggacaccttctatgagtcacgaaaatatcagtcatatatatactggcacttagtctggtacatgcaaatttcaaggcaattcctctccatctgagaacgaggaattgtgtcattttaaggccaaattgcagtccaattgccacaagtgcaaaaccaccccacataaccacctatttgtaatcatggaatgatagcctcaaccaaccaattgtgccatacatcattgttaanacttctttggctcattttagtatagatttaaaagtaaaaattgcaaaagatgataaacatctattattttgtaaaagttacaagctcccattccaggtgtcagccctgtagtggttctccagcctagctgccataagaagcatnaccaggacaccaggatgattcaacccgaagatttcnaaangncctcangngattccaaaggcaaccccgtgnt

SEQ ID NO: 8071 - DNA, 571 bp, Homo sapiens
  misc_feature (454)..(454): "n" may be a, t, c, g, other or unknown
  misc_feature (521)..(521): "n" may be a, t, c, g, other or unknown
  misc_feature (564)..(564): "n" may be a, t, c, g, other or unknown
  misc_feature (568)..(568): "n" may be a, t, c, g, other or unknown
ataaagaaaaagaagtttaatggactcacagtttcacacggctagagagacctcacaatcatggcagaaggtgaaggaggagcaaacacatgtcttacgtggtggcgggcaagagagagcccgtgcagggaaactgccctttataaaaccataagatctcatgagatttattcactatcatgagaacagcatgggaaaatcccacccccatgattcagttacctccccccgggtccctcccacatgtggggatcatgggagctgcaattcaagatgagatttggtggggacacagccaaaccatatcattttgcccctggtccctcccaaatctcatgtcctcacatttcaaaaccaatcatgcctccccaacagtcccccaaagtcttatttcagcattaactcaaaagtccacagtccaaagtttcatctgagacaagcaagtctcttctgnttatgagcctgtaaaataaaaagcagttagttatttcctaggtccatggaggcccagggtattgggnaaaaacgcccgttgcaatgggaaaaattggccaaaccgggtcncggncct

SEQ ID NO: 8072 - DNA, 563 bp, Homo sapiens
  misc_feature (499)..(499): "n" may be a, t, c, g, other or unknown
  misc_feature (504)..(504): "n" may be a, t, c, g, other or unknown
  misc_feature (536)..(536): "n" may be a, t, c, g, other or unknown
  misc_feature (540)..(540): "n" may be a, t, c, g, other or unknown
  misc_feature (554)..(554): "n" may be a, t, c, g, other or unknown
  misc_feature (559)..(560): "n" may be a, t, c, g, other or unknown
aaaaaaaatcattttaatttttgatacatattaaaacatcttagtcagttcctcctgacagcattaacacagacaaatacacaagacttcaaacatgctttaaaatgacattcagcaaagtacttaaaatttaataaatagcaaatcacacacagatacatttttcataatcattaaactactaaaacagacagttaaagaataaataaaccgcaactgacagtaaaaaaaaatatgttgggttttgcaattcacactacttaaaaaggggggatgatctgaatgatttcttaattttcttttgagagtgtagcatgatcccccccaggaataaaatatattgaaaaaatcactcttacaacaatgtattttttaaatacaacaaataaatatgaaaccagcaaagcaatttcaagttgtaataaaaatgtcccccgcccccagccaaaagctatggaaatatatagttgctggggtagcaaataatagtatttaaagngatantgcttgggccctaagcttatttgagaacctgngatnaatttaggggcaantcctnnggg

SEQ ID NO: 8073 - DNA, 543 bp, Homo sapiens
  misc_feature (464)..(464): "n" may be a, t, c, g, other or unknown
  misc_feature (472)..(472): "n" may be a, t, c, g, other or unknown
  misc_feature (477)..(477): "n" may be a, t, c, g, other or unknown
  misc_feature (491)..(492): "n" may be a, t, c, g, other or unknown
  misc_feature (534)..(534): "n" may be a, t, c, g, other or unknown
  misc_feature (538)..(538): "n" may be a, t, c, g, other or unknown
agtcagcatgacctctattttattgattgattgatggattgattgagacagagtttcactcttgttgcctaagctggagtgcaatggcacggtttcagctcactgcaacctcggtctcccaggttcaagcgattctcctgcctcacactcccaagcagctgggattacaggtacccgccaccatgccaagctaatttttgtatttttagtagagacggggtttcaccatgttggtcaggctggtctcaaactcctgacctcaggtgactgcccaccttggcctcccaaagtgctgggattataggtgtgagccaccacacccgaccagcatgacctttaaacacaattggacttaagacaaatttagtaaatgcagatttctgggggggaaggggggaatcttcttttaaaatgcccatatttagtgtaggtgaaatatactgcttataaactattgatattanccttgaanaaccnttattgggtcttanntgaataattaaagctttaaaaaggcttataaaaatgcagganctanttggg

SEQ ID NO: 8074 - DNA, 564 bp, Homo sapiens
  misc_feature (532)..(532): "n" may be a, t, c, g, other or unknown
  misc_feature (542)..(542): "n" may be a, t, c, g, other or unknown
  misc_feature (545)..(545): "n" may be a, t, c, g, other or unknown
  misc_feature (547)..(547): "n" may be a, t, c, g, other or unknown
  misc_feature (550)..(550): "n" may be a, t, c, g, other or unknown
  misc_feature (552)..(552): "n" may be a, t, c, g, other or unknown
  misc_feature (563)..(563): "n" may be a, t, c, g, other or unknown
catattgggagatttttattaacttaaattgacattcttaattttgtctgtaagtccttggtatatatgcctttatttgaagcaaacctacaggtgtttcttaatatgacagaatcatgaagacttgcagttaatcagtgtttcctaatgattaaaacaatgttcaaataattacaaagttacttcatcaaaatacttagaagaatattctgaggagtgtttgaaagctctgtttataaatagtgattgatacatttatcatgtatttggtgctgaagataaacactttttacataaaacattgttttaatatactgctctactaatgaggctagttattagatatactgtattttaacactaaagaataaagctttatcttcgtatttatcttatttataggactcttatcaatgaagaactttgtatccaacaataataaactggcaaattgcaagttacgttttgtaggagaagcaaaaaagactggctgcgaccaaagaaagaagaaaactgggttatcatgctttgnaccaacaggnccntntgnangggccattaang

SEQ ID NO: 8075 - DNA, 587 bp, Homo sapiens
  misc_feature (516)..(516): "n" may be a, t, c, g, other or unknown
  misc_feature (521)..(522): "n" may be a, t, c, g, other or unknown
  misc_feature (537)..(537): "n" may be a, t, c, g, other or unknown
  misc_feature (562)..(562): "n" may be a, t, c, g, other or unknown
  misc_feature (564)..(564): "n" may be a, t, c, g, other or unknown
  misc_feature (574)..(574): "n" may be a, t, c, g, other or unknown
aactgtttatactggtttaatccatgtcaaatgtagtttacaaagggaaaggacaagtacctttgtatagaatatacagacacagcatcacaccacagggcccacgggagggtcggggagacgacactttttccctgggaaaggcagctctaatcccaggaatggttctcagcagaggctgggtggccaggagcactgtcctctagccccctaactcagcctctgcttcagctcggttcccatttcctgcctctaccccccaactccttataaagagccccatgagctaagactaaggagaggatcatgtcccttggggcgtgtgccccatgtctgggagaagaaatatacaccactgaacaccgagcacatgggagagggaagggacaccacaggagagagagaggcaggtaccccaagaggtggatgggccgaactcccagccaaccctgaaggaagcgctgctttcaagggttcttaaaaagaagaaaatcttcaaccaaaggggaagggacnaggtnnaaggccaagaattgncccatttttcccacattggaacatncncggctatttnaatgggctttagg

SEQ ID NO: 8076 - DNA, 588 bp, Homo sapiens
  misc_feature (542)..(542): "n" may be a, t, c, g, other or unknown
  misc_feature (544)..(544): "n" may be a, t, c, g, other or unknown
  misc_feature (547)..(547): "n" may be a, t, c, g, other or unknown
  misc_feature (560)..(560): "n" may be a, t, c, g, other or unknown
  misc_feature (572)..(572): "n" may be a, t, c, g, other or unknown
  misc_feature (583)..(583): "n" may be a, t, c, g, other or unknown
  misc_feature (586)..(586): "n" may be a, t, c, g, other or unknown
ctgtttcaaattctttattatacatcatggttgcacaatttgaggctggttaaatacaattggttttcaaaatctctttgaatattttctggcttactacatgcaaatgaccatgaaaatatttggcattttaaaattctgaaactctgaataggcacttacatgaaggaaaacattaccattcatagatatccacatgtagaacagatgctccagcacatggtggtacatggacccttttgccagtaaagttggttcctgaccattttatcaaagtgccatagtagtaaaacaggtttaaagaaatgtaatttgggttatttagcttactcataaagtaaggttaactgacaagacttgcactgaagtgcataaaaaatattggtacaaaaaccaatgaaccataagtgaaagtagtttccatacagcaggtttcattttggttcctacactccacatttagtgtatttgcgatcagaccccatgcatatgaatggatgactgcaatcttcttttttagaaacttaaaaccaatgacttgnantangggtaaaaaattngaaacttatggnagttccatttnggnta

SEQ ID NO: 8077 - DNA, 538 bp, Homo sapiens
  misc_feature (472)..(472): "n" may be a, t, c, g, other or unknown
  misc_feature (492)..(492): "n" may be a, t, c, g, other or unknown
  misc_feature (494)..(494): "n" may be a, t, c, g, other or unknown
  misc_feature (509)..(509): "n" may be a, t, c, g, other or unknown
  misc_feature (516)..(516): "n" may be a, t, c, g, other or unknown
  misc_feature (528)..(528): "n" may be a, t, c, g, other or unknown
  misc_feature (537)..(537): "n" may be a, t, c, g, other or unknown
aatttataaagaacaggattttatttcttagaattatagaggctcagaagtgcaaggttgaggggctgcatttggtgagggctttcttgctggtaaggtctctctgcagagtctggaagtaatgcagggcatcatatggcaagggggctgaggatgctagctcaggtctctcttcctcttcttatgaagccaacagtctcaattccagcataagccattaatccattcacagcaagaccccatttctaatccattcatgaaagcagatccctcatgacccaatcacttcttaaaggccccacctctcaatactgtcattttgggaattaattttcaacatgagttttgaaggggacaaatattcaaaccatcttaacaatactaaatctcccagcccattaacatgaaatatgtattagtatattttcatgctgctgataaagacatacctgagactggagaagaaaaaaanggttaatttggacttacagntncacatggctggggangcctcanaatcatggtganaagccaaang

SEQ ID NO: 8078 - DNA, 576 bp, Homo sapiens
  misc_feature (434)..(434): "n" may be a, t, c, g, other or unknown
  misc_feature (475)..(475): "n" may be a, t, c, g, other or unknown
  misc_feature (574)..(574): "n" may be a, t, c, g, other or unknown
aatttttggtgccttttattttatagacaaggaaaatgaggacaagagaggttgttttgatgttccttagcagacttctgggagaaactaaatgctggtggatagctttttctttgccaaatgcctttcattgtttccttattttccctatcaatagttttcaacattttcctttctgccttgataccctaaaatgtgttagaaaaacaaagatccacaaatttatgtttttacaaatttagaatatagcagaaaattccttaaggttaggtagtactgtaggtgatataaaaagaaaaaaatctttgactctggaaaatgttcagagatccttccagagtaaccttgttttggtgacaggtatctggtgacagaagaggccagcaggctgagtcatgcagtgacctgctgggcttctgtttaacttttgtcanaagtgcttatgttttcgagaaaatgaccacatttggggcangcctcttttacctcaagtccccacttctggtccttccaggaaagggcaaactgcaaaggaggttgaaaataggatccctggatctccttttcccaaaangg

SEQ ID NO: 8079 - DNA, 530 bp, Homo sapiens
  misc_feature (440)..(440): "n" may be a, t, c, g, other or unknown
  misc_feature (446)..(446): "n" may be a, t, c, g, other or unknown
  misc_feature (479)..(479): "n" may be a, t, c, g, other or unknown
  misc_feature (499)..(499): "n" may be a, t, c, g, other or unknown
  misc_feature (506)..(506): "n" may be a, t, c, g, other or unknown
  misc_feature (509)..(509): "n" may be a, t, c, g, other or unknown
  misc_feature (520)..(520): "n" may be a, t, c, g, other or unknown
gcaaacattacatgttctcatttatttgtgggagctaaaaatcaaaacaatggagctcatggagctagagagtagaaggatggttaccagaggccgggaagggtagtggggtgggtggtgggagggaaccggggatggggatgataaataggtacaaaaaaatagttaaatgaatgaataagacctaatatttgatagcacaacagggtgactatagccaataataatttaattgtacatttttaaataacaaaaagagtgtaactggattgtttgtaacacaaaggataaatgcttgaggggatggatacgccatcttccatgatgtggttattacacgtcatgcctgtatcaaaacatctcatgtaccacataaatatatacacctactacaacccacattttttttttaattttatgaaaaagaaatacattatcangggacnaagtgttatttaaaaaaaaaaaagctgcattcncaaaaacggtctttaaatcnaaattanggntaaaccccttngagggacttt

SEQ ID NO: 8080 - DNA, 559 bp, Homo sapiens
  misc_feature (472)..(472): "n" may be a, t, c, g, other or unknown
  misc_feature (509)..(509): "n" may be a, t, c, g, other or unknown
  misc_feature (542)..(542): "n" may be a, t, c, g, other or unknown
  misc_feature (554)..(554): "n" may be a, t, c, g, other or unknown
aagattgatttacttttttattaggagcacttctcaggtttttggcatttcacatgtctacactcagtgtccattggctccttctgagagtatccttgaaggttcggtaaattttgcagtgaacaagtaaaaaagggctggtgtaggtaccaaagccaaaaggggcaaatcttgctcaagtttatccactctggaaatggagattattccataggcatgaagtaaccagtggctgaagagaacaataagtcttttctttctgaccagaagatcatagcagttctctatttcagaagcagacatgtacacagccagagtaaccaaagataacactaatataatgtatgggaaggcgtaatataaaaggcctccaccaactgcctgaagcacggttaaaattgggaagaagtaaagtgcagcataaatacttttaaatcgatcagatttccctaacccacatgcaatcttcttnaccagaagaagtccgagcagcatcttaattcccagcngaatgcgtaatagattaatcccatgggatatantggggaaaccgnttctt

SEQ ID NO: 8081 - DNA, 565 bp, Homo sapiens; identical to SEQ ID NO: 7572
  misc_feature (1)..(565): "n" may be a, t, c, g, other or unknown

SEQ ID NO: 8082 - DNA, 547 bp, Homo sapiens
  misc_feature (483)..(483): "n" may be a, t, c, g, other or unknown
  misc_feature (495)..(495): "n" may be a, t, c, g, other or unknown
ctcagaagcatgatttattatgaccctaagctgtaaacaatgtaaaagtccatcaacagcagaatggataaattgtgatataatcatataattgaattctatactggataaaaataaataaacttctgccacacgtactaatgattagactcacggacatgatgaaggtaataagctgtatatgaaagaatacatgatatataatccaatttatagaaaggtttataatagtaaaaactaatttgtaatgttagaagtcagaatcatggtcaactgtgaggaggtaacaactaatttttattttgtatttgcaatgagaaatacagttcatacctccttcttttaaagaacctctactcactgtgtagtccatggaccacagtcagttggccaactagttattactgatgaacaaaaagatatgtatggaaatggaaaatgtgattttaaatgtttataacaccttgacagaagaagttttgnctgctgaaactngtaataaaaaaaaagttggacttcttaatgattttggctctaattggcctaa

SEQ ID NO: 8083 - DNA, 539 bp, Homo sapiens
  misc_feature (19)..(19): "n" may be a, t, c, g, other or unknown
  misc_feature (102)..(102): "n" may be a, t, c, g, other or unknown
  misc_feature (131)..(131): "n" may be a, t, c, g, other or unknown
  misc_feature (168)..(168): "n" may be a, t, c, g, other or unknown
  misc_feature (287)..(287): "n" may be a, t, c, g, other or unknown
  misc_feature (462)..(462): "n" may be a, t, c, g, other or unknown
  misc_feature (476)..(476): "n" may be a, t, c, g, other or unknown
  misc_feature (502)..(502): "n" may be a, t, c, g, other or unknown
  misc_feature (531)..(532): "n" may be a, t, c, g, other or unknown
ctttttttttttacagaanggatgacttttatttccatcctgaatgattcacaccattatttaaacatctgaaaaatcctgaaataatttaaactgaaggcncagaacaaaccaaaatatttaactatcanaactaaaaatgagaaaatccaaatagttctatagtancaataaattatgaacaagtttccgtcaccaaatatcactctgaccaaaaatgactgtcttttgtcataaaagctacagcttaagctgattccaagatttctataaaaatgagagtgaanaaatttcttctttcaaaatactcattatgccaccaggttcaatgtaagtattttgtatataacaaagtagcagtcaggatatttgttgatggatggctactccccaagaaatgacacattcttacgaactttaaaaaaatagcaaagttggttacaaaattctatttggggagcngggaaaaaacttgntccatggtaattagaatatcaaagcntttcaaaatcaactggttccaaggccatnnttaccca

SEQ ID NO: 8084 - DNA, 556 bp, Homo sapiens
  misc_feature (438)..(438): "n" may be a, t, c, g, other or unknown
  misc_feature (528)..(528): "n" may be a, t, c, g, other or unknown
agacagagtctcgctctgtcacccaggctggagtgcaaaggcacgatctctgctcactgcaagcgccacctcccaggttcacgccattctcttgcctcagcctcccaagtagctgggactacaggcgcccaccaccacagccggctaattttttgtatacttagtagagacagggtttcactgtgttagccaggatggtctcaatctcctgaccttgtgatctacctgcctcggcctcccaaagtgctgggattacaggcatgagccaccgtgcccggccacaactaatattttaaacataaaatgtgtgtgtgagtaagtgtctttagtcaagtacagttataactcaaatattaaataaaagtttggatctaggccttctctttggtgaaatagttttgatgtgtgtggtatataacataattgctatatttttgntttgagtatttataactcaatgtagttagtaatcaaaatcatgctaaaatggtttaatggttttagaatggcctaaaaagggcatttcangaatatcattttaatccctgaaattttt

SEQ ID NO: 8085 - DNA, 540 bp, Homo sapiens
  misc_feature (505)..(505): "n" may be a, t, c, g, other or unknown
  misc_feature (529)..(529): "n" may be a, t, c, g, other or unknown
atacccaaatcatttctatttggctttaggaaaaaaacaagatttccttttcagcatttgttctgttttggccaaataaaaattgttttctttcttcctctaagctcaccctacggcatgtcaggtaacaaaagccagtctgcccagccttccatctttacctttggaaatcgagacctgaatgggtcccattctttttctgtaatccaacagaaaatgaaaaaaaaacaaaaaccaccaaaactttttccccctatttgggattctaagaggacacatgagtcacataagtgcatttaactcagacaactttagatcctaatgaaatactagacaagagagaaaatggcatgagtggacagttctccctcgtcacatactatccctcatggttgcatgaggctgcctgctgatgagattcaagccaacttaaatgaagggcttcaccacatgagaaccttcaatagcaacgtttacatcactggggagttatgagacctgaganaaggccagaaagttccactgaganaaagtcctttt

SEQ ID NO: 8086 - DNA, 555 bp, Homo sapiens
  misc_feature (545)..(545): "n" may be a, t, c, g, other or unknown
  misc_feature (555)..(555): "n" may be a, t, c, g, other or unknown
ggtgtctaatacttttacttcccagcagcataataccactttggtcaggttgaaccactgcacaattttgcagctctttcagaaaaataatgaaaacaattggaaagacatgatgtacatgcaaatggtgagaaaatgatactattgtccaatcctttcccgtaaatgtaaaatatccttagttcatctccaaactgtgtatttattataagcccttacatcagggattttgtttctttcagtttttgtagcaccaaatagacacagcggctaacaagaaataaatctgaaaagtcactgaaatatttatcacatgtcagaaattttctggtctgtacctttaaccatgttcctggcttcacatattcttcttaagagtaagctataacataagattgagttcccaccctgtgtttgctactgatgtgatttgtttaccatgaataatactttggtaatatcttttggatattactttacaatttccaagtattttatgtacagtgactcacttagtgactcattcattttaatggaatgggggnccccaaaccn

SEQ ID NO: 8087 - DNA, 555 bp, Homo sapiens
  misc_feature (442)..(442): "n" may be a, t, c, g, other or unknown
  misc_feature (498)..(498): "n" may be a, t, c, g, other or unknown
  misc_feature (525)..(525): "n" may be a, t, c, g, other or unknown
  misc_feature (534)..(534): "n" may be a, t, c, g, other or unknown
  misc_feature (554)..(554): "n" may be a, t, c, g, other or unknown
catggtcagccagtctctagtaagtctctagggacatgaccagaccagaagcccctgttctacatgaagacaaacaggtggccatacttgggtggagggataccgctgctattcccagatcaagatttggtggaaggagaccatgacagatgacaaacggaacagtttctcaaaaacagaggtatgaagtaattacacaggaaagaaaacaatttccaaaggagtgagacaagtcgtgattcttcattggtacctgacccctatacccaaacagccttgaaccagcccttccagagactgcccctagtggcccactgggcagtgcaggctgtgaagaagacctgaaggcagatggggtgggggtgcttattttgctacagtggagaaggggcttgaatggggagggcagacctggctaacatctgccgccatcccccaactnccccccagacttctatcacatttacaaatacatacataaatccttacatacagtanccagtctgggaggcaaaattcccacanaagcattgnttgacacatgttgggaattnt

SEQ ID NO: 8088 - DNA, 558 bp, Homo sapiens
  misc_feature (103)..(103): "n" may be a, t, c, g, other or unknown
  misc_feature (463)..(463): "n" may be a, t, c, g, other or unknown
  misc_feature (483)..(483): "n" may be a, t, c, g, other or unknown
  misc_feature (493)..(493): "n" may be a, t, c, g, other or unknown
  misc_feature (497)..(497): "n" may be a, t, c, g, other or unknown
  misc_feature (537)..(537): "n" may be a, t, c, g, other or unknown
  misc_feature (539)..(539): "n" may be a, t, c, g, other or unknown
  misc_feature (544)..(544): "n" may be a, t, c, g, other or unknown
acattcttataagtggtttattgagagctgatttgtcaatcaaagaacacaccataatgatgggaatattgatgatttcaacataaaaaaatttaaataaggncaatctttacatagtaattaggagccacttacaagatgtatcaagcaaacagagcaagatacagaacagtgtgtggttggtttgctaccatttgttttaaaagaggggaaagaatatatatgtgctacagacatgtttatatgctatgtgtactcctctgtacatgtgcttataccacatgtatgtgcatatctaactctgcacaaccccgggaaaggcaagtcgacgctgatgtcattgctggctgaggagagaggtggtggctgtgggacagaatgggaagggaccgtatccctacataatacttcataccttttagctttgaaccatgtgccattattacctattggaaaaataagntaaaaactaaaaatcaaatnccccaaaagnctgnagcaattaacccttaaaaacctcctttaggttatcccagncncagtntactgggactggcc

SEQ ID NO: 8089 - DNA, 559 bp, Homo sapiens
  misc_feature (433)..(433): "n" may be a, t, c, g, other or unknown
  misc_feature (505)..(505): "n" may be a, t, c, g, other or unknown
  misc_feature (509)..(509): "n" may be a, t, c, g, other or unknown
  misc_feature (519)..(519): "n" may be a, t, c, g, other or unknown
  misc_feature (522)..(522): "n" may be a, t, c, g, other or unknown
  misc_feature (524)..(524): "n" may be a, t, c, g, other or unknown
  misc_feature (527)..(527): "n" may be a, t, c, g, other or unknown
  misc_feature (548)..(548): "n" may be a, t, c, g, other or unknown
ggtttggttttcggtttattcaagattaatgcatttagaccattcctttttcacacttacccttaagagtcccaatactttgttaaggaggctcatgtttctgcagtcctaattaaccatcaccagcactcccacctgagagtgagccactcggtagatggcaggggacaaggaaaccagtgccccgctgcttccggagggctgctgcagggctggggcttgtggctctgtgttttgtggaggacggggactcaagtccagccttgctctgcttaccaagttggacacccatggggctgtgcccacccaagtggtgccttttctgactggaaccactgtaagggctcactatgcccttgctgggggtctttccagcaaataagactcttttctgctggtttcatgtgtgtggccttgctggaagacaagggtngggaattccttcctttgaaccccttttccaaagaaacccatggacttttgcaagggacttactgaatgtganccantcattgaacnttnanctngaaaagaacctgttcaacttnccgggcatttt

SEQ ID NO: 8090 - DNA, 577 bp, Homo sapiens
  misc_feature (424)..(424): "n" may be a, t, c, g, other or unknown
  misc_feature (450)..(450): "n" may be a, t, c, g, other or unknown
  misc_feature (453)..(453): "n" may be a, t, c, g, other or unknown
  misc_feature (502)..(502): "n" may be a, t, c, g, other or unknown
  misc_feature (552)..(552): "n" may be a, t, c, g, other or unknown
  misc_feature (562)..(562): "n" may be a, t, c, g, other or unknown
ataaaggctaaccatatccatttgtcaatattttcggctttaaggaaaatagtttaaaaaacataaaaaggtaaatacactcaagagtaactgctattaaacagttctgaacaggcagaaaatgtagactttcctttaacagaaaatgttaaatctgtaatagcagcataatttatatatagaaaaaagctggttttgaaaacccagatttatacccaaaacattttttttctgtacaactgcgtttacactgggaaataagtttcttcacattatgttcattcccatcaggtacaggtgtgagcttgagtttgatcagccagccctgagcgcaagctcagcgctcagcacaatcttcaatccaacaccatggcagaaagcgcatttagatctttcatgtatgggtgggccaccaagatctggnctattttcagctttgctctgagtcanggnagatctttagaaaggctttccttaacttcgttggttctgcaaaaaactntgactggcatgggcaggttctggttgaaactggggaaggcttggcaacantggggaaatnggctttttaaggact

SEQ ID NO: 8091 - DNA, 577 bp, Homo sapiens
  misc_feature (411)..(411): "n" may be a, t, c, g, other or unknown
  misc_feature (448)..(448): "n" may be a, t, c, g, other or unknown
  misc_feature (476)..(476): "n" may be a, t, c, g, other or unknown
  misc_feature (479)..(479): "n" may be a, t, c, g, other or unknown
  misc_feature (497)..(497): "n" may be a, t, c, g, other or unknown
  misc_feature (500)..(500): "n" may be a, t, c, g, other or unknown
  misc_feature (548)..(548): "n" may be a, t, c, g, other or unknown
  misc_feature (553)..(553): "n" may be a, t, c, g, other or unknown
  misc_feature (576)..(576): "n" may be a, t, c, g, other or unknown
agatgctttatacttcaggaatttattttttcacaatgatccaaagtattagatgaaggttttttgttttattttgcttttaattgacaaataataaatatacatatttatgtggtacagtgtgatgttttgatacatgtatacattgcgtaataaccgaaccagggtaattagcatatccatcacctcaaatatgtgtcgtttctttgtgttgagaactttcaaaatcctctcttctagctatttcaaaatatatgcaataggttattgttaactctagtcaccctactatgcaataaaacattagcacttatttaatgtgaagtttttaatacaaaaattattttaagaaaataagcacaggctgggcgccgtggctcacgcctgtaatcccagcactttgggaaggcnaggcgggtggatcacctgagggcaaaaggtctagacnacctaacccaccattggggaaaccccgnctntctggaaatccaaattanccncggggtggtggtgggcacctgtaatccactacttggggaggcttaagncgganaattgcttgaactgaaagggggng

SEQ ID NO: 8092 - DNA, 569 bp, Homo sapiens; identical to SEQ ID NO: 7229
  misc_feature (1)..(569): "n" may be a, t, c, g, other or unknown

SEQ ID NO: 8093 - DNA, 589 bp, Homo sapiens
  misc_feature (439)..(439): "n" may be a, t, c, g, other or unknown
  misc_feature (442)..(442): "n" may be a, t, c, g, other or unknown
  misc_feature (455)..(455): "n" may be a, t, c, g, other or unknown
  misc_feature (468)..(468): "n" may be a, t, c, g, other or unknown
  misc_feature (489)..(489): "n" may be a, t, c, g, other or unknown
  misc_feature (510)..(510): "n" may be a, t, c, g, other or unknown
  misc_feature (523)..(523): "n" may be a, t, c, g, other or unknown
  misc_feature (563)..(563): "n" may be a, t, c, g, other or unknown
  misc_feature (581)..(581): "n" may be a, t, c, g, other or unknown
  misc_feature (584)..(584): "n" may be a, t, c, g, other or unknown
agaatttaatatatgtttatttgtgtagtaggaacattcaggtatataaataaggtaaatgctttccaacgtacagtatatcatgttcttacattgcgtggaaaaagaacctacatgtattgttcaacatggatcacgagtgcacagagagagagatcagctgcatttagtgaaacgccaagttgggaaaatggcacagcagtagcgcacaggcacacagctatctggggaggctgtggggactgtcacgtggactctacacaccgagaactgcttcaaggtcgcctgtgtctgagtgcgggtaaagtgaatatcaacacccaggctatcagggtgagacaactgaattccatcatgtccatccactttacaaaggggtgggaggcaccatggagaaactgaccagaaatgctctgccctgtcacagaaggagacaganccnaggcagacacggntgacctctgggangccaagacactggcagtgatnggtcccattgggatgcctggnacttccaacacanaacaggttccccaaagcaggttggggaaggccctttcttnggtttgggaactttttanatnaacca

SEQ ID NO: 8094 - DNA, 572 bp, Homo sapiens
  misc_feature (306)..(306): "n" may be a, t, c, g, other or unknown
  misc_feature (445)..(445): "n" may be a, t, c, g, other or unknown
  misc_feature (485)..(485): "n" may be a, t, c, g, other or unknown
  misc_feature (488)..(488): "n" may be a, t, c, g, other or unknown
  misc_feature (499)..(499): "n" may be a, t, c, g, other or unknown
  misc_feature (565)..(565): "n" may be a, t, c, g, other or unknown
  misc_feature (570)..(570): "n" may be a, t, c, g, other or unknown
ggaagccatagaatttattcgaatttgcagaagcatgagataatgtaccacaaaagagtttgattttacaacataaagtatggtaggaagtggtcaatgtacacagtgttgtcagcaaaaaggggaggcagggcagtttcacattttttgaaaggtggtggacgacaactacacttgtccttaaagtaaaataaaagcaggagagacccagcagagaccaacctgatttgcagttagcatcagaatctaaatctagtatcacaactttaagaaactaaaagaaaactattagaaaaatagaacatnaaacaagcaaaaaaatatacaaatgtacataataaaaaacacacaactcttaataatggctccatgttcagtagaagaaaatatttactggagaaaccacagctattcaggtttgataataaacccaacccttattggnatcattacccttaagtgctccttaactcatggaactgaanggncaacttaagcnggaacttatcatcttaatatatatatacttctcaaatgggaaaataagtcccaacttaataggctngcttnaa

SEQ ID NO: 8095 - DNA, 551 bp, Homo sapiens
  misc_feature (482)..(482): "n" may be a, t, c, g, other or unknown
  misc_feature (488)..(488): "n" may be a, t, c, g, other or unknown
  misc_feature (496)..(496): "n" may be a, t, c, g, other or unknown
  misc_feature (501)..(501): "n" may be a, t, c, g, other or unknown
  misc_feature (534)..(534): "n" may be a, t, c, g, other or unknown
  misc_feature (536)..(536): "n" may be a, t, c, g, other or unknown
  misc_feature (538)..(538): "n" may be a, t, c, g, other or unknown
ggcttaaacaacaaacatttatttcttacagttctggaagctgggaagtctcaaggtgccaacagtttcatttcctggtgagggctctcttccgggcctgcagacggctgtcttctcactgtgtcctcacatggtggagagagagatcatctctctggtgtctctccttataaagcactaatcccattcatcagggctccaccctcataacctaatcacctctccaagaccccacccccaataccatccctttggggattagggcttcaacgtgaattgggagcatatgaacattcaccccttagctgactccacccatgtcaactagataggacacacggtgagtagtgaccacatcttacacgtttttagcacactgctgatgtccgacaggcctgggtctgggaccagtgtgtaccaacaagcatggtctgtggggtcaactgtcacgctcctgaggaagacaatgggccctgcttctnttccancctgtcgnggctntactgagtttaatttcccatcaatactggaggngngnccttgacaaatgg

SEQ ID NO: 8096 - DNA, 554 bp, Homo sapiens
  misc_feature (358)..(358): "n" may be a, t, c, g, other or unknown
  misc_feature (420)..(420): "n" may be a, t, c, g, other or unknown
  misc_feature (428)..(428): "n" may be a, t, c, g, other or unknown
  misc_feature (459)..(459): "n" may be a, t, c, g, other or unknown
  misc_feature (463)..(463): "n" may be a, t, c, g, other or unknown
  misc_feature (486)..(486): "n" may be a, t, c, g, other or unknown
  misc_feature (498)..(498): "n" may be a, t, c, g, other or unknown
  misc_feature (525)..(525): "n" may be a, t, c, g, other or unknown
  misc_feature (542)..(542): "n" may be a, t, c, g, other or unknown
  misc_feature (553)..(553): "n" may be a, t, c, g, other or unknown
aattttcagaccaaacatttttaatataaaaacattttgataatatacaaacagcaatcacaacagcatccacatggcggcaaggggaccagggcacagagagggggagcgggctggggagggacagttttcagggtcccagttgcttccctggcttgaaatcaccctggtcctagcagaggacaggttaaggctgccagaggcagagggtccctgaccctggcccggagacagactgcccaggcaggccctctgataccatcttccaaccatggcagcctccaggaaaagccagatccatttaggagataacaggaaggtggctgtgattgacaggaaaggcaacatggttcctcancatcctgctgatcacacctctgggaggggcttgctggattgaaagaggacctaagaatcttnctgggacnaggacagaaatgggatctaagtctacttctnactnacattcccgcttgtgacacccanaaaactggaatnggtcttgcttcaaattcccggaagaanaaagggattgacaaaancctttggcttna

SEQ ID NO: 8097 - DNA, 574 bp, Homo sapiens
  misc_feature (352)..(352): "n" may be a, t, c, g, other or unknown
  misc_feature (404)..(404): "n" may be a, t, c, g, other or unknown
  misc_feature (454)..(454): "n" may be a, t, c, g, other or unknown
  misc_feature (484)..(484): "n" may be a, t, c, g, other or unknown
  misc_feature (493)..(493): "n" may be a, t, c, g, other or unknown
  misc_feature (501)..(501): "n" may be a, t, c, g, other or unknown
  misc_feature (519)..(519): "n" may be a, t, c, g, other or unknown
  misc_feature (550)..(550): "n" may be a, t, c, g, other or unknown
caaaatattttttaatgtgatgagtggtctgggaaatcctcgcctaacaaagtggcttttgattcaaggcctgaagaaggggagggcccactccaggtagatgacatggccagggcaaaacctgaggccagagtgtgcctggggatatgggggacgtggagggcacccatgtccagcccacctcagtgcttctgcctcagtgagaaggggagggagttggccacaagggggcctgggtgcatcaaataggaagccggtgagtcaagcagctcggggccagtggggctggagagatgccagagccaggggctatgtgtggacttagggtttggaaccattaaagggctctgcnacgggaagtggcaggatatgacctatttttgaaacattgtgcttgagaacangccttaaaggcagaagcacagaacctgctcgggcgcttcaatacttgaanccccttagttgaaaaatatctttcttccanttctaccangccctttncttttcaaatgctacagnacacccaaacagtaggctccttgttggcccnaaccacagcttcacttatgggttt

SEQ ID NO: 8098 - DNA, 572 bp, Homo sapiens
  misc_feature (519)..(519): "n" may be a, t, c, g, other or unknown
  misc_feature (526)..(526): "n" may be a, t, c, g, other or unknown
  misc_feature (531)..(531): "n" may be a, t, c, g, other or unknown
  misc_feature (557)..(557): "n" may be a, t, c, g, other or unknown
  misc_feature (565)..(565): "n" may be a, t, c, g, other or unknown
  misc_feature (570)..(570): "n" may be a, t, c, g, other or unknown
attcagtacagatgcaaagtagtagctcagaggctctgggtaatagcattcctgagattggtgacatccattacctcactagtccaacttctccagactaacgcagacttttctcttcccttggcctttcctctcctcgccattgggccaattccttcgatttctcatttcccttgaagttagggccattcacagtttcatggtcaaagccagttccaggttcaatagtctgtgatttatccaggctctgaggtatgcaccgcttctgttttgctcgttcctccaagagctagtttggccagaaaggggatgctttataccatagaacacatccaccttctagaacctgctctagaaggccaggccctcagattccacatggttggagttctgggcaaagtccggagctttcttcacactcggctctcaaactctgggttcaaaaaaaactgagcatggtgagagaagacagtgtcaaaccgaggcccctggaggacctttggaaccctgatagtctgncataccngaacntggatttctctaaaggtcaaactggntttactgnggaanaa

SEQ ID NO: 8099 - DNA, 518 bp, Homo sapiens
  misc_feature (404)..(404): "n" may be a, t, c, g, other or unknown
  misc_feature (452)..(452): "n" may be a, t, c, g, other or unknown
  misc_feature (469)..(469): "n" may be a, t, c, g, other or unknown
  misc_feature (488)..(488): "n" may be a, t, c, g, other or unknown
  misc_feature (502)..(502): "n" may be a, t, c, g, other or unknown
  misc_feature (510)..(510): "n" may be a, t, c, g, other or unknown
  misc_feature (514)..(514): "n" may be a, t, c, g, other or unknown
  misc_feature (518)..(518): "n" may be a, t, c, g, other or unknown
caggtttcaaaaactcactttattccaatgtgaaatgaggacgtgatggtttaaaaacaagaaaaagttcttgctcagcggtggggatgctctgcttgcccgctcacgcccatcccccttgaaacaaggtgtctggacggaccacacccataagcggctctccgcaaacccaggcagacgcccgtctcctccgggtctcagggtggccacatcctcccccaccagggctctgacagcaggcacagagcagcagcacgggcagggtggagcgggagcagcgtgtgggggcccccgccacccccagagctagtctcagaccaggaagggagctgggcaccagagaagcgacatcacgtcggcacctgtaactcccgggatccgtaattgggccccgcttcccccancctcgcccccggcccactgtgcgttcggcagctcaggttaaaactgangggaagggatacattanaccgcagccccaaggttgncccacttggttcanggaagtangganccan

SEQ ID NO: 8100 - DNA, 595 bp, Homo sapiens
  misc_feature (484)..(484): "n" may be a, t, c, g, other or unknown
  misc_feature (496)..(496): "n" may be a, t, c, g, other or unknown
  misc_feature (518)..(518): "n" may be a, t, c, g, other or unknown
  misc_feature (551)..(551): "n" may be a, t, c, g, other or unknown
  misc_feature (576)..(576): "n" may be a, t, c, g, other or unknown
  misc_feature (590)..(590): "n" may be a, t, c, g, other or unknown
actgcttagtgacactttattcaaattacaacccatagtttttgctccaaaaaatgcaacacctgagaaaggcctgttgctttaaaatcaagaatctataaaagcaatgccaccctaatcttaaggtgcttcttaggtatttcccaaagctctttgctcttttatactgcagcattttcaggaggagtcattagatactgtcaaggtccaagaaataactaaaaacaaaaaataacctgagactcttttctgcaccgccaccagctgcccagtacactaggtcaccttttacagcagtgagcacagcaatccatgccacaaaaatcctcacaaaacaagaaggaaaggtacaaaaagaattatattaaaatggtaacatacacttgtatgagggagggatatttaaaattaaaatattatcatcacaagaaacaccagatattccttgctctgcccttgggcaaccaagaaacttaaagcctgntttatatcccanaaattaaagagagacctgatanaagttacaatgctcaaagctttggaacccaggnaaattatacccttggtaagggaaancccaattttaaagntacaa

SEQ ID NO: 8101 - DNA, 581 bp, Homo sapiens
  misc_feature (486)..(486): "n" may be a, t, c, g, other or unknown
  misc_feature (516)..(516): "n" may be a, t, c, g, other or unknown
  misc_feature (530)..(530): "n" may be a, t, c, g, other or unknown
  misc_feature (536)..(536): "n" may be a, t, c, g, other or unknown
  misc_feature (546)..(546): "n" may be a, t, c, g, other or unknown
  misc_feature (549)..(549): "n" may be a, t, c, g, other or unknown
aaggccaagaaagtcagtttaatcttacaatataaatatatcatttagtcacctcagcttatccccagaggtgtttacacaattcccaatgaccagtgcagcttggaagggactgaggctcgcaagtgggtggcacagtcggctcttcagtggctccaaagtgagcccctcacaacaggagacacttcagagaggtctgtccccagccacgcactcatgattgctttttagcagaagtcatggtcgttgaggccctgggtttggcaaaagcacagctgccagcagagcacagttctggtaggtggggccacggctgacctggccccagagctacaggaacaggcaggggccagcttggcttgcaacaccatgaaacaagcctgtggggcccttagtgtcttctcccgcagagcccaccagaaacacttctgtgagtaacagaacctggaaggaaaaggggcaagggtggggccttggtggcaccgnacaagacgtgccccaagcttcttttcaatngactggcaccttcnggcaanaaaaaccccnaanccttggggcttaaggtttggcctttccaattt

SEQ ID NO: 8102 - DNA, 569 bp, Homo sapiens
  misc_feature (482)..(482): "n" may be a, t, c, g, other or unknown
  misc_feature (491)..(491): "n" may be a, t, c, g, other or unknown
  misc_feature (507)..(507): "n" may be a, t, c, g, other or unknown
  misc_feature (519)..(519): "n" may be a, t, c, g, other or unknown
  misc_feature (537)..(537): "n" may be a, t, c, g, other or unknown
  misc_feature (558)..(558): "n" may be a, t, c, g, other or unknown
  misc_feature (564)..(564): "n" may be a, t, c, g, other or unknown
agtgcttataaatgaggtcataaagaactttaataattcagagaagaagttcaaagtgtatttaaaagttgagaccctgctttacaatattttataattttaaaaaaaggcgtttaaaggtgataggtgacttaataattttccactttcaaaatgggtttctagacactgttgttcatgaaccaaaaacaaacaaacaaacaaacaacaacaaaacccaaacactttggcaagcaaagtattattagtacatagcagcttcataacagtttacttttttaatataaagatttttcaatttacacttgtaggagtagaaaaaactaatatgctaagtctgtaagctacgcagcaaaaataatgatcttaatgaagccagaattctgtgaaaatgtgcaccacactgcatatatagtagctgagtaaatgtaaaccatgtgcttattaactcttctatataaaatattgaacccccaagtctnacacattgncttctatgtccacatnacttttctgaanacaggctctgccttaaanccatatatatttgccattttnaaaaanctcaa

SEQ ID NO: 8103 - DNA, 519 bp, Homo sapiens
  misc_feature (439)..(439): "n" may be a, t, c, g, other or unknown
  misc_feature (470)..(470): "n" may be a, t, c, g, other or unknown
  misc_feature (490)..(490): "n" may be a, t, c, g, other or unknown
  misc_feature (500)..(500): "n" may be a, t, c, g, other or unknown
  misc_feature (502)..(502): "n" may be a, t, c, g, other or unknown
  misc_feature (512)..(512): "n" may be a, t, c, g, other or unknown
  misc_feature (518)..(518): "n" may be a, t, c, g, other or unknown
aactaaactaaatggtcaatactgccatctctcttgataatgacaaagtgtttgcacaggatgcctacaggtgtgtgtgtcgctcctcactaatggatccgtagtcatatagctgtgagaggcactcctgggttgaaaatgaaggcaattatcacattactgtcagtcctgactgagtcacctctagagtttatgctttcagccttaattgaaatgaagacaattatataaaattctcacataattgatcacaaatgtgatcacagccactcttgactaagattggtgccggccaatctgctgtgagggaatgaagagaggagaggaactgcgatgtcagtccctgattctactgcaagtttccaagcacatgaaatcccattctagctttggagaccccaatgtgacaagaatctccctgtgctttaaatcatctctnacccatgctaagctgtgatcccttaccaagnctatgaaaccttggaaaaangagtgaaaantncccccggggngtgtgng

SEQ ID NO: 8104 - DNA, 585 bp, Homo sapiens
  misc_feature (180)..(180): "n" may be a, t, c, g, other or unknown
  misc_feature (470)..(470): "n" may be a, t, c, g, other or unknown
  misc_feature (497)..(497): "n" may be a, t, c, g, other or unknown
  misc_feature (524)..(524): "n" may be a, t, c, g, other or unknown
  misc_feature (526)..(526): "n" may be a, t, c, g, other or unknown
  misc_feature (569)..(569): "n" may be a, t, c, g, other or unknown
  misc_feature (580)..(580): "n" may be a, t, c, g, other or unknown
caaattccagctcaagtttatttttaaggattagttgagcaagtttggagttggaagtgagagaatcgtgtttaaaggaaagggtaggtcatccacagaacagctttcagtcattacaaaaaaaaatacttcttgcttttatattaccatcttcccccattaggcctacctgcatactgngcttcatcaaatctaagatcacctcacaactataccattattttaggcaccactaaaagacagtgtattgctaacaaaactatgataaaccattgataatatatccagatttcagagatgttacagtgcatcttagttgatgaaacaaaaatatacaaaacatgagacacagtaaaaatgataagtaccacctcattataccttttcacaagcaaatagtggccaaagatgtgaacggccagacacggtagccgacatatgcaatcccagatctctggaggctgaagcanaaggatccttgagctcaggagtttganacccgcttgggccatattcaagacccncngaaaaatgtaaaccccgggtgatgggcacacctggggttcaantcttggggagnttagg

SEQ ID NO: 8105 - DNA, 536 bp, Homo sapiens
  misc_feature (51)..(51): "n" may be a, t, c, g, other or unknown
  misc_feature (82)..(82): "n" may be a, t, c, g, other or unknown
  misc_feature (212)..(212): "n" may be a, t, c, g, other or unknown
  misc_feature (237)..(237): "n" may be a, t, c, g, other or unknown
  misc_feature (245)..(245): "n" may be a, t, c, g, other or unknown
  misc_feature (282)..(282): "n" may be a, t, c, g, other or unknown
  misc_feature (294)..(294): "n" may be a, t, c, g, other or unknown
  misc_feature (326)..(326): "n" may be a, t, c, g, other or unknown
  misc_feature (434)..(434): "n" may be a, t, c, g, other or unknown
  misc_feature (464)..(464): "n" may be a, t, c, g, other or unknown
  misc_feature (472)..(473): "n" may be a, t, c, g, other or unknown
  misc_feature (513)..(513): "n" may be a, t, c, g, other or unknown
  misc_feature (525)..(525): "n" may be a, t, c, g, other or unknown
  misc_feature (532)..(532): "n" may be a, t, c, g, other or unknown
  misc_feature (535)..(535): "n" may be a, t, c, g, other or unknown
ccaggaattcaaaacaatttattaattttacacttagatattggtaatgcncacagagagaggaaatctaaaagttatttanagcacctccatgattttgtgttgaatgttataaattttattttaaaatagctcaaaactatcttgcattttaatattttaaaataaaatctataatatcaaaatcttgagcatttaaaaaactgtaaaanccatgattcaagtcaataattctgngctttganatttgattggtaagcatgatttcatttgtctatgaanaatctactctgntcctttctggctttttcaatgctttcaaaagngatcattcctcttggcagctgcaatttactcttttctgtgttccagtatgtcctcagcttcacctttcattctttctaaaagggttccatagcccaagtcatactggnaggtgaggataaagcttaatggaacaatcngggaccannaaaggctggcttcttttttttaaaccgctcccagctgttnaagaaaatggcntggcaanggnc

SEQ ID NO: 8106 - DNA, 536 bp, Homo sapiens
  misc_feature (430)..(430): "n" may be a, t, c, g, other or unknown
  misc_feature (475)..(475): "n" may be a, t, c, g, other or unknown
  misc_feature (508)..(508): "n" may be a, t, c, g, other or unknown
  misc_feature (515)..(515): "n" may be a, t, c, g, other or unknown
  misc_feature (519)..(519): "n" may be a, t, c, g, other or unknown
  misc_feature (531)..(531): "n" may be a, t, c, g, other or unknown
  misc_feature (535)..(536): "n" may be a, t, c, g, other or unknown
aagtagagatgggtttcaccatgttggcaaggctggtcttgaactctgacctcaagtgatccacctgccttggcctcccaaaatgctgggaatacagatgtgagccgctgcacccggccagactttgacttttccaattttttcaatgataatcttttttcctgataatatgttcacaatcaagtaataccagggactgctgagaagtggatgatgaagggtgataagatatagactgtgcccttctctttgcagctcctgagaggggatgggaagggattttgggagggtgagaaacagctttgtctgcccagagcagctctgaaggtggcccagtgcagaacaggatctctgaaggcagagcgggacacccattctggggatggaaagagggaagaccgttgaggccatttcccaagtggaggactangggtgggaaaagtgaccttctgcttgaggatccagtccacccttnacccactttagacatggactttagacacagaanagatttnaaancccattttaaancctnn

SEQ ID NO: 8107 - DNA, 516 bp, Homo sapiens
  misc_feature (386)..(386): "n" may be a, t, c, g, other or unknown
  misc_feature (389)..(389): "n" may be a, t, c, g, other or unknown
  misc_feature (460)..(460): "n" may be a, t, c, g, other or unknown
  misc_feature (483)..(483): "n" may be a, t, c, g, other or unknown
  misc_feature (489)..(489): "n" may be a, t, c, g, other or unknown
  misc_feature (499)..(499): "n" may be a, t, c, g, other or unknown
  misc_feature (508)..(508): "n" may be a, t, c, g, other or unknown
  misc_feature (513)..(514): "n" may be a, t, c, g, other or unknown
aatcctgaaaagtagacagtaaaacagctcctgggagaatttacaaccaactgcatgagggtctgggaagctgaggggctggagcagggttgggagagtgaacaggaggggattctcccctcagtcactgtagcctcactgtatgatcaagggaggtggggattatttagtcaaaaaggaagaaggtaggaagaacaggaggtggaaggctggggaggtggggacaaacagaaagtaaaaggtcattgttgcctgtttgaatccagaaaaaaatgcctggccctatggaggggaaggaagcccctcagaggggaggcagtgggctggagggaggcagccctgggatgaccccatccccagcaccacgggatctggcgggggcagangangggccgaggcaagcgctggtggaagaaccggcaggggccttcgggaacctctgggtcacactggctactgngtacttttgccccctttgtgttncccgantaacttcccnaatcctaanttccnnaa

SEQ ID NO: 8108 - DNA, 588 bp, Homo sapiens
  misc_feature (496)..(496): "n" may be a, t, c, g, other or unknown
  misc_feature (528)..(528): "n" may be a, t, c, g, other or unknown
  misc_feature (533)..(533): "n" may be a, t, c, g, other or unknown
  misc_feature (555)..(555): "n" may be a, t, c, g, other or unknown
  misc_feature (580)..(580): "n" may be a, t, c, g, other or unknown
  misc_feature (588)..(588): "n" may be a, t, c, g, other or unknown
gtttttttttcctaaagcaagtaactttattatcattcctttaaaaagaaccaaggaaaattcacaacatatgtgaaacacaaacagctgtggtttaggaggtaaacaaaggaccaacatagccctgaaatgcaacagcctctgagtgacttgagccgcatgtgactggggttctgttaaaagggcaggctcctccctcctagccctgaagccccaggaacctgccttgaaagacaagctctctaatactcaacttgcagggtctcgccctaacatccaagacttggtagcatctcctttctcccaaaacccagctggaactcaactaatcctaaacgaaaactcaagaacagcacaccagatgccacctgttgtttgtcagggtctcaaactccagaggaaatgcatttgcctgtcatggttttcctctctaagggcacctgtctgaacttggagctgtgcttcactggtgcctcatggggcctggggcctactnttcacctgaattcacacttttctctataaggnatcangtgggggaataagtccaagaangtgacaagaagcttccgagcaacanacttggtn

SEQ ID NO: 8109 - DNA, 581 bp, Homo sapiens
  misc_feature (512)..(512): "n" may be a, t, c, g, other or unknown
  misc_feature (521)..(521): "n" may be a, t, c, g, other or unknown
  misc_feature (538)..(538): "n" may be a, t, c, g, other or unknown
  misc_feature (562)..(562): "n" may be a, t, c, g, other or unknown
  misc_feature (581)..(581): "n" may be a, t, c, g, other or unknown
aaatgtttcctttctggttcaagaacttcctttagggttggtcttttcaaggtctatagggtagactcattcaacaaattcttttagttttctatcaaccgagaatgtttttattaccccatcaatcctgaaggatcatttcaccaaataggaatttggagttgacagagttttgttttgaggcagtcttgctctgttgcccaggctggagtgcagtggcaggatcttggctcactgcaacctccacctcccgggttcaagtaattctcgtgcctcagcctcccaagtagctgagattacaggcatgtgccaccatgcctggctaatttttgtatttttagtagagacagggttttgccatgttggccaggctggtctcaaactcctgacttcaagtgatctccccaccttggtctcccaaagtgctgggattacaggtgtgagccaccgtgcccagccccaagttgatagttcttctggcactaaaagacttgctcacttccttctggctncatggtttncagagagaaatccctgncatctgagttacttttccctctanttaagaattcacttcttcn

SEQ ID NO: 8110 - DNA, 588 bp, Homo sapiens
  misc_feature (556)..(557): "n" may be a, t, c, g, other or unknown
  misc_feature (578)..(578): "n" may be a, t, c, g, other or unknown
cacaatctataacattgtttatttgtttaattattttccatctctccactaaaatttaaaactcagtgagggcagggtcttttttggtcctgttaaccagtgtattcctaatacccagaacaaatctggctcctggcaggcattcaaataattcttaaatgaagagatacaaaagcccactgagtcatttatgcaaatcagatggagtggcggtcttctccacaattcccaagtacagcttccacttttccctcaacctctcataaagtcacagagtaaatagaaggtgagtttatttctccagtcttgaaattaacaattttcaagaaaacaaattattagaataactggtggagtcacagacatatttctagctccattaggtcaaaggaaaggaaagaggacaagggtagaaaggagacaagccctctaagaaactgtccattcagtctgtctgcagtcaatatgaagagatagcctttggagctacagaaaatattacattgaagtggattatgcttgctggtaaagaagctgggtccaccgagcagcagcnngaagacgaagactcaaatgtncatgtagagc

SEQ ID NO: 8111 - DNA, 581 bp, Homo sapiens
  misc_feature (77)..(77): "n" may be a, t, c, g, other or unknown
  misc_feature (159)..(159): "n" may be a, t, c, g, other or unknown
  misc_feature (200)..(200): "n" may be a, t, c, g, other or unknown
  misc_feature (359)..(359): "n" may be a, t, c, g, other or unknown
  misc_feature (418)..(418): "n" may be a, t, c, g, other or unknown
  misc_feature (476)..(476): "n" may be a, t, c, g, other or unknown
  misc_feature (525)..(525): "n" may be a, t, c, g, other or unknown
  misc_feature (535)..(535): "n" may be a, t, c, g, other or unknown
  misc_feature (563)..(563): "n" may be a, t, c, g, other or unknown
  misc_feature (578)..(578): "n" may be a, t, c, g, other or unknown
  misc_feature (580)..(580): "n" may be a, t, c, g, other or unknown
gaaaaggaaggaaaatattttattaaaagttttttaaagtttatgaattgaagtctatgaaaacaaactacttgatncaaaaacattcagatattagatgtcaaaataaatcagcacatttgaaaatactataaattatatttcaaacaaatatatacncattatgttaaccttcaacaggatccattatcactacttanaacactgatatgtttatctcttaagtatgtaaaaattacatagctgttaactttgtatggcaattcacctataacacatttaagaaagcattacaaaattcattatatgataattctacaaaagttttctcacatttaccaaagcctactaaagtccanagggcacaaatattggccaaatagttcttttatcttagacataaagatgtttttgctgntttttagaaccattaagatggctaagagaaccaactttacgagcttaactggtctcangcatctgaatgggggtgtggagaagtctcaaggttccaagaatcgcagntccttttttnggtgaaaaaataaaaccttggattggangcattcccgccaaangng

SEQ ID NO: 8112 - DNA, 593 bp, Homo sapiens
  misc_feature (495)..(495): "n" may be a, t, c, g, other or unknown
  misc_feature (497)..(497): "n" may be a, t, c, g, other or unknown
  misc_feature (525)..(525): "n" may be a, t, c, g, other or unknown
  misc_feature (537)..(537): "n" may be a, t, c, g, other or unknown
  misc_feature (558)..(558): "n" may be a, t, c, g, other or unknown
  misc_feature (585)..(585): "n" may be a, t, c, g, other or unknown
  misc_feature (589)..(589): "n" may be a, t, c, g, other or unknown
cctgctcatttaattatttttatttacacaactttttccatcatcatgatgcaaataagattataaatacacaaacactggagtacatgcaacacattccacaaaggaacaaaaatgtacagcactacagaatagagaacccaaatttttatatacaaagtgctttaaaaaaaaagaccttgtgacatattcaaaccatatttatttgaatactttccaataattaccatgggatacatcatttataaataatatttaatctcccctattttttcaagccagaatttgtgtttcaactaatcaagtgaacagccattccattatgtaatattaaaggcaagtcacatagcatcaaaatgaaaccggtgggcttcttgtcgtttttctctatcatctgctttcttttcctgccaatgtaaaatgccaattattgccaagatgaaaacacagacaccgatgagagctatagcagtaagcagaacaatattacttggngnaagatcagtttgggccttcaactttganggacattgtgangggatggaatgcaattagctngggaatttggaaggattgcggccactnttgntttg

SEQ ID NO: 8113 - DNA, 587 bp, Homo sapiens
  misc_feature (525)..(525): "n" may be a, t, c, g, other or unknown
  misc_feature (537)..(537): "n" may be a, t, c, g, other or unknown
  misc_feature (568)..(568): "n" may be a, t, c, g, other or unknown
  misc_feature (574)..(574): "n" may be a, t, c, g, other or unknown
  misc_feature (581)..(581): "n" may be a, t, c, g, other or unknown
gatttttgccttttgatgcctacagtaactgagaatcaacaaagtaactagtctgacatgaaaaatgtggtgcctatgatttaagtcctgatttgagcacatcttaattggtgcactattgcttttgataatccagatataacaacaggcaagcagtaataaatgaagagacttactatgtatcacacaagcaaggtttctgaattacaaataacttcaacaatgacatcaaaacctatgaattaaatcttaactcacgcggttataaagttaaattctcatgtgtcttagtgagaatgctatcatcaaatacattctaaattctttcattttttagtgtacaaaggttatgggagaaaggataaggtgctttttaaataagctaccactgactcacacacatccatacacgcatcagtgcaaactatgaaaaacactaattttaaaatgaaataatgattatctagactaaaaggagactttggaatagaataattttccatgactaatttggttaccaatatngatactcaatgnacatattgtcacgaaatattcaagaataccnttatcnctgggcnttaaaa

SEQ ID NO: 8114 - DNA, 566 bp, Homo sapiens
  misc_feature (13)..(13): "n" may be a, t, c, g, other or unknown
  misc_feature (27)..(27): "n" may be a, t, c, g, other or unknown
  misc_feature (32)..(32): "n" may be a, t, c, g, other or unknown
  misc_feature (39)..(39): "n" may be a, t, c, g, other or unknown
  misc_feature (66)..(66): "n" may be a, t, c, g, other or unknown
  misc_feature (138)..(138): "n" may be a, t, c, g, other or unknown
  misc_feature (167)..(167): "n" may be a, t, c, g, other or unknown
  misc_feature (175)..(175): "n" may be a, t, c, g, other or unknown
  misc_feature (180)..(180): "n" may be a, t, c, g, other or unknown
  misc_feature (212)..(212): "n" may be a, t, c, g, other or unknown
  misc_feature (218)..(218): "n" may be a, t, c, g, other or unknown
  misc_feature (242)..(242): "n" may be a, t, c, g, other or unknown
  misc_feature (391)..(391): "n" may be a, t, c, g, other or unknown
  misc_feature (423)..(423): "n" may be a, t, c, g, other or unknown
  misc_feature (439)..(439): "n" may be a, t, c, g, other or unknown
  misc_feature (487)..(487): "n" may be a, t, c, g, other or unknown
  misc_feature (501)..(501): "n" may be a, t, c, g, other or unknown
  misc_feature (560)..(560): "n" may be a, t, c, g, other or unknown
cctgttataaagngattttattaaatngattnggacatnctgtaggtcaaataatattttctgaanataacaattatggactttaaagctcgacataaaattagtagcttcaaaagggttagtcatattccccagcancagcatgataaaataattcaactatgtanaaatatanaactntaggactagctggaaactcggaaatcatttancctaangttctcattttgagagaaaactanactcaaagattaagcgatttgcccaagctcacatacctaatagtaataaagctagaaatcaaaccaatttttcctaaaactaaaattctatcaatgatatttcaactggctatcaactaaaagtctaggcttttctctaatgctccacnctattgtgacatgaaagagtgataagacactncagtaaatcgacttgnggaattcaggcctggagggggctttggcaaataactaagcccgccctnttttgtaaaaaggnggaaaagttctgaagggcttccaaagcttgttaccaaaaagtctggattaaatcccaanttgcca

SEQ ID NO: 8115 - DNA, 589 bp, Homo sapiens
  misc_feature (541)..(541): "n" may be a, t, c, g, other or unknown
  misc_feature (567)..(567): "n" may be a, t, c, g, other or unknown
  misc_feature (569)..(569): "n" may be a, t, c, g, other or unknown
ctgttatctgcaaataagcactttattaccaaatagttcagcatcagaacaagaattctaattccaaaagggtttctttacattacatgacattgtgagatacacattagaagaatctgagactatgttccatttcagtttctcttttgcaattaggtaatttgttttgatctaaaaagtacaaatttatctcattcttgttaatgctgtccatgaaatgtaagtatcagttccttctcagctagtgctttatagttatactggtgccaggttaagagacctattttatagtgagtgacatgaaagtcaactacaagaaaagcacattgtcattttcatttacagaggcaagtccctcttaacacaaagaaaagcaaaggaccttatgtgattatgtaaggcagatcagcccaggaatttcattcaaagataatacttcatactccataatcccatgtgagaaattaatgaatgactccaagtaaaaagaaaattaaaattagcccttgggccttgacaatttaattgccagggcctttgncaattctaaacaatggtctaaattancncaattctcagaatgattacc

SEQ ID NO: 8116 - DNA, 546 bp, Homo sapiens
  misc_feature (53)..(54): "n" may be a, t, c, g, other or unknown
  misc_feature (358)..(358): "n" may be a, t, c, g, other or unknown
  misc_feature (490)..(490): "n" may be a, t, c, g, other or unknown
  misc_feature (493)..(493): "n" may be a, t, c, g, other or unknown
  misc_feature (514)..(514): "n" may be a, t, c, g, other or unknown
  misc_feature (518)..(518): "n" may be a, t, c, g, other or unknown
  misc_feature (536)..(537): "n" may be a, t, c, g, other or unknown
  misc_feature (543)..(543): "n" may be a, t, c, g, other or unknown
cattttaacaacatttattacaaatcacattttataaacactagataaattanntataaaagctagacataaatataaagaagcaaaacaaaaacagcagtactattaatgcaagagaaataagctaatataatatttaaacacatataacttaataaaattaccaatttttcattgttaataatttttcataaattcaaaagctattcagaaatgaaatgtaatacattctgattactatcaaaggttagaattatagaaacaaccatagcactacttattttttaaaatcgtttcaaacattcagaagccaaatgactgtccttaaagacaaattaaatgggtaaaaggtcttatntaacagaagaatacaaaattttaagctttggttaataagataataagtgtagtggaaatttttaaattaacatctcccttatatgtaatattcctgagttggtggctcaaatatcataaagaacttagtttntanctttattataacattgcattntatntttgaaaaacaaaaaagnnttggtnttt

SEQ ID NO: 8117 - DNA, 594 bp, Homo sapiens
cctttagacatttacaggtatttatttgagtaagagctcataaaatatatttttataatatgcacaagaaaaaatacatttgaatgaataaaaaataaaatgacaggaggtgacagaatttagtgtttataaatgaggtcataaagaactttaataattcagagaagaagttcaaagtgtatttaaaagttgagaccctgctttacaatattttataattttaaaaaaaggcgtttaaaggtgataggtgacttaataattttccactttcaaaatgggtttctagacactgttgttcatgaaccaaaaacaaacaaacaaacaaacaacaacaaaacccaaacactttggcaagcaaagtattattagtacatagcagcttcataacagtttacttttttaatataaagatttttcaatttacacttgtaggagtagaaaaaactaatatgctaagtctgtaagctacgcagcaaaaataatgatcttaatgaagccagaattctgtgaaaatgtgcacccactgcatatatagtagctgagtaaatgtaaaccatgtgcttattaactcttctatataaaatatggaccccc

SEQ ID NO: 8118 - DNA, 562 bp, Homo sapiens
  misc_feature (447)..(447): "n" may be a, t, c, g, other or unknown
  misc_feature (472)..(472): "n" may be a, t, c, g, other or unknown
  misc_feature (496)..(496): "n" may be a, t, c, g, other or unknown
  misc_feature (512)..(512): "n" may be a, t, c, g, other or unknown
  misc_feature (529)..(529): "n" may be a, t, c, g, other or unknown
  misc_feature (533)..(533): "n" may be a, t, c, g, other or unknown
  misc_feature (548)..(548): "n" may be a, t, c, g, other or unknown
  misc_feature (558)..(558): "n" may be a, t, c, g, other or unknown
acagtataaccgttacattttattattagttattgttgtcaatctcttaaggtgcctaattcataaacttaatcacaggtatgtatgcataggaaaaaaacagtatgtataaggtttgttattatctgtggttttagacatccactgggggtctggttttagatatccactgtatcccctgtggataagggggtaactgctgtatcttttagtagaagcaagagcagccccatgtgggggctaacactggacactggtcagtttcagctcctcatgcaaagtgagggtatccttgtggctccagccctggggccccctgcggtcacctttggctccacagtctggttcttgaacccaagggcagacagcttgctacagcccaggcctgaggatgcacttcttcaccaggacccacaacccctgcccatgaagacctgtggagctcanggcatccctgatgcaagttggtcangacctgcccagcttgcaccaacanggtctgcgtcttcatntgaccagcagaccttgnactnttcaccactggggangactaaaggnttta

SEQ ID NO: 8119 - DNA, 549 bp, Homo sapiens
  misc_feature (419)..(419): "n" may be a, t, c, g, other or unknown
  misc_feature (437)..(437): "n" may be a, t, c, g, other or unknown
  misc_feature (477)..(477): "n" may be a, t, c, g, other or unknown
  misc_feature (482)..(482): "n" may be a, t, c, g, other or unknown
  misc_feature (487)..(487): "n" may be a, t, c, g, other or unknown
  misc_feature (526)..(526): "n" may be a, t, c, g, other or unknown
  misc_feature (540)..(540): "n" may be a, t, c, g, other or unknown
  misc_feature (542)..(542): "n" may be a, t, c, g, other or unknown
  misc_feature (547)..(547): "n" may be a, t, c, g, other or unknown
ctttttaggactattcaaagtaacaaactttttttgttgtttttttttgttttttacatttttgctctggtcataaatatacagagaaaaagagggagagaaaaatgaacaagtcatccaaagtatggagataaaacagtattcctaaggcacgtggcagtctttgaaaatacagaagctctagccaacttaaattatttgttgtttttcctcgctcagtccacaaaactgtacagtgacacaaatgttgtgttgcaggtagatcttccaagttgttcctcggtccacaccgctgcattagccgggcgcacacttcttttttttacctctgtttccaggcgagatcctaaaatgtggttaagttagttgctcaaagcctctattttaaaatacacttggaattcaactaaagataattncttttttaaagaaattgnggggtgaagggttgcgagtcattagaaaaaggttggtaanagtcnttgtnaggggcttaaggttatggccttccaggttgccagccccnaagttaagaccggncnccaantt

SEQ ID NO: 8120 - DNA, 536 bp, Homo sapiens
  misc_feature (445)..(445): "n" may be a, t, c, g, other or unknown
  misc_feature (453)..(453): "n" may be a, t, c, g, other or unknown
  misc_feature (492)..(492): "n" may be a, t, c, g, other or unknown
  misc_feature (494)..(494): "n" may be a, t, c, g, other or unknown
  misc_feature (499)..(499): "n" may be a, t, c, g, other or unknown
  misc_feature (504)..(504): "n" may be a, t, c, g, other or unknown
  misc_feature (516)..(516): "n" may be a, t, c, g, other or unknown
caagagacagggtcttgctttgttgcccaggctggagtgcagtggtgcaatcatagctctctgtagcctcaaactcatggccttaagtgatcttccttccccagcctcctgagtagctgggactacaggcatgtgtcaccacattttgtagagatggagtctcgctaagttgcccacgctggtctccaattcctgggctcaagtgatcctttcacctcggcctcccaaagtgctgggattacaggcgtgcctggccacagatgagaggatctctgcagcagatagtacttgtgggtgcgagacctgtccagggcttgatttgaggagaggagcctgaggcccctgcctgctccctggtgctcaggagctgttcttgggcccctgttgtttcctccgctgccggcccaactggcggaagtgcacccgtttggggttgaggccaaangcctgcantcttttggcggctgaactcgcattcaccaagcattacantnggggnccaanaacccggccttnttgggccttcttccgctttt

SEQ ID NO: 8121 - DNA, 565 bp, Homo sapiens
  misc_feature (436)..(436): "n" may be a, t, c, g, other or unknown
  misc_feature (474)..(474): "n" may be a, t, c, g, other or unknown
  misc_feature (526)..(526): "n" may be a, t, c, g, other or unknown
  misc_feature (562)..(562): "n" may be a, t, c, g, other or unknown
atttatgaaacagtttatttataaaaacagtcataagaaagcagaaagcaacttccactagctatgtgagattttgaaagttctcgaaatcagcttatgtaagagactatttccaataataacagaaggctacaaaaatgtcagaccaaaatagtaggcagaaggtagaaaactaaaccctgagaataatagtcattaagaagaccttgatgtagacattgcatatgagcatggagattcaggaaggaaattctggatgactggtggctgacaactttcaaatataataaatagagataggacttcaaaagaacttcaataggaatatatgattttatagtagcacctggccttacttagaataaaatcgtttgttacaactaaagccagcatacatgattcgcaataggagtaaacttgctatagacattcctgncctcaaatgattttaaaacccaattttctaagacctcntggaacctccagagaccacttggttaagttctggtatatctcatatttaaangctcaacacctgaaaagctcagggattggaaaactntga

SEQ ID NO: 8122 - DNA, 535 bp, Homo sapiens
  misc_feature (443)..(443): "n" may be a, t, c, g, other or unknown
  misc_feature (461)..(461): "n" may be a, t, c, g, other or unknown
  misc_feature (463)..(463): "n" may be a, t, c, g, other or unknown
  misc_feature (472)..(472): "n" may be a, t, c, g, other or unknown
  misc_feature (482)..(482): "n" may be a, t, c, g, other or unknown
  misc_feature (498)..(498): "n" may be a, t, c, g, other or unknown
  misc_feature (525)..(525): "n" may be a, t, c, g, other or unknown
gttaataatttgaagatgtttattgcattctatttttggtgggaaaaaaatgtaacatacatttatttagcacgacattgtgaaatacacaaaacatgtaactgagaaagcaggaattttctattcctagtccatttctgaggactaaatcatgaactgctcccaatgtaattaaatatttcttacaatagttgggcaccaagtttaagatttattaattttctcctctcagtataggcagcaattcaccattttctttcagttcctaaaaataaaaaacaacaataataatatgtatatgcatatataaaaagatggaaacatctaaacaatcacagcttgtatgtatatctgagaaccaaaagaaacacctattggattaaaactccagtctcttaacactctcaaactaaatgagccataaaccctgaatacactatcanggtaaaaaatttaaccangnattcttggncaagtgtggnggctccaaatgtaatnccagcacttttggaggcccaggtggcnaaacacttga

SEQ ID NO: 8123 - DNA, 573 bp, Homo sapiens
  misc_feature (521)..(521): "n" may be a, t, c, g, other or unknown
  misc_feature (537)..(537): "n" may be a, t, c, g, other or unknown
  misc_feature (539)..(539): "n" may be a, t, c, g, other or unknown
aggttctgccagaccaccttttattacatcagaaaagcaacactaggcactagatcttgcaaaatatgttctgaccaactctaaactgtctgaagttataaccatatcagtaaggtttttaatgaacaaaaaagttaaatacaaactttcatatgcaaaatagattattgtataactggcaacctcagagccaagtactaaattttcttccacaaatttcagtggggatggagtggggagatgttagtcttaatgagtagaaaacttaatttagacttaatatatagaaaacaaaaactctgaggaaaaatagctttaaattgaatagtatcttttgaaataaacagctcaggccagcccctacaattctgaggtttatactcaaccagatctgggatgaaaatgaagatttagggtttacagtacttcaaatccatgaatccagttggaagactaacccagtcaccacatttccagaaaggggagtctctttaaggggaccccacactttttcggaagangccttgggtaggtcanantcccttgggcacaagttccactggttacgggact

SEQ ID NO: 8124 - DNA, 584 bp, Homo sapiens
  misc_feature (469)..(469): "n" may be a, t, c, g, other or unknown
  misc_feature (497)..(497): "n" may be a, t, c, g, other or unknown
  misc_feature (510)..(510): "n" may be a, t, c, g, other or unknown
  misc_feature (520)..(520): "n" may be a, t, c, g, other or unknown
  misc_feature (550)..(550): "n" may be a, t, c, g, other or unknown
  misc_feature (561)..(561): "n" may be a, t, c, g, other or unknown
  misc_feature (580)..(580): "n" may be a, t, c, g, other or unknown
  misc_feature (582)..(582): "n" may be a, t, c, g, other or unknown
gggacggagtttcgtgttgttgcccaggctagagtgcaatggtgccgtctgggctcactgcaacctctgcctcccaggttcaggcgattctcctgccttagtctcccaggttcaggcgattctcctgcctcagcctcccaagtagctgggattacaggtgccaccaagcacggctaaatttttttgtatttttagtagagacggggcctcaccatgttggccaggctggtctcgaactcccgacctcaggtgatccgcccacctcggcctcccaaagtgctgggattacagacgtgagccacagcacccagccgggactgtttttactggaggagggggagaagacacacagtggggaaagcgttctttcaatatgcagatgcttcagggagaaccaaactatttcactggtattccccgtaccaccggaactggtgcttggagcggaagggaagtgagatcagtccantagtcaccaacaccattattagcattgnccaaaaagtcaanagccgacatnatggaataaaacacttgctggcaatttatntgccctttttnaactctcttatttttaggnanat

SEQ ID NO: 8125 - DNA, 605 bp, Homo sapiens
  misc_feature (157)..(157): "n" may be a, t, c, g, other or unknown
  misc_feature (337)..(337): "n" may be a, t, c, g, other or unknown
  misc_feature (402)..(402): "n" may be a, t, c, g, other or unknown
  misc_feature (423)..(423): "n" may be a, t, c, g, other or unknown
  misc_feature (450)..(450): "n" may be a, t, c, g, other or unknown
  misc_feature (459)..(459): "n" may be a, t, c, g, other or unknown
  misc_feature (517)..(518): "n" may be a, t, c, g, other or unknown
  misc_feature (539)..(539): "n" may be a, t, c, g, other or unknown
  misc_feature (581)..(581): "n" may be a, t, c, g, other or unknown
  misc_feature (591)..(591): "n" may be a, t, c, g, other or unknown
  misc_feature (597)..(597): "n" may be a, t, c, g, other or unknown
  misc_feature (603)..(603): "n" may be a, t, c, g, other or unknown
aaggaatatggttgcagcaaaacagaaaggatcccaaagtggttaggggccttgtctaatgcacttctgaaagtccattataaagatgaatagaaaagcaaatggtaggttttcagttgacccagaaaccacacatagctataagaaacataattgngcatagttatttattcattcagaatgtgatatgttggctagctctacattcccagtctaccaaagaacagggctgtctactttgctaaacccagggtcctttcgaagctcccagtaggtgtcgttagaaacccaggcttctctttgattggcatcaataacttttttaaaaaattttggnatatgttcaagattggtttcttccatatatcggctccgagaactctggagttcctctactcttgnttcttgaagctggaacttctnaaattccttttccaaaaactttgactnggccggaanccggccgtttgttggtggaaggagatcttttagtcctggactactcattgggctcaannccaaccttggggaagccctantccagttcatagttggtggcatggaacctggcttccaaagcnctttgcaaanggggcncacccnat

SEQ ID NO: 8126 - DNA, 508 bp, Homo sapiens
  misc_feature (413)..(413): "n" may be a, t, c, g, other or unknown
  misc_feature (415)..(415): "n" may be a, t, c, g, other or unknown
  misc_feature (433)..(433): "n" may be a, t, c, g, other or unknown
  misc_feature (450)..(450): "n" may be a, t, c, g, other or unknown
  misc_feature (453)..(453): "n" may be a, t, c, g, other or unknown
  misc_feature (481)..(481): "n" may be a, t, c, g, other or unknown
  misc_feature (503)..(503): "n" may be a, t, c, g, other or unknown
agacaagttacagtttaataatggtggtggtgattgtttctttcattttattattattatttttttacaataagggtgtagcctttatactccacacacacaaaataaaacaagtgcttattacgaaaagagtccctgcccccaccccctagaacatcctgaacatagcaattcaacagaacagaaaaatcaagacgtttgatttcaaaatttcaataaaaaagcaaaagtatgtaatgcaacagctgttcaacttccaactctaaataggcaccattaaacaaaaaaccccagtattttaaatttctccagcacacattccaggatcaatgctctgaactgtaatcagctagtaattcataacgggaatacagccttagaatggaagctatattgcttccctgccccctttntntacaattggaaagtgtanggattaagggatccaantcngaaggaggattatttaaaaggaaaatgncccaagctgcactgtttggctntggaa

SEQ ID NO: 8127 - DNA, 596 bp, Homo sapiens
  misc_feature (434)..(434): "n" may be a, t, c, g, other or unknown
  misc_feature (436)..(436): "n" may be a, t, c, g, other or unknown
  misc_feature (473)..(473): "n" may be a, t, c, g, other or unknown
  misc_feature (546)..(546): "n" may be a, t, c, g, other or unknown
  misc_feature (565)..(565): "n" may be a, t, c, g, other or unknown
  misc_feature (590)..(590): "n" may be a, t, c, g, other or unknown
gtttttagctgctttacttccaaaaagaaaaaaaggcatagctctctttttcaattaaacagaaaactacataattacgttcaaacactcactgaagagcctgcctcatgggaagggcagggctgtcgtgggaagagtcagctgcactttggcaccatctcaggtgcctgtccaagccggatctgaatgggactggtcaagtgaggggtcagtcctgcagtctgcgctcacacctcttctccagatctgccatctcctttaggaccagggccacgctgtaccgcagctcctggaacttggctgtggggacctcaaagcggtatgctgacccatctgaaagcttcagctgcatcaggacgctcggctgcagggagcgagccagggcactggtggagattgctacatcacccgccaccgaaagtcagcaacatgcngnaaccaagccccctgctgctgggcccagaatcaaggangggcccctggcttccaaataccacgcttggcaagttcccgaccaggtctttgggggatgcaaaacttctggancttgggcccgaaaaattangctttaggttgtgggggcaaacganggcctt

SEQ ID NO: 8128 - DNA, 589 bp, Homo sapiens
  misc_feature (50)..(50): "n" may be a, t, c, g, other or unknown
  misc_feature (94)..(94): "n" may be a, t, c, g, other or unknown
  misc_feature (130)..(130): "n" may be a, t, c, g, other or unknown
  misc_feature (132)..(132): "n" may be a, t, c, g, other or unknown
  misc_feature (158)..(158): "n" may be a, t, c, g, other or unknown
  misc_feature (289)..(289): "n" may be a, t, c, g, other or unknown
  misc_feature (456)..(456): "n" may be a, t, c, g, other or unknown
  misc_feature (483)..(483): "n" may be a, t, c, g, other or unknown
  misc_feature (535)..(535): "n" may be a, t, c, g, other or unknown
  misc_feature (537)..(537): "n" may be a, t, c, g, other or unknown
  misc_feature (555)..(555): "n" may be a, t, c, g, other or unknown
  misc_feature (561)..(561): "n" may be a, t, c, g, other or unknown
cataagtcagaatttatttcataccatctcacttatagcattttcaagtncaacattctgctcaacatcatttacacttgaaaacagaaaagcncaacttggtaaggcaccaggttacgatagtctggananaaggccttgctcccattttggcttgngtaatacctgggtagtttctcttgagtctgtcaagcagagaacaaggttataaaaggtccatttatacatacatggtaacaagagataacaaacagttttgaagtatgctgtatttataaattataatggnggcctacacttgtagttcagccaaagtggcattctctaaagcaaaattcttataaaatcttctctgcaataccaagctgcaagtttaacaattttttagctttgaagtgaaccaactttatatttaactcaaacacatactttaaaaacattttcgggcccaaactntatgttcacgaagaaaataaaaatggnggaaaatctcaggtttaatcggacctttactattctattaaatgccgcaatntnttttaaaaaccggtggcntttaanggcaaccccttgaattttaaccctaccg

SEQ ID NO: 8129 - DNA, 418 bp, Homo sapiens
  misc_feature (338)..(338): "n" may be a, t, c, g, other or unknown
  misc_feature (377)..(377): "n" may be a, t, c, g, other or unknown
  misc_feature (391)..(391): "n" may be a, t, c, g, other or unknown
  misc_feature (403)..(403): "n" may be a, t, c, g, other or unknown
  misc_feature (406)..(406): "n" may be a, t, c, g, other or unknown
  misc_feature (411)..(411): "n" may be a, t, c, g, other or unknown
  misc_feature (416)..(416): "n" may be a, t, c, g, other or unknown
atttgtacatctttattatttctaaagcactttcctcaacctaatttcagtttttacaattagtactcaagaaaatagagacagaaatcatttgattttgcccagaaaccatctgcttatatttataaggccacctaatttgaaatcacatatagaccaggcgcggtggctcacgcctgtaattccaacactttggaaggccaaggcaggtggatcacaaggtcaagagattgagaccatcttggccaacatggtgaaaccccgtctctactaaaaacacaaaaatcagctgggcgtcgtggcacgcacctgtagtcccagctactcgggaggctgangcaggagaattgcttgaacccaggaggtggaggttgcantgagccgaaattgngccactggactncancctgntgacnga

SEQ ID NO: 8130 - DNA, 589 bp, Homo sapiens
  misc_feature (505)..(505): "n" may be a, t, c, g, other or unknown
  misc_feature (514)..(514): "n" may be a, t, c, g, other or unknown
  misc_feature (531)..(531): "n" may be a, t, c, g, other or unknown
  misc_feature (543)..(543): "n" may be a, t, c, g, other or unknown
  misc_feature (555)..(555): "n" may be a, t, c, g, other or unknown
  misc_feature (561)..(561): "n" may be a, t, c, g, other or unknown
  misc_feature (588)..(588): "n" may be a, t, c, g, other or unknown
acatgcctcactttttattccaagaaaaatccccattatgcaatacaagggtgaaacagctgttacaaatacacagaaacataataaagataaccaacactgttaagaggaaggggaagaggaaaaaacccaagagaaggaaacttttccacagtgactagcagaatgtcttgtagataccaatgaccgaagacaaacaggttgctcacttcatcctatttatcaagtcatcctatctaaaatgagaatagttcatgcctaggataggctaactataggctttgctagtcctccttcctaatagaatgccctcagattattcctgagctatcactcaagtcacagatacttcagaatataatcttaggttttgtaaacaggaacatggtcaaaatgcaatacaatgggaaaatctctacaagagaatgagatttggaaagccatgcttaaagtctctgagccacacaacccttaagaatcttcgagtaccgtttaatctctcatncaggaacanttttcctttacccttgnaaggttgtgaanaaatgaattgcnttattntgccagaaagctttcccatggaagggna

SEQ ID NO: 8131 - DNA, 481 bp, Homo sapiens
  misc_feature (57)..(57): "n" may be a, t, c, g, other or unknown
  misc_feature (434)..(434): "n" may be a, t, c, g, other or unknown
  misc_feature (466)..(466): "n" may be a, t, c, g, other or unknown
  misc_feature (470)..(471): "n" may be a, t, c, g, other or unknown
  misc_feature (475)..(475): "n" may be a, t, c, g, other or unknown
  misc_feature (477)..(477): "n" may be a, t, c, g, other or unknown
  misc_feature (479)..(479): "n" may be a, t, c, g, other or unknown
aaagtgaaaaaatcttttacactttatgtaaatgatacttaagtatgacaaagaggngataattcaagttcgtaactagtaagtcactaaaaagataaatgcattcattcatgtaccacaaaatcagagaagacacgaggacatgccgcagtcagtgaaatagccgagaaatcaacattttactagttattttgtcccaaactattaccatgtgtgtttggtatgttaacaatttaaatatccacattaggctaaacaacaagcacctgtcagcagtggaaaccaaaacattttgatgctaaaaaatatacaagatatttagacgctatttcattggttgtcaaaaacagtgactactgccaaataattaaatttaaaatattgtgccaggtcctctcagggaaatgtgaaaataatactgacgatctcattgncattgctggtattttactggaatttaaccaanggcnnaagntntnaa

SEQ ID NO: 8132 - DNA, 571 bp, Homo sapiens
  misc_feature (67)..(67): "n" may be a, t, c, g, other or unknown
  misc_feature (484)..(484): "n" may be a, t, c, g, other or unknown
  misc_feature (486)..(486): "n" may be a, t, c, g, other or unknown
  misc_feature (498)..(498): "n" may be a, t, c, g, other or unknown
  misc_feature (502)..(502): "n" may be a, t, c, g, other or unknown
  misc_feature (532)..(532): "n" may be a, t, c, g, other or unknown
  misc_feature (547)..(547): "n" may be a, t, c, g, other or unknown
  misc_feature (551)..(551): "n" may be a, t, c, g, other or unknown
cctgaattagaagaatatgtattgaaccttctcttgaacagaatgacgagccttttgaagatttttnatttaaaggtgttatgttcttaaatggcattaaaaagttacgaaaatccatcagtacagattttagtgaaggttgctccattccaactggtaaaacacagaagtaaaatgccagtctcaggggatctcaaaaattcaggggaagagtcagtatgtgttccaaatttaaacaatctctaccaaggagttgcctcatagtgtttatttaaattctaaatcaagcatggaagttttcagaatatttgatattttcataaaatgtccttggaatacaaaactaataaattcaatgaagtgccacaccgcccagggtttacctgcaaaatctcagccctgactgaacaaagcccaacaattttgtccaaaagggagggctggtattttcttttccctgataaagaaaccagtggagaaagcncnatgttcccttangctnaattcatggttaagggcttttccccaagancttgttttaaggccngctngataagaagccttcctttgg

SEQ ID NO: 8133 - DNA, 592 bp, Homo sapiens
  misc_feature (51)..(51): "n" may be a, t, c, g, other or unknown
  misc_feature (509)..(509): "n" may be a, t, c, g, other or unknown
  misc_feature (551)..(551): "n" may be a, t, c, g, other or unknown
  misc_feature (562)..(562): "n" may be a, t, c, g, other or unknown
  misc_feature (570)..(570): "n" may be a, t, c, g, other or unknown
  misc_feature (574)..(574): "n" may be a, t, c, g, other or unknown
gagctttaaactgtactttaattttcaataactgtaacctactggttaatngaaccaaacgtagagtatttaaatgactcactatgaagtgtgtcaaatcaatgatagaatgcatagaaaagtggagataagtttgggggaaggtgcaaggtgggttaatgtgaaaaacggtaaatgccagttttaataacaaaaatggtactaaacgcagatgaacattaaattaatacagtataaaagagaacagcttaaataaactggtattcacatattacaatagcaaagttatgacagaatgaactgaagacacgaacagttttgaaaattctcttttcagcctacttccaaatagaaatagtcaggcttttttcctgtacatagtttgatgctttgtctataccatatatagtagaaaaataaaattctttagcaacctagaaacagttataaaaactcttaaaggttaatttttctttgccagacatgccaattgttaaactgggccactnttaaattaaagcttttttgaccatagggtttaagtaattttnacagggttagnaatcctcntttncggattttttttaaaaaa

SEQ ID NO: 8134 - DNA, 463 bp, Homo sapiens
  misc_feature (457)..(463): "n" may be a, t, c, g, other or unknown
gggtggagcgggtactttatgaataccacagggacaaaggaaggctgctcttctcacacactgctgaatctccggatctccgcaaggtcatagccagtcacagcaaaggagttgcctgaggaatcacaaaatcgagcaccacacagctgggtgtcggcgacacactcaccatgacagtgttccacctcaatgtagccactctctgggtttctgctcagcttccagatatgcacaaaggtgtcctcacctgcagagagtagcttgcccacctcagaagccaggtccagggcgcagatggcccgggcatgggcattgatctggacatgtagatttcctgtagtggcctcatatagatgcacttgtccgttcccatagcctgctgctatgatcccctgccacagctgcacagaggggcacggaactccaaatcctggaatgcgggtcaataatgtgaatnnnnnnn

SEQ ID NO: 8135 - DNA, 588 bp, Homo sapiens
  misc_feature (500)..(500): "n" may be a, t, c, g, other or unknown
  misc_feature (502)..(502): "n" may be a, t, c, g, other or unknown
  misc_feature (505)..(505): "n" may be a, t, c, g, other or unknown
  misc_feature (545)..(545): "n" may be a, t, c, g, other or unknown
  misc_feature (549)..(549): "n" may be a, t, c, g, other or unknown
  misc_feature (582)..(582): "n" may be a, t, c, g, other or unknown
atggaagctattaagctttattttttaaaaactgaattgtatttacaatgtagaacaagtctataaaattgatgtgcagttaattgtaaaaggataacactatttgtttagaaacaagctgcttcctctgtttatatttccttattcttgatataaattggagacagatactatttaaaaataatgctttttaaatagtaaaatatacaagagattcctgagcataacaaaaatatcttgaaaatatgtggctatttgaagtataaaatagcaagtgtaagaatagcatgattgtaaaactactgtttgaaggcttataaacagtacaaaatagtttgccttttctgactgcataattatacattagtgcaaacaaaaatgtctcaaaatttaatggctacaaatctcaaagatttgcagaggtgcgcaaaacatggaatttctttagcgtcatgcgaactgacccagtctcgattaatccctttcaaacgatcttccangnttncggattaatcttggctgtaaagtggattcgtcctcaaganaagnattctgcttaacgctgcctaatctgggcctttnttttgg

SEQ ID NO: 8136 - DNA, 573 bp, Homo sapiens
  misc_feature (445)..(445): "n" may be a, t, c, g, other or unknown
  misc_feature (497)..(497): "n" may be a, t, c, g, other or unknown
  misc_feature (500)..(500): "n" may be a, t, c, g, other or unknown
  misc_feature (503)..(503): "n" may be a, t, c, g, other or unknown
  misc_feature (511)..(511): "n" may be a, t, c, g, other or unknown
  misc_feature (514)..(514): "n" may be a, t, c, g, other or unknown
  misc_feature (549)..(549): "n" may be a, t, c, g, other or unknown
  misc_feature (552)..(552): "n" may be a, t, c, g, other or unknown
gccaaattgaatcaaccccaatgttttatttaatttaaagttttaaaaggcagtggttaagcacattatgtatatatgtatatatatgaatgtatgtacgtgtgtatatacatacatatatatacaggaaaccaaccccttttcaactttagccactgatgagctaggcccactgtctagtgcatgactcactttctacttcttcataggaccaattctaaaagtaaaaataaacaccctttatcagtttaacagtaactaattgtgtttcttttttttaaataaataaagttactattaaactgatcacatatggtagaaacgtagaactcacacacacaccagcacacacagtccccaatttaaaatgtgatgtatgaatgacctatatgtacaaatgggtgctgctgacttccccaccccaagcagaggccatgaaagactnccattacttcagggagtccccattctctatgctgggatggaggatgtgtggngtnctngcaccccnggntagaacttagaatgcacacttcccatgcgctgatncanatggggggtcaattctatggg

SEQ ID NO: 8137 - DNA, 345 bp, Homo sapiens
  misc_feature (37)..(37): "n" may be a, t, c, g, other or unknown
  misc_feature (39)..(39): "n" may be a, t, c, g, other or unknown
  misc_feature (146)..(146): "n" may be a, t, c, g, other or unknown
  misc_feature (238)..(238): "n" may be a, t, c, g, other or unknown
  misc_feature (271)..(271): "n" may be a, t, c, g, other or unknown
  misc_feature (294)..(294): "n" may be a, t, c, g, other or unknown
  misc_feature (301)..(301): "n" may be a, t, c, g, other or unknown
  misc_feature (303)..(303): "n" may be a, t, c, g, other or unknown
  misc_feature (310)..(310): "n" may be a, t, c, g, other or unknown
  misc_feature (333)..(333): "n" may be a, t, c, g, other or unknown
  misc_feature (339)..(339): "n" may be a, t, c, g, other or unknown
gaaaccaaaccttttattcactttaattcaattaaangntactgagcaagggcttactcaataaaatcaacaatgaaaaggccagctggccaggcaccgtagctcaggcctgtagtcccagcactttgggatgccaaggcaggctnatcgcctgatgttaggagttcgagacagcctggccaacatggtgaaaccctgcctctactaaaaatacaaaaattaggctgggcgcggtggntcatgcctgtaatcccagcactttgggaggccnaggcgggtggataaccaagtcangagatcnanaccatcntagccaacatgatgaaaccccgnctttantaaaat

SEQ ID NO: 8138 - DNA, 592 bp, Homo sapiens
  misc_feature (393)..(393): "n" may be a, t, c, g, other or unknown
  misc_feature (410)..(410): "n" may be a, t, c, g, other or unknown
  misc_feature (443)..(443): "n" may be a, t, c, g, other or unknown
  misc_feature (454)..(454): "n" may be a, t, c, g, other or unknown
  misc_feature (458)..(458): "n" may be a, t, c, g, other or unknown
  misc_feature (469)..(469): "n" may be a, t, c, g, other or unknown
  misc_feature (477)..(477): "n" may be a, t, c, g, other or unknown
  misc_feature (523)..(523): "n" may be a, t, c, g, other or unknown
  misc_feature (532)..(532): "n" may be a, t, c, g, other or unknown
  misc_feature (552)..(552): "n" may be a, t, c, g, other or unknown
  misc_feature (561)..(561): "n" may be a, t, c, g, other or unknown
  misc_feature (566)..(566): "n" may be a, t, c, g, other or unknown
  misc_feature (571)..(571): "n" may be a, t, c, g, other or unknown
  misc_feature (582)..(582): "n" may be a, t, c, g, other or unknown
ggatttaaaaacactttatagtgtgttgtttttattgagcgctcacacccgaaggggtggcggcggatgctgtgggtgagtggggccgcctgagcctgctcgggccacatccacacatccacagagtccacctggactcggaggaaggccgagaggacacggacggtggccacaccacgctgcagtgaaggcccaagtgtgatggcagagaaagagggaaagttggagaaagagcggtatctgacaataacttttctcttggatgttaattttttggtctataaattggaaaggaaggctcggactgaaataaatacatttattctgagtaatgaccttttgggagcagtgtccgtcaactctgcttcgagagcgtctccacgtgagcagcancgcctgtctcgcgcctngccgaggcggaaccacaccggccttcaacggangcgggtttctnctgngtcttgtgaanggaaatancaggtgcgtactggtcttaatggaaccggacaatgaaggccttttnttttgacanaaaaatgtccggcttaactnttccaaganaaganttggncctaacgtttncgttttttat

SEQ ID NO: 8139 - DNA, 588 bp, Homo sapiens
  misc_feature (484)..(484): "n" may be a, t, c, g, other or unknown
  misc_feature (486)..(486): "n" may be a, t, c, g, other or unknown
  misc_feature (509)..(509): "n" may be a, t, c, g, other or unknown
  misc_feature (511)..(511): "n" may be a, t, c, g, other or unknown
  misc_feature (543)..(543): "n" may be a, t, c, g, other or unknown
  misc_feature (553)..(553): "n" may be a, t, c, g, other or unknown
  misc_feature (578)..(578): "n" may be a, t, c, g, other or unknown
  misc_feature (584)..(584): "n" may be a, t, c, g, other or unknown
ctaattttaagttccaggatacaagtgcagaacatgtaggtgctatatagataaacatgtgtcatggtggtttgctgcacccatcaacctgttgtctaggttttaagccctgcgtgcattagctatttgtcctactgctctgcctcccctcgacccccacccctcttaaaattctttttattttccacactgagtcttcaaagtctggtgtgtatcatacagcacatctcaatagccacatgcaggcagggcgcggtggctcacgcctctaatcccaacactttgggaggtcgaggtgggcattggacgatgcaggtctggacaagtgcctggtatattgtgggcacaattcttgaatggacccacgccaatgtacgcgtcgcttttgcctgggccgttccttcttcctagaatgtcctgcttctttctctttgctaactcatgtgaatgaactttttaaaaaattagtatccttcaaaactgnanttgcttaagcgttctgaagtgangncctctgacttttcaagtgccggtgcttcttgntctggggctnttaacttcaaaagttggtctgctgngcctanttgg

SEQ ID NO: 8140 - DNA, 584 bp, Homo sapiens
  misc_feature (447)..(447): "n" may be a, t, c, g, other or unknown
  misc_feature (483)..(483): "n" may be a, t, c, g, other or unknown
  misc_feature (517)..(517): "n" may be a, t, c, g, other or unknown
  misc_feature (546)..(546): "n" may be a, t, c, g, other or unknown
  misc_feature (566)..(566): "n" may be a, t, c, g, other or unknown
aggtaaaagttggtggctttattcttcctgctctataagcagatccaggccctagaaagatgggaccagggtatataattgtttttgaaaagtgtgctacaaaaatggatggcctgttataagccaggatacaaagttaaggatgggggtaagggagggacattttcttccagaagaaaagacagaatttctgaagagtcccagtccataattttcccaaaatggttggaggagagggtaaaatctcaacatgagtttcaaagtactgtctctgtgaggggccggtagatgccttgctgaggaggggatggctaagtttgaccatgccccatccccagctaggagaatggaaatggaaagtttattgcccagtgggtgtgaaagtgggctgaagcttggttggtactgaattctctaagaggtttcttctagaaacagacaactcanactcttcctctcacttcagcaaagaagttatttttnaaagcccttgggaaagttcctcctccacccgcangtgggaaggctcaaaaaagggggcattantccagccgcttttaggccgnaccggaattcctgaaggt

SEQ ID NO: 8141 - DNA, 570 bp, Homo sapiens
  misc_feature (33)..(33): "n" may be a, t, c, g, other or unknown
  misc_feature (431)..(431): "n" may be a, t, c, g, other or unknown
  misc_feature (455)..(455): "n" may be a, t, c, g, other or unknown
  misc_feature (512)..(512): "n" may be a, t, c, g, other or unknown
  misc_feature (518)..(518): "n" may be a, t, c, g, other or unknown
  misc_feature (535)..(535): "n" may be a, t, c, g, other or unknown
  misc_feature (556)..(556): "n" may be a, t, c, g, other or unknown
  misc_feature (561)..(561): "n" may be a, t, c, g, other or unknown
  misc_feature (566)..(566): "n" may be a, t, c, g, other or unknown
acatttatcatgtaatttaatctgcttttttgnatattagcttttacatatagaatcgggtatctcaggatccctaatatataaaagacccgcataagaaaaaaacatttgatgatatgcataaaatcacaaccacaataattggaccataattagactagttaagagatgaggaatatatgctcatttgtaagcgataagtgattatataaagagaaaacatgggttaagtaacacagtaacattaatttttgtatataaacaaattagttatctcaagtccttaaaagtttacatctaaaaaaacaggtcaagatgaagaaataactttgtagtttaaacttccacatgtgctcctttgggtggttttgccttggattttgcttcctttgaaatctttccattttgacattgagtaaatctggctctgnagaaacaccatccacaaacttggntttgaaaagaacgtttgcattggtgacatccttcttttagggacccccatgaactgngaatgngtgaaatgggtccccanattggccatgtttgggatganaagancaagnttct

SEQ ID NO: 8142 - DNA, 582 bp, Homo sapiens
  misc_feature (58)..(58): "n" may be a, t, c, g, other or unknown
  misc_feature (258)..(258): "n" may be a, t, c, g, other or unknown
  misc_feature (415)..(415): "n" may be a, t, c, g, other or unknown
  misc_feature (474)..(474): "n" may be a, t, c, g, other or unknown
  misc_feature (491)..(491): "n" may be a, t, c, g, other or unknown
  misc_feature (515)..(515): "n" may be a, t, c, g, other or unknown
  misc_feature (528)..(528): "n" may be a, t, c, g, other or unknown
  misc_feature (559)..(559): "n" may be a, t, c, g, other or unknown
  misc_feature (565)..(565): "n" may be a, t, c, g, other or unknown
gccttcttattttaataggatcatgtctctcactttacaaattctcaaaacatatggntccctttttacatacatatataaacacttttaaacataaatatcaaatgcatgagaatcatgtgggcagataaatttaggaagccaagaacacagaacgaaaagccagtcaccagatcttacaaataatcatctaaacttctctggccattcaatttgatacattatcccaaatattccatgtcacatggtccacaaggntttcttttgggattctgaagcaatcaatagccatacttgtcattaagatgggttctgccatctccactttgaccttcaggtgggacccacacacagtagtctgggtcatcttcaggatatttggaagaaagtgttggtggaagtttgcctggaccangtgttttctttttcttcaattcacctctgcttttctcatattcattctttgatgctganggtcctgcgcacaatgnaatgggtttgctacaggcctgganaacttaatccggncttcctcgcttaagtgaaacatggtttcatngggttngggttctttaaaagggg

SEQ ID NO: 8143 - DNA, 576 bp, Homo sapiens
  misc_feature (15)..(15): "n" may be a, t, c, g, other or unknown
  misc_feature (93)..(93): "n" may be a, t, c, g, other or unknown
  misc_feature (128)..(128): "n" may be a, t, c, g, other or unknown
  misc_feature (152)..(152): "n" may be a, t, c, g, other or unknown
  misc_feature (180)..(180): "n" may be a, t, c, g, other or unknown
  misc_feature (270)..(270): "n" may be a, t, c, g, other or unknown
  misc_feature (351)..(351): "n" may be a, t, c, g, other or unknown
  misc_feature (415)..(415): "n" may be a, t, c, g, other or unknown
  misc_feature (526)..(526): "n" may be a, t, c, g, other or unknown
  misc_feature (542)..(542): "n" may be a, t, c, g, other or unknown
  misc_feature (559)..(559): "n" may be a, t, c, g, other or unknown
  misc_feature (572)..(572): "n" may be a, t, c, g, other or unknown
  misc_feature (574)..(574): "n" may be a, t, c, g, other or unknown
ccagtttgaaagctntaaatttactcagcttatactgaaaggaaatgaagtctatgtccaaataggaaacaatgtggagtactgctgtgctgngccttcattacctgagactacagcagcctgcattntccaccgggctcggaggagtgcanatgcctgaggtaaatgccccagggtctnttcaacagtaacccaccccactgataagttacatgatacgtgtgtggtgcctgtgagtgcttcctgtggaaaggcagggtgaaaaaaatntgacaggattttatttgatttctccgtagttcttctcagggtttatcttgatgtaaacttgaaatattaagatagccagtncagtaagaaatcaaaagaatgggagacatttaaaaactctctatattctaaacttctctttagngttggaataattgtaaaaaaaaaaaaagttggccctaagtctgcctttataggggccacattaatttctaaattcttggatttctaggtaagtcagggaaaaggcaatttntttaacaggcagcccnatcaagggtgcttttanccctggaacctanangg

SEQ ID NO: 8144 - DNA, 563 bp, Homo sapiens
  misc_feature (56)..(56): "n" may be a, t, c, g, other or unknown
  misc_feature (381)..(381): "n" may be a, t, c, g, other or unknown
  misc_feature (499)..(499): "n" may be a, t, c, g, other or unknown
  misc_feature (503)..(503): "n" may be a, t, c, g, other or unknown
  misc_feature (512)..(512): "n" may be a, t, c, g, other or unknown
  misc_feature (514)..(514): "n" may be a, t, c, g, other or unknown
  misc_feature (527)..(527): "n" may be a, t, c, g, other or unknown
  misc_feature (538)..(538): "n" may be a, t, c, g, other or unknown
  misc_feature (562)..(562): "n" may be a, t, c, g, other or unknown
gatgtgcccaatcaattcttggtttattcttttccaaaaagtaaaataaccaaagncttaaaagtacacaaaacagaccttcatctttgcattcctttccaaataaacccaaaaagtatgtacagcatgtttaatagtatgcaatatgcaaaagctttgtgttgctgttagcaacatctatacccacccaccctctttattcacaagtgtacctctgctaaccataattacatcactaagcctgttagtttgagagggtcttaaatttgttaaaactggaaaatctttgtataggggctccattcatttgactcaaggttatagacttccaccgtattcagaaattcattgccatccgaatcctcccactgcataaatggngtccctacagttgcaatcccagcattgctccttggtgaagcatatttcccatcatcttccattcatttctagttgggatcatacattttcccacaactgatggcatgagaaccatcanaggnccccacatncnaacagggtttccnttaagaacagncacttccagttcttgcctagcccnc

SEQ ID NO: 8145 - DNA, 578 bp, Homo sapiens
  misc_feature (480)..(480): "n" may be a, t, c, g, other or unknown
  misc_feature (496)..(496): "n" may be a, t, c, g, other or unknown
  misc_feature (507)..(507): "n" may be a, t, c, g, other or unknown
  misc_feature (529)..(529): "n" may be a, t, c, g, other or unknown
  misc_feature (557)..(557): "n" may be a, t, c, g, other or unknown
  misc_feature (574)..(574): "n" may be a, t, c, g, other or unknown
caatttattgctagaattttatttggttgttagaaaatctgtaagggtgtatatatattaaaaaaaggtgtggggtgagagtggatggaaggcagtcagaagggtgagagttattttcaagttacctaaagtgccaggctaatttgttttaacctttccaagaaagtgaaactgagcataagctataatgagataaggggacacattcatgggaaaagacttcatcttgctttaactaaattttaatacttctggaaaaaaaatttaagtttggttaataccaagctgaacatcatataaagaaaaaaaaaaacagcccttaaatgtttaagggtaccggactgtatccatggtgaagggctacctgaacaaagttaaaaaggaaatgatctccactaaagaagtctgtggcatgacagctttctctactttctccctgacttggcctataccaaagttaagtttttggagttttttttncccttcaagttgttgnccaaaaactgntttttaagaccacccagcattntagactcaccttcccggaacatggaggnattattccttcaactanggaa

SEQ ID NO: 8146 - DNA, 563 bp, Homo sapiens
  misc_feature (100)..(100): "n" may be a, t, c, g, other or unknown
  misc_feature (432)..(432): "n" may be a, t, c, g, other or unknown
  misc_feature (437)..(437): "n" may be a, t, c, g, other or unknown
  misc_feature (471)..(471): "n" may be a, t, c, g, other or unknown
  misc_feature (474)..(474): "n" may be a, t, c, g, other or unknown
  misc_feature (506)..(506): "n" may be a, t, c, g, other or unknown
  misc_feature (551)..(551): "n" may be a, t, c, g, other or unknown
  misc_feature (556)..(556): "n" may be a, t, c, g, other or unknown
  misc_feature (560)..(561): "n" may be a, t, c, g, other or unknown
caggctgaagaaatcgtttaatccattttaaagaaatctcacatgatgttctgtcgggattaaaaatatacacggaaaaaaataaaacaaaatatatacncagaaagaagctcgcacagagtcaggcgtgcagcaacgtcacacactcattcctttctgtttcctctggacactcaaaatgtgaaagcaagtaagaggggggtggttaaccaaaccttttggtccaaggaataaaatttctttaaaaaatttaaaacgtcaaaacctgccagaataagacaatagaagagcgtatcgtcaggcgctgggaatggcaccacgacaaggcattaatgtggattcacttgcacagctgctctcataaaagctacacgattcagaggtaaccctaactatccgcaatcccaaccaaagtcatgttcatgccgctgncctantctgggacaatcatctgcacttattcaacacagnttnttccgaatgggccagtcccagcaacaagggtnattcagcaggcgttttttaccggactcatgatgggattcattttnaaatncttnnac

SEQ ID NO: 8147 - DNA, 591 bp, Homo sapiens
  misc_feature (514)..(514): "n" may be a, t, c, g, other or unknown
  misc_feature (525)..(525): "n" may be a, t, c, g, other or unknown
  misc_feature (580)..(580): "n" may be a, t, c, g, other or unknown
  misc_feature (591)..(591): "n" may be a, t, c, g, other or unknown
gtttttaatcaatacatatttattgagtgcctactgtgtgccaggtgcaccacactagatgcaacggatactaacagtaaataagatacggtccctgccctcagagcttacatttcaacagtttaaagtgcatctcaggtatttcagataacagaagtaattctaccactctcaaatttttttttttaatgcaagacacaacacaatcataggccagagttataaaatacaatgttagaaagaaacgtttggtatcattcgtccagatcccattttacagaaaagaaactacaggagtggccatttgcacctatgttctgatttcaagtttggtgttttacccattgccaggcctctcataaaacaatattcagatttgccatgtatatatcaatatccaaacgctggtagtatacctgtgcaagttgtctcctgctagacaaggaccatataatttatagcttatttaagtgtccactttctttatcccatcctattctttggggataaaccngaagggatcanggttaacccaaggcttaacttttggggcaactttattgccctaaggattcaaaangggccaccggn

SEQ ID NO: 8148 - DNA, 575 bp, Homo sapiens
  misc_feature (462)..(462): "n" may be a, t, c, g, other or unknown
  misc_feature (486)..(486): "n" may be a, t, c, g, other or unknown
  misc_feature (498)..(498): "n" may be a, t, c, g, other or unknown
  misc_feature (505)..(505): "n" may be a, t, c, g, other or unknown
  misc_feature (537)..(537): "n" may be a, t, c, g, other or unknown
  misc_feature (573)..(573): "n" may be a, t, c, g, other or unknown
acttttttcaatttttattatggaaaatttcaaacatatacaaaagtatagagaatagtataatgaactctcaaacatccatcacacagcttcagcaattaccaatttatggccaatcttgtttcatctatgtactcaattaccccacactcagatgattttgaagcgaataccagtaacatatcatttcacctgtacatttttcagtatacttctctaaaagataatcattttttaaaacaacataaccacagtaccatatcacatcttaaaaaacaataaatcaagaagttatatttttatttcaaattatgtaacaactggggacacaatcaatacatttcactggtatcatgaggaagagtgtcacactaaaatggagtccaagcttttatcgatgcaattgctttataatataaaagaaaaaatcaaacaaactagcatattagaaccacttttggnaatttgtaaggagctgaagactgntgatatcccatnccatggngaactccgtagaattcttctaacatctttggnatttcttaaaatgggtctggaggcactgatgcaagncc

SEQ ID NO: 8149 - DNA, 591 bp, Homo sapiens
  misc_feature (481)..(481): "n" may be a, t, c, g, other or unknown
  misc_feature (511)..(511): "n" may be a, t, c, g, other or unknown
  misc_feature (578)..(579): "n" may be a, t, c, g, other or unknown
gagatagagtcttgctctgtcgcccaggctgaagtgcagtggcgcaatctcagctcactgcaacctccacctcctgggttcaagagattctcctgcctcagcctctcgagtagagtacctaggactacagatgcacaacaccatgaccggctaatttttctatctttagtatagacgggatttcaccatgttggccaagctggtcttgaactcctgacctcaagtgatcagcccacctcggcctcccaaagtactgggaatacaggcatgagccaccatgcccggccaggaagattttcaaataaatggccataattcagtgttctgagctctgtaacaaggtgtacactaagtggtaggggagcagaggcagggatgtctgtcttatcctagagggaaagacaggggcaggataagctttttgaggaagaagtttgagtctaatccttaaggaagaacatgttgggaacatttgagactnttaagcagtcacaggcacatgggaaaaggnagtttctgactgcaaaataaataccggtaggagaaaagggaaaattgactggatttggatgacccgnncctttaaatttc

SEQ ID NO: 8150 - DNA, 597 bp, Homo sapiens
  misc_feature (420)..(420): "n" may be a, t, c, g, other or unknown
  misc_feature (449)..(449): "n" may be a, t, c, g, other or unknown
  misc_feature (504)..(504): "n" may be a, t, c, g, other or unknown
  misc_feature (533)..(533): "n" may be a, t, c, g, other or unknown
  misc_feature (541)..(541): "n" may be a, t, c, g, other or unknown
  misc_feature (544)..(544): "n" may be a, t, c, g, other or unknown
  misc_feature (562)..(562): "n" may be a, t, c, g, other or unknown
  misc_feature (570)..(570): "n" may be a, t, c, g, other or unknown
  misc_feature (597)..(597): "n" may be a, t, c, g, other or unknown
ctttgtttatcctctctttcctacatgatatctgctattttctgattcctgtttctctgaaacattcaggaattaagtgacgaacgcagagaactgtaagccgccttggcctccaataacccagtttccttgtgaggctcttaacatctccacacacacacactcgcacacacctgatgtggaaatcaaaggaaaaagaaaacaaagccaaatgttgtgttaatcccgccccgccccacaaacccttaaagtcttaaataggaaactagtgttctgctttctcattaaaacacagaaaaggctcgatacaatactaaggtggatacaatactatgtcgcacaaacgtcgttgagtgaggggcctctgctcccagtccctgaagttctgcaaaggaatcacctactttcacgagtcacctnacagatgccggttgcccacagcccgggangccatgcacacgggcaggcgccgtgaacattttcccgtgcggtaccagactttgnggcatgtggctttaagtgctgatggggcngggtggcnttnaggacggcaggagccccntaatgatntgggtgaagtcatgggctcctcccccn

SEQ ID NO: 8151 - DNA, 564 bp, Homo sapiens
  misc_feature (487)..(487): "n" may be a, t, c, g, other or unknown
  misc_feature (489)..(489): "n" may be a, t, c, g, other or unknown
  misc_feature (522)..(522): "n" may be a, t, c, g, other or unknown
  misc_feature (550)..(550): "n" may be a, t, c, g, other or unknown
  misc_feature (557)..(559): "n" may be a, t, c, g, other or unknown
aaaattaaaaatgttttattggctattgcctttaatagatttactacaataaaggaaaggaatatttttctcaaatgtgctaataagaaaaagacccaggaaactgaacgatattggacacagttttcagtgttttagacataaataaactcatgaatttcatatggattctggaatatttaccactactcccctaacgatgcatttagcatagaacaaaaatatgaacatttgaacaagtccaatctaacacatttcaaaacaatcagatctttggaaaactgttttccataagtaccccttgccattcatggaagagttatgaggatgcccatgaatttattcatggacactcccatactaagaaaaagaaaaccatgtagatgggtaatataatttgactatttgttcccgcccaaacctcaagttgaaatgtaatccccaatactggaggtggggcctggtgggaagtgtttggagcacaaangnggatccctcatgaatgggctgggccttcccttnggggaaaaagacttcttggtctgaagcntgggccnnnctttg

SEQ ID NO: 8152 - DNA, 578 bp, Homo sapiens
  misc_feature (81)..(81): "n" may be a, t, c, g, other or unknown
  misc_feature (91)..(91): "n" may be a, t, c, g, other or unknown
  misc_feature (121)..(121): "n" may be a, t, c, g, other or unknown
  misc_feature (234)..(234): "n" may be a, t, c, g, other or unknown
  misc_feature (237)..(237): "n" may be a, t, c, g, other or unknown
  misc_feature (447)..(447): "n" may be a, t, c, g, other or unknown
  misc_feature (452)..(452): "n" may be a, t, c, g, other or unknown
  misc_feature (473)..(473): "n" may be a, t, c, g, other or unknown
  misc_feature (519)..(519): "n" may be a, t, c, g, other or unknown
  misc_feature (522)..(522): "n" may be a, t, c, g, other or unknown
  misc_feature (545)..(545): "n" may be a, t, c, g, other or unknown
  misc_feature (548)..(548): "n" may be a, t, c, g, other or unknown
  misc_feature (555)..(555): "n" may be a, t, c, g, other or unknown
  misc_feature (560)..(560): "n" may be a, t, c, g, other or unknown
  misc_feature (574)..(574): "n" may be a, t, c, g, other or unknown
catggtacaaatgataaattatatttatacagtaaataagtatcaacggtcaacacaagttcaaaaccagccaccggcctntgggactganaaacagctgggtgatttcctccaccacggngcccatcaggagggagcacgatggcacaggtgcaacatgcgtggcagtggccggtggcttcatgatcagtgcagtgggcaacagggacatgcactcgggatggcctgtgccanaanatggggcagggggctgtcttcttgggtcccggtggcccagtggctgtcatgtcggggcctcaaagtcacatcatgaaagactcgttacaaaagaatcactgaccccaagtagtcgagtctagtctactgacctgtaaggctggcccaggccctgcaccgtctgaaggaaagcacctttctgggcaagcatcctgcctcccatcccattgnacctncccacccttccccggcagacnagaccacccccgggttacccaaatggcaacgggagcctaaaaccanccnaaggctgcaatttttggaaaagnggnttggtangaacnttaaaccggttctnggga

SEQ ID NO: 8153 - DNA, 578 bp, Homo sapiens
  misc_feature (489)..(489): "n" may be a, t, c, g, other or unknown
  misc_feature (504)..(504): "n" may be a, t, c, g, other or unknown
  misc_feature (520)..(520): "n" may be a, t, c, g, other or unknown
  misc_feature (525)..(525): "n" may be a, t, c, g, other or unknown
  misc_feature (548)..(548): "n" may be a, t, c, g, other or unknown
  misc_feature (572)..(572): "n" may be a, t, c, g, other or unknown
  misc_feature (578)..(578): "n" may be a, t, c, g, other or unknown
caaatattttaatagttttatttcgcaaagagaagcctaagaatttttttaaaaacatttccagagagaacactttataccataaaataaacttgtataatttgggaggacaaatcatctcaaatgtatatttttgaattatgtgccaattttataattagtacaaaaatgacagctgaaatattttaaaaatgtaaaaaccagtccaggcaacataactataccatcttgctgtaaaagtacttatatcgaattccgcacaaaatatttttgcaatatgctaaatttagttcttcaagtcactcttcactgccggctggcttttccattttctgttgtctccatcccattttcctctttaagatgttgatatagttcagctctgttattaacagagttcaaacgtccagcaaattcctgatgttttctggaattggcagtattgattctattactccacaaggataataacgacactggggccctttngatttttccccttgnggagttcatccatttnaccanggggtttttggttggaaggtctngggaatcagcgaactttataatcnagcttn

SEQ ID NO: 8154 - DNA, 595 bp, Homo sapiens
  misc_feature (426)..(426): "n" may be a, t, c, g, other or unknown
  misc_feature (480)..(480): "n" may be a, t, c, g, other or unknown
  misc_feature (511)..(511): "n" may be a, t, c, g, other or unknown
  misc_feature (555)..(555): "n" may be a, t, c, g, other or unknown
  misc_feature (558)..(558): "n" may be a, t, c, g, other or unknown
  misc_feature (562)..(563): "n" may be a, t, c, g, other or unknown
ggaggcggagtctcaaaaaaataataattataaaataaaataaaaatagttcaaaacagatcacagacctatgtaatgctacaactataagactattagaagaaaacataggggttgctatagtttgaatgtatcccttaaaaaatcacatgttggaaacttagtccctctgccttcatgaacagattaattaataaaagctttgccctcatacatggattaatgtcactatcatgggagtgggtttgttcttgcttgccctctcaccatgtgatgccctctgccatattatgacacagcaagaaggccctaaccaaatgccaggcaccatgttcttagacttctcagcctccggaaccatgagctaagtaaatttctttagaaattacccagtctgtggtattctgtttagtaacagaaaactgnctttactaaagacagtagtaaatctttgtgaccttggggtaaggcaatgattcntagatatggctgcccaagtggccaaaaaatngataactggacttcatcaaaattaaggtttacattcaaaagatnccnttannaaagttaaagaccacccccgaatgggagattt

SEQ ID NO: 8155 - DNA, 590 bp, Homo sapiens
  misc_feature (451)..(451): "n" may be a, t, c, g, other or unknown
  misc_feature (545)..(545): "n" may be a, t, c, g, other or unknown
  misc_feature (586)..(586): "n" may be a, t, c, g, other or unknown
  misc_feature (590)..(590): "n" may be a, t, c, g, other or unknown
gaataaataagcatcaattttattgaatcatgaataatttaagactggtacaatcatcagctttattctctatgacatggggcatgatgtccagcagatcattggcaaatccaaaaacctcatgacaaatgaaaattaaataggtaggaagagagagagaggaggggaggaggaaggggagggaggatggaaacataccgtacacaaaatactcaattcctagttttctctttaaaaatggctagaaaaaattcatcaaaatgcagcactttaatcaattatttacaatttctatgttacaatgaaaaaatgtacatcttatagaacatatttcataaaactgctccactggaaacaactagatcaaaacagcaaaccttccatttaatatccacaaagttggattatttttcctttttgaagtaagattcgccccaatcaaatttgaatnccgagaattttggaagttaagcctcaaccaccaagtaaaagtccccaagatccaccaagatctaggcaggcttggtcctgtccaatccacccanccctaatgaacttaaagggtttccattcaatattggccggncatn

SEQ ID NO: 8156 - DNA, 589 bp, Homo sapiens
  misc_feature (437)..(437): "n" may be a, t, c, g, other or unknown
  misc_feature (439)..(439): "n" may be a, t, c, g, other or unknown
  misc_feature (486)..(486): "n" may be a, t, c, g, other or unknown
  misc_feature (555)..(555): "n" may be a, t, c, g, other or unknown
  misc_feature (564)..(564): "n" may be a, t, c, g, other or unknown
aggtattcattctgtttattggattgaaagaaagggaatacaaacgactggttaagtgctgcgcactgacatggaaaaagtgtctttaaaaaaaaatcccagtaaagcaaatcaaagttaatgtagtttcagttgaacaaaaatttaaagacgtttaatacattacacatttataaaataaaagtcaacaaagggtgttttgtaaataattagtaaacaagtgaaaataaatatcagagacctgaagtttttatactttaatgaataaagcaaagaaatttaaactaagtaaatataatctgagaggcagttaaaaaaacaaaaatcaaaacccaccaaaattgaagaacacaatcttttgaaacatttaatcagtccatagcaaatagttattacataccaaaaagctctaagtgttaactagttccccacaatgncntgtaaatcttgacaatttagaaatcttgagatccacacttaaggtcntttcttgactctacacttgggttgtaagtccttcctgcttttggggactattcccttgcacaccccccntttcaaggngccatacatttttcattgggcctaa

SEQ ID NO: 8157 - DNA, 525 bp, Homo sapiens
  misc_feature (420)..(420): "n" may be a, t, c, g, other or unknown
  misc_feature (480)..(480): "n" may be a, t, c, g, other or unknown
  misc_feature (490)..(490): "n" may be a, t, c, g, other or unknown
  misc_feature (501)..(501): "n" may be a, t, c, g, other or unknown
  misc_feature (506)..(506): "n" may be a, t, c, g, other or unknown
  misc_feature (514)..(514): "n" may be a, t, c, g, other or unknown
  misc_feature (516)..(516): "n" may be a, t, c, g, other or unknown
  misc_feature (524)..(524): "n" may be a, t, c, g, other or unknown
gttagtgtttcctttattataaagcactgaaataagttaaataaacaggtgggaggctgggcagtcccccagccggtttgtccacagcccctgggggcagtggaggtgaatacagggcccttctcactgagctcatgaagtgcctcagtcaaggcaaggtcccctggtccatatgggcccccccgcccatggggttgggctggtccttatagtgcctacgttagtctgtgtggagcccctggccagcgggggagaaaaaggtggcttctggtccgtctgtataaaacatggggaagaaggacctagttcaggatgagtctgtgtggacagcccggctgccagcagtccccagggctggtgggccccgagagctcaaaacagagggtgggctatgaggtggggcccagccctcagaggcanagagaccaggcccttctgccccaccgtggccatgcaccttttgtggcgcttgtaattgtnccaatggccntggtataggcncagtngcacaacngnaaggcttnt

SEQ ID NO: 8158 - DNA, 544 bp, Homo sapiens
  misc_feature (404)..(404): "n" may be a, t, c, g, other or unknown
  misc_feature (452)..(452): "n" may be a, t, c, g, other or unknown
  misc_feature (465)..(465): "n" may be a, t, c, g, other or unknown
  misc_feature (491)..(491): "n" may be a, t, c, g, other or unknown
  misc_feature (505)..(505): "n" may be a, t, c, g, other or unknown
  misc_feature (507)..(507): "n" may be a, t, c, g, other or unknown
  misc_feature (514)..(514): "n" may be a, t, c, g, other or unknown
  misc_feature (532)..(532): "n" may be a, t, c, g, other or unknown
aaaaaaaaaaaaaatttattggtgacgttgaagaaaagggctgaggggtggatggctggagctggggctacgtaggcggcccctcctggtcttcctgctgcatccgtgcgatcagctgttgccgctcggccgcctggcgcatgcgcatcatgacgaggctctcgtagtccctctctgacagcactgagccctttgacagtcctgagtggctgcggcccacggcatcctggggctgtccctccaaccaggaaatcttcagagggttatccaccaggccaacttcattctggacagccagctccgctgccttgacggttgcaaactccaccacagcagtgcctggcttcttactggaaagcaccaggttgagaacctcaccatacttctgcaaaagcccgtaggangacgtctttggagtaaccaccttttgactcatctccttcttgcacttncatttagccttantttggggggtccttggccttcaatantttctggctttctntnaactttnggcacgctctggggtatntgttccggataa

SEQ ID NO: 8159 - DNA, 592 bp, Homo sapiens
  misc_feature (457)..(457): "n" may be a, t, c, g, other or unknown
  misc_feature (465)..(465): "n" may be a, t, c, g, other or unknown
  misc_feature (467)..(467): "n" may be a, t, c, g, other or unknown
  misc_feature (499)..(499): "n" may be a, t, c, g, other or unknown
  misc_feature (518)..(518): "n" may be a, t, c, g, other or unknown
  misc_feature (540)..(540): "n" may be a, t, c, g, other or unknown
  misc_feature (542)..(542): "n" may be a, t, c, g, other or unknown
  misc_feature (574)..(574): "n" may be a, t, c, g, other or unknown
atatagtcattgtttatttcatggaaactgaagttctgctgagggctgagcagcactggcattgaaaaatataataatcataaagtctgtgtctggacatcgcctttgggaactagaaggggagttggtattgtaccagctggactaagctccagttctagacctcctggctcattcaacatgcctccctacctaaataaaagtgcaacactcagtgcatgtcccagccccattctcccaagcatgggagtgggcgtaggagtggaggagggggaaggaaaaaggaattacttcacttacacctatgatgccctttgcccaagccagaagaaagcaaaggggaaaagggctgcagggtcattatttattttcacttgaacatggaaagaaagtgtcacactcccccttccctttatagggggaagtgtattttaatcagcaaccctcttcttccatncaccctgngnatgtgtgacccatttaccaccccagttgggangcatgactaggctgcccancttatctggtcctcctttgaananggtttgccaaatgggaaaaaggaaggaccccnttaggcaaaggttcaact

SEQ ID NO: 8160 - DNA, 438 bp, Homo sapiens
  misc_feature (384)..(384): "n" may be a, t, c, g, other or unknown
  misc_feature (433)..(438): "n" may be a, t, c, g, other or unknown
gagagcacaactccaaatcatcttttattaatataaaaagggcatatttagcaaaagacacacagataaaagagtcactatggctcaggacacaaggcagggaggtgccaggcctgtgcccctgctgggggagaaggaggctcgggacaaagtgggagaagtgctgggaagggctgagcggtaggggccacaaaagttccggtgggcaacactgtcggcaggtcatgggtgggactcatggggacctcgctgctaactcttgttgtgggggggtgtccttagtgctgccacctggagggccactccttggttcctggaggggacccaccaagggacacaggacaggaagcccaggatggttagtgcaactcgggatgaagccanggagaacgggtgctctgcaatggccggataggtccagacgctgaggccnnnnnn

SEQ ID NO: 8161 - DNA, 575 bp, Homo sapiens
  misc_feature (342)..(342): "n" may be a, t, c, g, other or unknown
  misc_feature (345)..(345): "n" may be a, t, c, g, other or unknown
  misc_feature (414)..(414): "n" may be a, t, c, g, other or unknown
  misc_feature (450)..(450): "n" may be a, t, c, g, other or unknown
  misc_feature (487)..(487): "n" may be a, t, c, g, other or unknown
  misc_feature (500)..(500): "n" may be a, t, c, g, other or unknown
  misc_feature (506)..(506): "n" may be a, t, c, g, other or unknown
  misc_feature (520)..(520): "n" may be a, t, c, g, other or unknown
  misc_feature (537)..(537): "n" may be a, t, c, g, other or unknown
gcatttcaaatatttcaatagttttatttcgcaaagagaagcctaagaatttttttaaaaacatttccagagagaacactttataccataaaataaacttgtataatttgggaggacaaatcatctcaaatgtatatttttgaattatgtgccaattttataattagtacaaaaatgacagctgaaatattttaaaaatgtaaaaaccagtccaggcaacataactataccatcctgctgtaaaagtacttatatcgaattccgcacaaaatatttttgcaatatgctaaatttagttcttcaagtcactcttcactgccggctggcttttccattttctgntgnctccatcccattttcctctttaagatgttgatatagttcagctctgttattaacagagttcaaaccgtncagcaaattcccggaggtttctggaattggcagtantggatctattactccccaagggtaataacgacctggnccttttgattttnccctgnggagttcatccttnaacaaggggttttgttngaaggtcttgggaacagcgaactttataatctagctcc

SEQ ID NO: 8162 - DNA, 581 bp, Homo sapiens
  misc_feature (458)..(458): "n" may be a, t, c, g, other or unknown
  misc_feature (520)..(520): "n" may be a, t, c, g, other or unknown
  misc_feature (558)..(558): "n" may be a, t, c, g, other or unknown
  misc_feature (567)..(567): "n" may be a, t, c, g, other or unknown
  misc_feature (581)..(581): "n" may be a, t, c, g, other or unknown
ccaagacagagtcttgctgtcacccaggctggagtgcagtggcatgatcttggctctctgcaatctccgcctcctggattcaagcaattctcctgcctcagcctcccaagtagctgggattacaggcacgcaccaccacatccagctaattttgtatttttagtagagatggggtttctccatgttggtcaggttggtctcaaactcctgactttgtgatctgcccgcctcggcctcccaaagtgctggaattacagatgtgagccactgggcccagcccagaacttggttttatccacctctggtgaaacatgagctcacttggtgctctctggcctctttattcccatctccttaggctgaccctgacaagcgccagggccaggcttggaccaagcagtcaactgagtcagcctgccctgggaaccaggcaggggaaggagcttacggacggctangctcaggaaaagttagaaagaacccgataaaggcaaaattcctggccgaaaggcacttaacntaaggatggaacctcttgttgccttgaagggccgtaancctgtttgnctgggggatgactn

SEQ ID NO: 8163 - DNA, 591 bp, Homo sapiens
  misc_feature (389)..(389): "n" may be a, t, c, g, other or unknown
  misc_feature (394)..(394): "n" may be a, t, c, g, other or unknown
  misc_feature (484)..(484): "n" may be a, t, c, g, other or unknown
  misc_feature (535)..(535): "n" may be a, t, c, g, other or unknown
  misc_feature (581)..(581): "n" may be a, t, c, g, other or unknown
  misc_feature (591)..(591): "n" may be a, t, c, g, other or unknown
aaataaattaaatttaattcaatagaaacacacacattgttactagcataagtaacaaaaacttccaatgtttaacaaagtaagtaaaatgtgataagcatgtacagtctaagaattttctacatgcattcttgttaaactactacttttgctttgttcagactttataatacctttctccaaacagcttatccttgatttttttaaaaattcaaatacccacaagtttcagtgaatagattgtgaaataaagactatttctaaaaataccttcatgttcacattctgacagagtaaacaataagaattgagaatcaagaggctatgtggtttcaaaaacctaaaaagaaacactgcaggacagatcttttatgagtatgatcttttgntttgntttcttacagttttgggtaaagcaaaatcaaaagggcacactaagagtaaaacacagaaataatcctttaaaacaatttaagtttaagcngggactcaactttaccatgggctctggtaaacaactttggtcattctaccncaaatcttcaaaatggaaataggtttaataggattttaaaaaggtnggctgatggn

SEQ ID NO: 8164 - DNA, 502 bp, Homo sapiens
  misc_feature (477)..(477): "n" may be a, t, c, g, other or unknown
  misc_feature (498)..(498): "n" may be a, t, c, g, other or unknown
agcaaataaacattttatttccacagcacgccttccctcttcccaaagaacatgagttcacctcagccatcaaagcagagggcgaaagctgcaagtgacaaggcaagaggctcctagaaaaatagattatacccaaggctctcctcctggggacccaaacccgtccccaggctccccctcagagcttgccaaatggagtgaaaggcatggaaaggggctgggagaaaagccagctccactgaacaaaggggagaggagcctggcagtgagcagacctgggaggggtgtggggtgggatgagctttgctccttggttgagtgctggaaaagggaagggggaagaaataatttatgttgatgtaattaatgtaatgatgatgtaatggtgcgtggtttcaatcatggcgaccattccagatctctctcaagtgaactaaattctggcccggtctgttggacagacatagtaggtgaaanaaagcttaacttggaagcccngaag

SEQ ID NO: 8165 - DNA, 503 bp, Homo sapiens
  misc_feature (484)..(484): "n" may be a, t, c, g, other or unknown
  misc_feature (489)..(489): "n" may be a, t, c, g, other or unknown
  misc_feature (495)..(495): "n" may be a, t, c, g, other or unknown
agctagtatcttttattgtcagaacttctgtgagccaacaaacagttttgcatggttgtacacaaagggacaaggcaaatttcttttttcgtgtgggtagacttagttggcccaagtccttaaaacttttccatataaaaataaaaagtccaagaccagattatttttcttctggtcataaatgctgatttatttacaggtgccttgttcagaccaccattataaacttgggataaaatatgtgtgtattaaagcctcagcatttaatgtcagggtcctttgaagattcactcaagtgttaagacgtttctggaatgcagcgtctctcccccatagtcaacatggttattatatctgtaatctatccagaatgatagaagctaaccttccaagtaacactttgtttttaacttaaatcttttagacatgaaagactccaaaatgacttcattcttggtctaaaaccagcctgggagccagctgntgaanaatggnttataaat

SEQ ID NO: 8166 - DNA, 500 bp, Homo sapiens
  misc_feature (332)..(332): "n" may be a, t, c, g, other or unknown
  misc_feature (454)..(454): "n" may be a, t, c, g, other or unknown
  misc_feature (489)..(489): "n" may be a, t, c, g, other or unknown
  misc_feature (492)..(492): "n" may be a, t, c, g, other or unknown
gcatgtaacttttttattgagggcacaacaaggcattgtaacttgcctggacttgaggcagtcagtttagtaagctgaacgttaatacagttaaggattaagtgcaaacaatatacattcacagcttgactagcgaggctacatcacaatttataaagtgccagattagtgctaattgtcattcagcttgatttttcacctcaggaaggaaaacaaaaaagtaaggacctcctccctctaggaacaaaaacattttcctaaaccaatcagtcatgagggcaaagactacttttccttcaatcccactaattagaacaccatccttttattgncaatactgtactgactttcaatcttgataaagaagatagcctgaaaacgtagaatatttccagctacttccataaattgctcccctgtgcagacgtaaccatatctggtctccctggaaganctgaagaattgcatgaatgctagcagtttcatggnctngagcccca

SEQ ID NO: 8167 - DNA, 500 bp, Homo sapiens
gagagttgaaacaaagaaactttaatgttctggctgactacactatgttgataggctcacaattactgcatctatactgaaaatacatagactcttttccttatcatgattccctaaacaatacaatagaacaactatttgcatagcttttataatgcatgaggtattttaagtaatctagacataattgagactatacaagaggatgtgggtaagttacatacaaatatgtcattttataaaagggacttgacatggctcacagagtgctggaaccaatacccagcaggtatcaagcgatgactgtactggaaagaaactgaaactacttaaggctttaccaagtgcttacattcacagggtctatctccaatgtgtttcgtacaagtatctgaaatgaaataaaattaataaatgctttcccacattccatacatttagagagaatgcaagtgagtctttttatgtctatgcaaggaactgagagaaccaatgctttt

SEQ ID NO: 8168 - DNA, 486 bp, Homo sapiens
  misc_feature (30)..(30): "n" may be a, t, c, g, other or unknown
  misc_feature (78)..(78): "n" may be a, t, c, g, other or unknown
  misc_feature (162)..(162): "n" may be a, t, c, g, other or unknown
  misc_feature (294)..(294): "n" may be a, t, c, g, other or unknown
  misc_feature (419)..(419): "n" may be a, t, c, g, other or unknown
  misc_feature (444)..(444): "n" may be a, t, c, g, other or unknown
  misc_feature (454)..(454): "n" may be a, t, c, g, other or unknown
  misc_feature (483)..(483): "n" may be a, t, c, g, other or unknown
cccagccctcaggccactttattgctcaanagtggtcagtctggggtatctgcatgcctgaactccatgatgatgtcncctgtgtcggggtgaaactccactgcatagctgacagtccgtgggccacccagcagtgctctgggatctggggcagggctgaanaagtagacggcctgcttgcagtgggggttccagcagcagcccccctcggggtctgcaggctccaggaggccagtgctgagcgtgcactccggggtcaggtggtactccatccatagcaccgctgcgtggctntgcccgggccttctgagctccacggtgccctcggcacacaggggctgcaggggcaccggctgctggaagtcaaaggtcaggatctgccagggctcggaaaggctgcggcatgggtactcccacancgggtggggcttaacttccctgctntcctgaaatncaaggcacccttaaacatgtcgccatganggg

SEQ ID NO: 8169 - DNA, 502 bp, Homo sapiens
  misc_feature (410)..(410): "n" may be a, t, c, g, other or unknown
  misc_feature (490)..(490): "n" may be a, t, c, g, other or unknown
  misc_feature (502)..(502): "n" may be a, t, c, g, other or unknown
aatggtggaaatattccaaaattccatattttgggatttatacacaaaagataaacaaattagaggccaagaggctgccggaagggaaaaacggggcctgggaaggccgttgtgaggaatgagctgggcctaaagaggccactggcaggcaggagctggacctgctgaagtggccgaaaggcaggagctttggactggggaggccacagtgaggcgagagctagctgggcgtggagagtccgctgtgaggccgaggccgaggccgggcccgtgcaggcctttgagaggcaggagctgagtccaaagacgttgttgggaggccaaagtcgggcctggagacgcagccgggaggaagagctgggctgggcccgaaagaggccactgggaggcaggaggagctgggcctgganaggctgactcgaggaacttttgcacccggaaaagcccgcaaaaggccggaacttggccttggggaacccacttgaaaacnacttgggccttn

SEQ ID NO: 8170 - DNA, 496 bp, Homo sapiens
ccattgcacctttattgggttattctgttcactgttcagaattttcatacagtctttctagaatcacacagagcctactgagtagctccttccccctgacactgctttatttctaaccagcctcctctcatcccttatccttagtgtatgatattctgctagtgtccagggagttcccagggttgtttttacaggggagggagaagggtgtgcggtggtatgcctgcagctttctctcctctccacctcctttcttgttcagcagcctccggacccccaagggctaaggaatcagacacattgggtttggatcttgactccactagaagccatgtgatctcagggacatttcttgacctctctgagccctttttccttcttctacaatgtggagaaaagactccctctctcacaggggttactacaagaattcaatgactccaagtatccaaagcatctggcacagtgcctgggcacacagtacgccctacatgcc

SEQ ID NO: 8171 - DNA, 494 bp, Homo sapiens
  misc_feature (466)..(466): "n" may be a, t, c, g, other or unknown
  misc_feature (483)..(483): "n" may be a, t, c, g, other or unknown
  misc_feature (485)..(485): "n" may be a, t, c, g, other or unknown
aaaactcaagttttattgcaatacatcttgcattacattctaataataaacggttgaagtataaattttgaaattagttaccaaaaatcatttactaaacagtagttttactaaaaatactaggattgggaaaaataaacactaatagaaagtactccaaaatgttaacaacgtttctatgggcattgggattgggggtggtttatactttctcattttctgtattaccaacacttacaattcacaatcaggagaaaaacctattatatgatacttaaaacattaaatctctgattgtcacctataggaaaaggcaactcactatccatttgaaagatccctttagacttctgatcgacctcactcgataactgcacaacctctggacacaaagaggccgaattgtccccccaatttcacctcccctattacccacaacagcagcgatatgggtttgggctcttgngtccccacccaaatctncnatagtaatc

SEQ ID NO: 8172 - DNA, 495 bp, Homo sapiens
  misc_feature (481)..(481): "n" may be a, t, c, g, other or unknown
  misc_feature (484)..(484): "n" may be a, t, c, g, other or unknown
aactttagtggtgggtatttcacaacagttacacctggcaaaggcttataaaccaacttcccagaagagttatttaaaaaaaaaagagagagagagaaggagaaagaactcaagcactggccatattctctgttaaacacacacacacacacacacacacacacacacaaacacacacacacaccccaaacaacaaaaatcagaaacagaagaaaattaaaaaaccaccctgccactaaattgagtaatttccagaatgcagtatccctatgttctacagcaggtcaggaagatggctataaacagagtccaggaaggtctggctggcttcctggctcttgactccaataatttcgaatagccggtctagtttgtcctcagcctggggaatctcttcaatcacccgcagctcctcaggatttagaaagtggagcatgtcatcaaagataggctgcaagtcacaggggtcaagcgtacctgncgnacactgggttc

SEQ ID NO: 8173 - DNA, 496 bp, Homo sapiens
  misc_feature (482)..(482): "n" may be a, t, c, g, other or unknown
gacggtgtcaaactctgctttattggaatagagaatacaggcagcaggaatcacgcttggtgctggcagctccaggtcccctgcccccacgggctctcccacttgtctggatcaggggagacctccactttgaagaacaatatggggtgggagcttccaatgtgcattctgctaccagcctcaggattagcagcaagatgccaacagcaacagcaacagcaacagcaacagcaacaaaggactggactcgacacttcaggaaaggacgtgtagaagagaaagtcagacccacagtgtcacgtgttaacaacggtcccacaacagcagacacgacactggtgtgcatggctgtaccacctgtgggaggctgacagcacaccgacagccctgaggggcccggcattctcactcccaacatgagaaagaattaacaccacacacacacatgttcacattctctgcgaggacagtcaaattaaggnccccaagggaggga

SEQ ID NO: 8174 - DNA, 574 bp, Homo sapiens
  misc_feature (498)..(498): "n" may be a, t, c, g, other or unknown
  misc_feature (511)..(511): "n" may be a, t, c, g, other or unknown
  misc_feature (532)..(532): "n" may be a, t, c, g, other or unknown
  misc_feature (537)..(537): "n" may be a, t, c, g, other or unknown
  misc_feature (552)..(552): "n" may be a, t, c, g, other or unknown
  misc_feature (556)..(556): "n" may be a, t, c, g, other or unknown
  misc_feature (560)..(560): "n" may be a, t, c, g, other or unknown
actaatcaaatctattgcttttattgtttttaagtaagtggtggtatatgtcatctttttaaatgtttcttttgggaagatcttatagaaaatggcaccctgaaactttcagctctatgtcccaaaaattatctttcaacaatctgatgaagtttcttaaagaaactcttaaaaatgaagataatatacctggcctaaatcaaaacaatctgaaaaatggatgtgtcccagtggaaagactcaagtcttttcaagtttatcagaaatgccactatacaccactgtactataagtcgaggaggatggatatccaaaggtatcatttgttgacggttcctgatggtctcaggtatatcctataatcactggttactatgcatcatttcttgtagataaatggtattcatgtgataagctgccatccaacttggatgtctctgagcattccaataatatgaatgagaaacggcagcataatattcttgccatgccctgtantaagctctccagnctcccattaatcccgataggnttaanaaaacctcagaccgntttncctntgccggcattccca

SEQ ID NO: 8175 - DNA, 589 bp, Homo sapiens
  misc_feature (533)..(533): "n" may be a, t, c, g, other or unknown
  misc_feature (542)..(542): "n" may be a, t, c, g, other or unknown
  misc_feature (575)..(575): "n" may be a, t, c, g, other or unknown
  misc_feature (585)..(585): "n" may be a, t, c, g, other or unknown
gaagatggctgacctcaaatcttatatcctaaatattaacgatatcccccaagttaatatacagaaaaacatgattctaaaataaatacacaggctttttaaaaaaaacttaattagggcctgtctagtgatgccctgggccggtgctgcactgctttagggaagcccctggctggatctatgtttcctatagcacctctaggcactgggaaggagcctggaggagagctctggcttctaatgacccacgtggcccccagtgaaaaatttttttagaggctccccaaagaagtctcatccagaccttaagggaaataaaatgaatgcatgaaataaataaataatttaaccacaactaaatttcatgttctttggtgtaattcaaggatgtctagaaacaaaataatctgattgcattatacagtccatgatgattcaattgcccaaatagccaggaattgaagatttatctgctcctttaacaataaggactgacccctactggaatcatttttttaaattcaatattattnaaatcttgntgccaatcaaatccggggtgataaggcattaanttaagggccncctt

SEQ ID NO: 8176 - DNA, 561 bp, Homo sapiens
  misc_feature (470)..(470): "n" may be a, t, c, g, other or unknown
  misc_feature (528)..(528): "n" may be a, t, c, g, other or unknown
  misc_feature (539)..(539): "n" may be a, t, c, g, other or unknown
  misc_feature (545)..(545): "n" may be a, t, c, g, other or unknown
  misc_feature (549)..(549): "n" may be a, t, c, g, other or unknown
  misc_feature (552)..(552): "n" may be a, t, c, g, other or unknown
  misc_feature (558)..(558): "n" may be a, t, c, g, other or unknown
gatatttaaaaataaactttattaaagcagttaaacttagcattaaataacactctttaaatggtacacctatgaagcaagagttaaatataaacccagtctaatcctgtacacttgtgattaattgtgacaatcttaagttgctcacttctttcccatttaccaattcagagaaagcccgtttcctgttttctcctcaccactttgccttggcatcacaccaaccctgcctcgggcttcagctgcagatcctccccagcccctcctcccagctgggctgactccagtcccagccccagtctccaccaactgagcagcgtacgcagggttgtgcctggcttccagcatctaccaccccttcagagcaacttccaacatgggacaggagaggaagctcgcattgcttggtctgaacagatttaaggaggttttatcacaaggacctgaaaacttcctaagcatgctttctncttgccagctgaagaagggcaatggtgggaaccgggcaaggggggttgcaagggccgnaagggcttttnaattangggnttnaattcncaa

SEQ ID NO: 8177 - DNA, 588 bp, Homo sapiens
  misc_feature (513)..(513): "n" may be a, t, c, g, other or unknown
  misc_feature (525)..(525): "n" may be a, t, c, g, other or unknown
  misc_feature (530)..(530): "n" may be a, t, c, g, other or unknown
  misc_feature (539)..(539): "n" may be a, t, c, g, other or unknown
  misc_feature (550)..(550): "n" may be a, t, c, g, other or unknown
  misc_feature (561)..(561): "n" may be a, t, c, g, other or unknown
  misc_feature (577)..(577): "n" may be a, t, c, g, other or unknown
gtgatgattcatttatcagtccagaaatcccaagtacaaaacttcaagatacaagaaggatcaaattatatcatatatatgattcaatttaaaaatccttagccctcttatatcatattatctagattataatagtaaaaaatcaagttacattcatatgaaactttcataaaaagaaatcaaatccagttttatgaaattttatagtacaattactttctagtgggtcttttcttaggtcacagtatttataattccatttacatctttataatttttaaaattagaaaacaaaaggatgtcaatagaaatctaaattttcacttgcaaaactcccttcagtttccaggccagtaacacatggtgatgtcgacttgtcctccagacatggacggctaccaaagacccccagttcacggagcatgcaggcctctactcattaggaacgctttttgggtttggctcacgtttcaagaaattgtggagcatgtccatgccgtcaaagatccccangttcaaggatangttcnggatttcanttccaaccttnggatcattaanccttcttttttaaacnactgggaaacc

SEQ ID NO: 8178 - DNA, 528 bp, Homo sapiens
  misc_feature (478)..(478): "n" may be a, t, c, g, other or unknown
  misc_feature (487)..(487): "n" may be a, t, c, g, other or unknown
  misc_feature (500)..(500): "n" may be a, t, c, g, other or unknown
  misc_feature (519)..(519): "n" may be a, t, c, g, other or unknown
  misc_feature (525)..(526): "n" may be a, t, c, g, other or unknown
  misc_feature (528)..(528): "n" may be a, t, c, g, other or unknown
cactgagaatgcagctttctttcatttggtcacttcacctcttcatcgaccccagagagggagtggggaccctgcatgctgccccctccccgcccccggggtcttctggcaggactggggaagggagcctctcagggggtggcggtccacgcccagtagcacctgggagctgtgggggccgaggcagtccgaaggtgtggggtagctctgagctcatgtacaggtccggtaccccgagcgccttgcggcgggagccagggcccatcagtaatagtgcatgcggcccagggtgcccgtggccgtggggctgggccccagcgtgcctgtgcccagcaggtccggctgcccggtgcgccagatctcccgcaggatccgttcgcgctcctccagccgctgcgcccgctccagctcctccgccgacgtgaagaccttgacgttgaggggcccgtccggcttttgcggacagttcgggcccggnaacgtgtcntcggggccaaccnagtaaccggggcttcttgnccttgnngn

SEQ ID NO: 8179 - DNA, 499 bp, Homo sapiens
  misc_feature (328)..(328): "n" may be a, t, c, g, other or unknown
  misc_feature (493)..(499): "n" may be a, t, c, g, other or unknown
ctttgaatttccatgtgcatttatttgtttattgactcttttcccaggaggtcagctccaccaggataggtctttgttggttctttcaccgctgtacctgtgtacaggacagagcctggcacacaccaggtgccagtgaatatttgctgaaggaagtcacaaatagggatcagccatcattactttatcatcatgatcaacaggaaagaccactgtcctcacccaatcccctccaaaaggctttggagcagatgtcaacattaattcactgtctcaggtgacagctctcatcctgaggccagggttggggggagctgggaatggggcnagagtggggcctcacgtcccaggctccttgataccccccaccccacccagccaggaaacaccacgaggcagccaaggttaagtagactcttgctgctttgttataaatatattatgtacatccaaaacatgacattaaaatattactccgtgtacagaaaagatnnnnnnn

SEQ ID NO: 8180 - DNA, 595 bp, Homo sapiens
  misc_feature (507)..(507): "n" may be a, t, c, g, other or unknown
  misc_feature (528)..(528): "n" may be a, t, c, g, other or unknown
  misc_feature (555)..(555): "n" may be a, t, c, g, other or unknown
  misc_feature (572)..(572): "n" may be a, t, c, g, other or unknown
  misc_feature (575)..(575): "n" may be a, t, c, g, other or unknown
  misc_feature (580)..(580): "n" may be a, t, c, g, other or unknown
  misc_feature (588)..(588): "n" may be a, t, c, g, other or unknown
gctttgtcatttgctatttaatgttcaaacattgaaagtaattgatttcttccgagacacctctttccttggagactttcaccctcccggtctgggctagactgaatgcccacaagacctactgtgtggctgatgcgtgggatctccctttgcttccttcccgtgttggagcccattttctagatccttcacttctctgttcttggtttgcttcgtcatttggtggaatacattcccagcagctgcctgagtggggaagcaggggaaatatccctacacaggcagtttttcgaggtatgactgaaaaatgcctttatttagccttacacttgattgactgtttggctaaatataggattttgtgtttaaaataattttccatcagcttttggaagacactacttcactgtattgtggtattcaattgttgctactgaaaatctcaataccatctgattcctatttctttgcattggaacctaatttttctcctcctggaacattttnaaaatggctcttttttcccantgttttgaaaaaaaaactttttatttngaaatccttagttttgnaanattcntatattcnccctaga

SEQ ID NO: 8181 - DNA, 561 bp, Homo sapiens
  misc_feature (490)..(490): "n" may be a, t, c, g, other or unknown
  misc_feature (496)..(496): "n" may be a, t, c, g, other or unknown
  misc_feature (537)..(537): "n" may be a, t, c, g, other or unknown
  misc_feature (539)..(539): "n" may be a, t, c, g, other or unknown
  misc_feature (545)..(545): "n" may be a, t, c, g, other or unknown
  misc_feature (556)..(557): "n" may be a, t, c, g, other or unknown
caatagtccagaactgttcttttttctattttagggctgaggggtttctatttagtctacatgtgtcagtctgagcaacgtgagaagtcccctcctgaagatttccttttgcacggctggctcagcactgcgggtagctcggcattaacaaaagcgaaacggtggtcagaccttcacagggtcccaccctcacgacgacactggtctacgtactccagacaggcctcagttcttcttgctgtccttctgaggctcactttttgtggtccctaggttgttccacacctctgtgtacattaaggtcccaatgaagacaaacaaggtgcccagccagtgccacagggtgaaggggttctggaagtacaagatggaaaagatgaggctcacaaatttgcgtagggtcacgacgagcgtgacggtgagggaggcgcattctgtggtgaggataaacacaccccggatgcacacttctgagtgatgatgtcatgangaggtngaaccccttaatggcaagggcacttccatgaccggaatttntntacctnaccttttgaannaaac

SEQ ID NO: 8182 - DNA, 515 bp, Homo sapiens
  misc_feature (426)..(426): "n" may be a, t, c, g, other or unknown
  misc_feature (462)..(462): "n" may be a, t, c, g, other or unknown
  misc_feature (487)..(487): "n" may be a, t, c, g, other or unknown
  misc_feature (491)..(491): "n" may be a, t, c, g, other or unknown
  misc_feature (493)..(493): "n" may be a, t, c, g, other or unknown
  misc_feature (495)..(495): "n" may be a, t, c, g, other or unknown
  misc_feature (510)..(510): "n" may be a, t, c, g, other or unknown
actgtgtaaagctgcctttgcaagcacttcacatgattcactgaacagagcagacagaaacccctgcccttcttgggggcttccatcctagacaagtgccagcggccccagttgatgccacgggcaggcaatgtgcatagccatggcacgtgccatccctgtggattcggatgcctcctcccctgctggggtgaggcagccaaccaggggccaactgaaaaaatgctggactctcggtcaaggacagggctgggagagtgccagtctccacaaactgtggatccactagagggttcaggcctggggcatcctctgcaagaggatcccacgagagtccattccccaccacaggcctccgctgctcactgctgtgccttgatcggcctggacgagcccgcccacacctccatcatacccagtgtgaanaggggctggggacccaccacttctgagaacagcatncttgggaaaacccactgtgaatgcncaanangnacaatccttaggccnagtga

SEQ ID NO: 8183 - DNA, 577 bp, Homo sapiens
  misc_feature (211)..(211): "n" may be a, t, c, g, other or unknown
  misc_feature (458)..(458): "n" may be a, t, c, g, other or unknown
  misc_feature (537)..(537): "n" may be a, t, c, g, other or unknown
  misc_feature (557)..(557): "n" may be a, t, c, g, other or unknown
  misc_feature (576)..(576): "n" may be a, t, c, g, other or unknown
cctcattctggtttttaatggtcaaggtgacaacagtgtacagtttttccagacccatatgtaggttccataatctccacctgctggagaaaacaccgtgacagatgccattgccccagcaggccactgccggtgtgggaactttgggatcaaaagcaccaagccaagtcccttgctcaggatgggtcttggttgaaaccacaagcccttntgcagttctaggtggatgtagtgttggttcttggctcattgcaggggtgaagcaggaaagagaaagagactggtgaggcctgcttggaaagaggattgaggcacattacgattccaaaccaggagatcctgagtcagcactgattctgtctctggtttgtttaatacgggaaagggttccatccaagagcccaataggcctcctctcccaaacctgcatagcaatcaaacttataggggtggtgganggtctttaccaggctaggactactgcctatgtttctgcaagtcacaagttaaccaggtcaaaagaacaatgtgaaacanaacctggttaagcaaagccnaattgtgacctttctttcnt

SEQ ID NO: 8184 - DNA, 550 bp, Homo sapiens
  misc_feature (10)..(10): "n" may be a, t, c, g, other or unknown
  misc_feature (55)..(55): "n" may be a, t, c, g, other or unknown
  misc_feature (57)..(57): "n" may be a, t, c, g, other or unknown
  misc_feature (61)..(61): "n" may be a, t, c, g, other or unknown
  misc_feature (67)..(67): "n" may be a, t, c, g, other or unknown
  misc_feature (74)..(74): "n" may be a, t, c, g, other or unknown
  misc_feature (82)..(82): "n" may be a, t, c, g, other or unknown
  misc_feature (132)..(132): "n" may be a, t, c, g, other or unknown
  misc_feature (155)..(155): "n" may be a, t, c, g, other or unknown
  misc_feature (165)..(165): "n" may be a, t, c, g, other or unknown
  misc_feature (180)..(180): "n" may be a, t, c, g, other or unknown
  misc_feature (198)..(198): "n" may be a, t, c, g, other or unknown
  misc_feature (205)..(205): "n" may be a, t, c, g, other or unknown
  misc_feature (220)..(220): "n" may be a, t, c, g, other or unknown
  misc_feature (267)..(267): "n" may be a, t, c, g, other or unknown
  misc_feature (322)..(322): "n" may be a, t, c, g, other or unknown
  misc_feature (334)..(334): "n" may be a, t, c, g, other or unknown
  misc_feature (339)..(339): "n" may be a, t, c, g, other or unknown
  misc_feature (388)..(388): "n" may be a, t, c, g, other or unknown
  misc_feature (461)..(461): "n" may be a, t, c, g, other or unknown
  misc_feature (476)..(476): "n" may be a, t, c, g, other or unknown
  misc_feature (543)..(543): "n" may be a, t, c, g, other or unknown
ccagttttancatgcaactttattaacaacatgtaaataaaatctcaaaagaatncncatntcaatntaaagcncagaagtntagcttactcaggatgaatagattcattatcaggtcacgttgcaaaaatnctaaaaatatctcaatttatatnctatatagcncaataaaaatcagcncatgttcaggatctcaanattaatnggtatccataaaatngcctccctcaatcaacatggaaaacataagtattgaatttataattncaatatgcattggtttcatattgcaactccaaaaaactgtttgaggctttatganaacagaggggtnttcanagttttagtattaatcgtatgactttatctctcacttcgggatcactgngctctgctaagtcttggagtttctgaccaaactgttttgcttcctggaatattgaaataagctcaaatttagngaacttttccttggnaaatagctttgcctttgttttgaactgaaaattatattctcaaattttcaaaatttaaaaaattggnctttgcc

SEQ ID NO: 8185 - DNA, 579 bp, Homo sapiens
  misc_feature (450)..(450): "n" may be a, t, c, g, other or unknown
  misc_feature (464)..(464): "n" may be a, t, c, g, other or unknown
  misc_feature (535)..(536): "n" may be a, t, c, g, other or unknown
  misc_feature (549)..(549): "n" may be a, t, c, g, other or unknown
  misc_feature (570)..(571): "n" may be a, t, c, g, other or unknown
ggagtcttcccatataaggcacaaaagggtctttttgttttgctttgttttaaagctttaataaattcttggaagattctggattgcttgaaattatttttagattatgctaaacatggagctgcatttacacaaaagttcttaaaaattgtcccaaaagctaatttttccaagtggaataactttagaattgaacatttataagattcgctttatgttttaaggagctctaaaatctacatcataatctaagaagtcttaattttgaactttaattcacaacgatcttctacacgtgacattatctcacgtgtatcctgtaggctctctgttacggttagctcactagaaagtgacctaagtgagcttagtgtttaatgcagcattactgtgaatttcctttagaaactcacttttatttgtctccagtctactttttcatctatttgnttttggttttttgntttttaattttgagacagagtctcattctgtcgcccaagctggaatgcaatggaatgatctggctcattgnnacctctatctccngggtcaacaatctttgcctannccttgcat

SEQ ID NO: 8186 - DNA, 574 bp, Homo sapiens
  misc_feature (521)..(521): "n" may be a, t, c, g, other or unknown
  misc_feature (560)..(560): "n" may be a, t, c, g, other or unknown
aaatctttatttaaaagtccatgctaataatgtgtttacatttttacagttacattatgatagaaactgttggattttttaaatatctaaaacaatggcccactgaagaaaggaacaattaactctttaattaattccttaggataaatacccagaaatttaacagctagggcagacttctaatacaataccgaaagtccttccaaaaaccaagtggttgccaacttatgtcccttagcattataacattcttgagccaatagtgtaaaaatacgctgacaattttataggcaaacattactcaaggtatcttactttccacttattactaaagtaattaacccctaaatagatgctcctcaacagtgggactacatcctggtaaacctatcataagttgaaactatcaagttgaaatgcatttagtacccggataaacctatcataaagttgaaaatttgtaaattgaacccagtgtaaatcagaggccatcttacttcatactcatgaagcactatagngggatatttttcacttacgagaaaacctaagcttggtgnaaaactggcctaat

SEQ ID NO: 8187 - DNA, 575 bp, Homo sapiens
  misc_feature (553)..(553): "n" may be a, t, c, g, other or unknown
gtttttttagcggtgtaacaaattttaattcaaaatagacactctgaaaacaataggtaaaaaaaaaaaaatgttcaacaagctctctttgaatttacaacagagtacaccaacaatcataaaccagtttcacaactgcctcaaatatgaacattatagcaattacatgcaagtattatattttttaaaatccacatagtaacattatgtttctcagaggctgtcacatcctccaaatatttctacctaaagatagagtgaaggggttcctctgctgtgtaccaccagaaatatgacttaccatctaaactggctggtctccatgactggttctggtgctttaagttttaatatcgtgtggggaaaaaaacgaggtttaacatccacaggacagtgacgacaatggagattctttaacaatatgccatcccatcgacccggacacagcttccagcctaaaccagctagagaaaagcccgtttctccactaaacatgaccttcagaaaatgtggtcaaagacttactgtccaaccatggagactgagatcttantctggaactttgccatgtcccc

SEQ ID NO: 8188 - DNA, 577 bp, Homo sapiens
  misc_feature (494)..(494): "n" may be a, t, c, g, other or unknown
  misc_feature (516)..(516): "n" may be a, t, c, g, other or unknown
  misc_feature (536)..(536): "n" may be a, t, c, g, other or unknown
  misc_feature (546)..(546): "n" may be a, t, c, g, other or unknown
  misc_feature (568)..(568): "n" may be a, t, c, g, other or unknown
  misc_feature (572)..(572): "n" may be a, t, c, g, other or unknown
gcttagaaaatgctgtgattttattcatagtatatacaccacaaaacagacactttccattattttgattacttcaaaatttaaaatctgcttgtttttcaattgatttttttcatgacagatgctgagttctgacccatttttttcccctgacagtatcaataggctgcccgactacatgatacaattgtttttagcatttaaatttaagactatggctcagtgtttgaaaaataaataagttaacaaaagagaaacattattaggaggaaaatgaaaacatattcaccacatgataaaaaaaatcactccttaaaaatcaataagtggtgtgagcattatttcacttaacctacttggaagcactataataccaatatacaaataaaacagaacccataggtagcctggaatgatgcagtggccatcactaattaggggctagttgacaacataaatacaaataaatgaaattcaaattaaaaaaaacttgnttttagcttaattggtgggcanaatgtatggcgggggctggntgctggcaanccgtttaactttgctcgcttgnttgntcgaa

SEQ ID NO: 8189 - DNA, 606 bp, Homo sapiens
  misc_feature (77)..(79): "n" may be a, t, c, g, other or unknown
  misc_feature (457)..(457): "n" may be a, t, c, g, other or unknown
  misc_feature (481)..(481): "n" may be a, t, c, g, other or unknown
  misc_feature (519)..(519): "n" may be a, t, c, g, other or unknown
  misc_feature (539)..(539): "n" may be a, t, c, g, other or unknown
  misc_feature (542)..(542): "n" may be a, t, c, g, other or unknown
  misc_feature (544)..(544): "n" may be a, t, c, g, other or unknown
  misc_feature (553)..(553): "n" may be a, t, c, g, other or unknown
  misc_feature (565)..(565): "n" may be a, t, c, g, other or unknown
  misc_feature (591)..(591): "n" may be a, t, c, g, other or unknown
cttttttttttttacacttgggttttaggtatttatttacaaagttcttactaatacaattgcttttaaaatgtagnnnaagagtcatttactactctcagaagtggcacatacatggcatagaaaacaatctatagtcagttaactattaaaacagaaacttgaaatttaagtgacaaacatttgtagcactccctaaagaaataggaaataaaaatgcatttatccatatgaacttgattattctgaattactgactataaaaaggctattgtgaaagatatcacactttgaaacagcaaatgaattttcaattttacatttaattataagaccacaataaaaagttgaacatgcgcatatctatgcatttcacagaagattagtaaaactgatggcaacttcagaattatttcatgaagggtacaaacagtctttaccacaattttcccatggncttatccttcaaaataaaaattcnacacactatcaacttaaatcaagatttgctagtggatnaaattccattaatttaccgnctntnttggaacangctccaacaatntggttttgcaaaaatccatggttctnaaacttcgggcctat

SEQ ID NO: 8190 - DNA, 566 bp, Homo sapiens
  misc_feature (517)..(517): "n" may be a, t, c, g, other or unknown
  misc_feature (519)..(519): "n" may be a, t, c, g, other or unknown
  misc_feature (539)..(539): "n" may be a, t, c, g, other or unknown
  misc_feature (545)..(545): "n" may be a, t, c, g, other or unknown
  misc_feature (555)..(555): "n" may be a, t, c, g, other or unknown
  misc_feature (558)..(558): "n" may be a, t, c, g, other or unknown
  misc_feature (562)..(562): "n" may be a, t, c, g, other or unknown
gattcacaacacaattcagctatatatttaattttaaagacttcatgaaattgtgggaggggtaagggggaaaaaagaaagagaaaggaaggaccccaacaacagtaagactccttaccatctacatctcatctgtgtttctcttattataacccatgaaatatctctacctgcagtgcttattacaaatacaaataccatcctcactcattttcaacagctacctcactaattcttacacacttgacaactttagaactttgtccaattattatttggccaatgcttgaaaatgatttaaaggcataaccccaagtcttagaacagcttagagcaggagtataaatattcagattccaaagacaaggactactacccacatcaacctgcctgtgacacctcacaactaagaaaccagtttttagtagatcaaagatgaaaaggtgaaacgtacagctcacaaatcaaatatctgggcactagaaggaataggtgtggttggaaaaataaccctttngnattttctcagcatatttttnaatggncgtaccacanttnttcnctcc

SEQ ID NO: 8191 - DNA, 597 bp, Homo sapiens
  misc_feature (491)..(491): "n" may be a, t, c, g, other or unknown
  misc_feature (516)..(516): "n" may be a, t, c, g, other or unknown
  misc_feature (519)..(519): "n" may be a, t, c, g, other or unknown
  misc_feature (537)..(537): "n" may be a, t, c, g, other or unknown
  misc_feature (543)..(543): "n" may be a, t, c, g, other or unknown
  misc_feature (546)..(546): "n" may be a, t, c, g, other or unknown
  misc_feature (576)..(576): "n" may be a, t, c, g, other or unknown
cacactgtcacaatttattgaaattttataaaaactcaggccaagtggaagaataaggtacaactcaagagtacaaagacaactccgtttccgttcagtacttttctcctcagcactggtggtaagaaagccccttgctctctagtagccaggcagcatggacttacagtcttaaaatgaggctttatgtatttcaggctggaggcaggttgccttttctcctgaggaatctcaggcagggtaaaagttacttaccactcagtacctctgtgccagaagaaaagctcaatttattcaatccttagaaaagttactatcgtcccctggtcagacactaaggtgtcttgataaggtccagagacaaccacatagtccttattctaattcgtagtgaaaaggctgcaggcatatggtgctcctacgatgggcctgaccctttcctaagcacatctcatttccacatcctttgccttctctttccccaacatttncagccagcattgaacccaatttctnggnaattgagaaggggaaacngttttntgnaccccgacttcctttaaaatggaccggggnccaacccaattaattagagaa

SEQ ID NO: 8192 - DNA, 571 bp, Homo sapiens
  misc_feature (504)..(504): "n" may be a, t, c, g, other or unknown
  misc_feature (519)..(519): "n" may be a, t, c, g, other or unknown
  misc_feature (526)..(526): "n" may be a, t, c, g, other or unknown
  misc_feature (528)..(528): "n" may be a, t, c, g, other or unknown
  misc_feature (562)..(562): "n" may be a, t, c, g, other or unknown
  misc_feature (564)..(564): "n" may be a, t, c, g, other or unknown
  misc_feature (570)..(570): "n" may be a, t, c, g, other or unknown
aaaagtaattacaaattaagaatttatttataagttttcatctttttagaaataaaaaggcttaaaaaacaaaatggttgcaaaaatggttagttttgttatatcctaattgcttaggtgtgctctgtaaattccaaataagtaaaataatataaaaatacattttcatatctttatagaacaaaaacaaaacattaaatgcttttggattttctttactcctcccacagatgagttcacaaatacaaaaactggtgtacatttatactcaagtacaaatctccaacagccaagtaattatagtttcttctgttatgtgcaaagtagattatttcatatttacttggtatggaaagcagagtacaggctcaatggacaataatcattaaacacagattatgtttaagaaaatgctgttgtaaaaatgtcaatagtacatacaattttggtaattatgcacttcttttaaagtaaatacagcttttagatataaatctttcaaanggtttctttgaaaanctgtgangngactatttcagaattgatgaacagtaatttggcngnaacttnt

SEQ ID NO: 8193 - DNA, 577 bp, Homo sapiens
  misc_feature (5)..(5): "n" may be a, t, c, g, other or unknown
  misc_feature (439)..(439): "n" may be a, t, c, g, other or unknown
  misc_feature (522)..(522): "n" may be a, t, c, g, other or unknown
  misc_feature (540)..(541): "n" may be a, t, c, g, other or unknown
  misc_feature (546)..(546): "n" may be a, t, c, g, other or unknown
  misc_feature (577)..(577): "n" may be a, t, c, g, other or unknown
aaggntttaaacgtttctctttgaaaagatggtatcttacagtacatacaaaaatactctgaaaatacatacgacttcatttacaaaacactgaatcaacatattacaagaattacatggttatggattttaataaactgagcatgcattcatgaaacttaaaaaatattaagaaatgcattgaaaaaagcagcgtaaaaaaagacaactcatatagttaaataaaaattacaaaggtcctgagccaattaatggttggtaacaatgtcattcaaaatgcctttaggtttcaataaaatccactgcttatttctgcatgcctagtccgtgaagaaactatttgaagttgtggggtaaataatgatcaggaattatcatgccaagttaattttacacctcaaaaatacaagtgtgccatacttaaaggttatcttattgntgatgctggaatgagttgctcctcagtaaaaaatccagtcaactaacaagaatggcatgaaataggatatgtacaattttccnttcatataccggctttannatccngggtaattttgaattttaaaaaaaagccttn

SEQ ID NO: 8194 - DNA, 602 bp, Homo sapiens
  misc_feature (517)..(517): "n" may be a, t, c, g, other or unknown
  misc_feature (573)..(573): "n" may be a, t, c, g, other or unknown
  misc_feature (590)..(590): "n" may be a, t, c, g, other or unknown
ggcttaaacaacagaaatttatttgctcataatttttgaggctggaagtccaggatcaaagtgtagataaggatgatttcctctataatgagccttaaaagaaggatctcctccaggaatctctctttgccttgaaggtaaccatttccggtcacttcacataaaattctgtgcctgctaccctggtatctctttcacttcttataaggaaaccagtcatattgaatgagggccccattctaactgcctcattttaaaatcacctctttaaaaaaaccacatctctaaataccaccattatcttgaggtcccagggatgaaagccttaatgttaatgagtggatgggacatgtgacataatctaaatcagtggtcccctaactttttggcaccagggaccagtttcgtggaagacatttttcccacggactggagttggggattaaactggtccagttcagatcatcaggcattagatctcataaggagtgtgcaacctaaatcccttgcatgtgcngttcacaataaagtcatgcctccattgagaatctaatggccctggtgaactgacanaaagttgacctcagccntaatggttgctc

SEQ ID NO: 8195 - DNA, 560 bp, Homo sapiens
  misc_feature (401)..(401): "n" may be a, t, c, g, other or unknown
  misc_feature (460)..(460): "n" may be a, t, c, g, other or unknown
  misc_feature (489)..(489): "n" may be a, t, c, g, other or unknown
  misc_feature (547)..(547): "n" may be a, t, c, g, other or unknown
  misc_feature (549)..(549): "n" may be a, t, c, g, other or unknown
agatcacaaaaactttaatagtcaaagctttgtaatttataatgttagaatttctcaacatactgtcttgattacaagttctgatggccaggcatggtggctcacgcctgtaattccagcacttttggaggccgaggcgggcagatcacctgaggtcaggagctcgagaccagcctggccaacatgatgaaaccccatctctactaaaaatacaaaaaaatagccaggcgtggtggcaggtgcctgtaatcccagctacttaggagtctgaggcaggagaatcgcttgaacctgggaggcggaggttgcggtgagccaagatcgcgctattgcactccagcctgggcaacaagagcaaaactccatctcaaaaaaaaaaaaaaaaaaaaagtcctgacggnacctcagcctccctcaaattcccttcccgtcctgcagaagcaacccttcaagacttctnccttactaaaaagtcactcttcttatagncttattaataaaacatggtataattgctaaatgtacacattaccccttaaccccttangnacgccgattct

SEQ ID NO: 8196 - DNA, 566 bp, Homo sapiens
  misc_feature (469)..(469): "n" may be a, t, c, g, other or unknown
  misc_feature (471)..(471): "n" may be a, t, c, g, other or unknown
  misc_feature (483)..(483): "n" may be a, t, c, g, other or unknown
  misc_feature (558)..(558): "n" may be a, t, c, g, other or unknown
ggcttgtgggattttcaagatgttttattgactatctaatttgaatctacttacaaagagaagaaaaatgtctagtatgtaaagcaatgaatgaaaataaatgtttatcctaagtcattattgagtacaaatccacagcttaacaatgtgtttttaacagcaggagagcatgcaactgctctaacacacagggtcagaaataaaaggtaaaagtacatttgttttgtaactgtaaatatacaaatataaaatttaccatatctaccctgtagtgtggcactgcttaactgccaaatatacagtcattcaaaaaccttaaggaaacattgaaaatgtctcaggctactttactgaacattaacgaatattgtgttcttgagctattagagctaaaagtattatttttaaagttatatgagcaagggaataataaaagtatcatttcacgtgtcttttaatcccatagacngntttttggtaaanggattaattatgttaaaaaggaaactgatttgccaaatagaaaccagtttcagaacccaagtggcctcttggtanaatgtcaa

SEQ ID NO: 8197 - DNA, 568 bp, Homo sapiens
  misc_feature (479)..(479): "n" may be a, t, c, g, other or unknown
  misc_feature (506)..(506): "n" may be a, t, c, g, other or unknown
  misc_feature (548)..(548): "n" may be a, t, c, g, other or unknown
ggttacatatactgtttttatttgggtttgttgaatgagaataaaaacaccccagtttcttctgcaggtcgagcccttctctataacggtcattacaaacaaccctgaagtggctggaatatagtcagcaaggggcccacatgaacagctcatctggaatctttgcaagtacgtatttatgtcctttggtgccttgcacagtaaggcactgttaatgacgtaacagaatagaggaaatgcccacagcaaatagttctagtgacaatttactagacaagttacagtttaataatggtggtggtgattgtttctttcattttattattattatttttttacaataagggtgtagcctttatactccacacacacaaaataaaacaagtgcttattacgaaaagagtccctgcccccaccccctagaacatcctgaacatagcaattcaacagaacagaaaaatcaagacgtttggatttcnaaaatttcaattaaaaaaccaaaagtntgtaatgcaacagctggtcaactttcaacttttaaataggcnccatttaaccaaaaaaccct

SEQ ID NO: 8198 - DNA, 562 bp, Homo sapiens
  misc_feature (484)..(484): "n" may be a, t, c, g, other or unknown
  misc_feature (505)..(505): "n" may be a, t, c, g, other or unknown
  misc_feature (552)..(552): "n" may be a, t, c, g, other or unknown
  misc_feature (560)..(560): "n" may be a, t, c, g, other or unknown
  misc_feature (562)..(562): "n" may be a, t, c, g, other or unknown
gaatatcagctcttttgttgtttatttgtaacaaatgtgatatttggttcctgtcagtttgattccttcatttttgtctctcattttgttcgacatttaagtacagcatagggatgttatttaatttacattctcacactctaaaagaaatactattctgaattaagtagaaaaagaataagcaagtgtagttactctggtacccattaatcacattttccatatttttcaaattttatacgataatgaaattccctctgttcaacacaaaagaaacactcattctggaaagtgtggccatttgaggcacaaacaggtgctgtcacattggggcagtctgcattgtaatcagggtccagtgggatatacattttacatcggggcttaggccacctagtgaagtcacgtttattgaaaattcctgagaaagccacatgtgtcaaagtagagcataccaggaaaaatataatcttgtgggggaaangcagccatttgatctcatatnagactcttctttgaaaaggctggatgaaggtggcttgaaaatggccngctcttgncn

SEQ ID NO: 8199 - DNA, 557 bp, Homo sapiens
  misc_feature (535)..(535): "n" may be a, t, c, g, other or unknown
  misc_feature (537)..(537): "n" may be a, t, c, g, other or unknown
  misc_feature (556)..(557): "n" may be a, t, c, g, other or unknown
ggggctgtgactgtatttacttcattcttgaatcccgcgtccccgtggctgggggctgacacatccctgggcaccactgtgacttcctgtgggtcccttcccttctgtccctgactctgtagaccccccacaggaagggtcctaggtagggggaggttcctcctcccttgaaaccctgggccactctgtcaaggcaaagcctctgggcccagcaccttgtaaaggctttgatgagaggagctctggcttttgctcagggcctttggcaccccaccctccagcccccaggagtgcaggcgctcaaagcctgtggctaggctgcccgaagcacgtgccgcagttcttctggagtgggagcagggggacagagctttgggtagaggagggtcacctgcaaagctggaatgccaggggagtgggcggtgccttcagctcctgggggccaaggtgtctcatacctcatgggcctgaacctgggcaagggtctggaatgcacataacccccaagcagggaaggggcaatgacaggacaaancnctcatctgtccaaaactgnn

SEQ ID NO: 8200 - DNA, 556 bp, Homo sapiens
  misc_feature (495)..(495): "n" may be a, t, c, g, other or unknown
  misc_feature (515)..(515): "n" may be a, t, c, g, other or unknown
  misc_feature (530)..(530): "n" may be a, t, c, g, other or unknown
gcttgatgtctggaacagttaccgaaactagacctgtatcgcgcatctctactagtgcttgggcctcaaagcagtgctcatcacctaactgcacaaagaaatgctattaggtccaattatgagataagctgaattataaatacacaattttcagaacgacaggcacttaaagctcattaagtaaaatacaaaaatagattatattaataagaaatatttagtgttcatcaaattgtaaatctaggcttttgccattttttaaaaaggatactggaaactgaaaagagatgacattcatatgaacaatgcatttttcaaacttttgttctgagcgctgaacaatctaagaaattttagcgcaatctaagaaaaaagacttaccacaaagcacctaaaataacattgtagatgggtgggaacgctgtcaaccatttcttaagtttcccttccaagtctcagtatcaaggcatcaagattcatttcacaaacgattgncagccttcggaatcaggtantgggcctgatgtcanaaaccgttaaaaccttaggaggggct

SEQ ID NO: 8201 - DNA, 560 bp, Homo sapiens
  misc_feature (347)..(347): "n" may be a, t, c, g, other or unknown
  misc_feature (525)..(525): "n" may be a, t, c, g, other or unknown
  misc_feature (540)..(540): "n" may be a, t, c, g, other or unknown
  misc_feature (542)..(542): "n" may be a, t, c, g, other or unknown
agtaaacccagtttatttacataatacatattttgtcatgcagcttactgaattgcagttagtgtaataacaaaaaaagacaagcactgtcttgctatttgaaaatggcttaatatagaaagataattgtttcttaaatgagttaaccacaaccatataaattgctagacaatttaaaacagccatagataattttaaaatgtaaaatctgtaggcaaaaagcttttatagttcacacattggtaaaattaaaaccagtcttttttagtaataaaactggatagtataatcttactttaatctataaaaacaaaaataacttaaatatacatcattacaaggctcanatttgtagacaactttaaaatattttttaatgttaacaatgtcttcaaaattttaccagtagtgctgtgcacacagtaggtggtcattaaatgctgactgacatacagaagtgtttctagttaacagcaatccatattcattcattcattccctattttataataaattttcatagcngtgaaaaaatgagangntactttcttaccatttta

SEQ ID NO: 8202 - DNA, 571 bp, Homo sapiens
  misc_feature (499)..(499): "n" may be a, t, c, g, other or unknown
  misc_feature (501)..(501): "n" may be a, t, c, g, other or unknown
  misc_feature (508)..(508): "n" may be a, t, c, g, other or unknown
  misc_feature (515)..(515): "n" may be a, t, c, g, other or unknown
  misc_feature (542)..(542): "n" may be a, t, c, g, other or unknown
aaacaaaattcacattttatttagattgaaataaactatacaaaattgattttcttcaccaaaaataacagcaatattttccatatttttctagataaaccacaacacttattttgtaggttttccaggttttgcttataaatcaagatgaggcagtatataagagtcatggaaaaagacagagaaaaaaaacagacaaatcagttgtcagtatccatggcctctgattctgtctcaaccatgaaacagaagtgttcaacatatacctgctaaaaagcttaggaagatgtaggctccacaaaggaatgtaaacagcaacgagatgtggaacaacagcaggcttttccattcaaactttgtcatttgtttctttaagttcaagaaagacaaaatctacactgaaatccttgtttggtgagctcacaagcttttctccggtaatttcttgtaactgtccagtatagatttttaacatacttaaaactcctattagtcaaangncaattgngggcttnactacaacattttataaaatggttccnttcttcacacctttttaaaaaatattttt

SEQ ID NO: 8203 - DNA, 570 bp, Homo sapiens
  misc_feature (494)..(494): "n" may be a, t, c, g, other or unknown
  misc_feature (536)..(536): "n" may be a, t, c, g, other or unknown
  misc_feature (539)..(539): "n" may be a, t, c, g, other or unknown
  misc_feature (541)..(541): "n" may be a, t, c, g, other or unknown
  misc_feature (554)..(554): "n" may be a, t, c, g, other or unknown
  misc_feature (562)..(562): "n" may be a, t, c, g, other or unknown
cactcataatttaaaatactttgttttgatgaaatgctttgctttcacaatagaagatcagtagtacacagtatattgaactctgtaacaaaattattttttgagaaatacagaagtgagaaatagtgatttcctcaatttgtttatagtcttatcacaaagtaggccaaagttcagtattaaataaatagatatcctaataaaagtttgtacaagtcttcctaaggaattacattcgtaagactgtttaccttctgtttgacagcagtgacaggaacgtggggattcccactcatgacgagtccctagcacttggctcctagcacccacagcctaggcgcactgcatcacctggtggggtgcagcctgggcttctgcgagtgaggtttcctcacctggaactctggttccatgtttgtgcttagcctgtgcgattctggtaaacacagaaaacctgcctgtccacccccagtgctgaagactgactggtcaangaggtgttagtgaaagtgttgggttcaccatgtggagaacangcngngattacccgcatnttctttgntgacttta

SEQ ID NO: 8204 - DNA, 567 bp, Homo sapiens
aaagtgcagacttttattactgccattcctgctcctaatgggagcaggagtcagaaggaaaaacaaattaaaaggggctaatgagaaaggaggagagatgagacagagagtgtgaagggctatgccgctggcatctcataaattcttattgagaatggcacaggtattaaaaaagtttctgggtagtctacgagaaatgtcaattattatctctactacaactacttacatatatctaatgggaaaagagtggggcttaggtgtcagagtggatgggagacaaaggagaagctacactaataaatacaacaagtggaaggtacctgtcccattcctaaaaggatttgtgggcaatgctggcacttggtggccaggagaatcttctgaccccactctccctcctcttcagtcctgaagaccccaagaacccagttaggatcccctggccagaggtctctgtgactgcctctggactcagcacgtgcagcagcttgggaggatttgagccagtctcaaaaacttttagccccagaatgagaccagtgccccaaccaggaaggcttggga

SEQ ID NO: 8205 - DNA, 547 bp, Homo sapiens
  misc_feature (471)..(471): "n" may be a, t, c, g, other or unknown
  misc_feature (492)..(492): "n" may be a, t, c, g, other or unknown
  misc_feature (495)..(495): "n" may be a, t, c, g, other or unknown
  misc_feature (507)..(507): "n" may be a, t, c, g, other or unknown
  misc_feature (525)..(525): "n" may be a, t, c, g, other or unknown
  misc_feature (539)..(539): "n" may be a, t, c, g, other or unknown
ctacaaaaataagacatttcatttattaaaattttatagagaagcatacaagactacaacaaatcactgaagtcaaggtctaaagtctttgagaagtcagatggaccggacgcagtggctcacgtctgtgatcccagcactttgggaggccgaggtgggcagatcatctgagctcaggagttacagaccaccctgggcaacaaggcgaaaccccatctttaccaaaaatacagccaggcatggtggagcatctgtggtcccagctacaccagaggctgaggtgggaggattgcttgggaggcagagattgcagtgagccgagattgtgcactgcactccagcctgggtgtcagagtgagaccccgcctcaaaaaaaaaaaaaaaaaaaaaggccgggtgcggtggctcatgcctgtaatctcagcactttgggaggccaaaatgggccggatcatgaaggtcaggagttcnaaaaccagcctggccaatacnggnggaacccttgtnttactaaaaattccaaantaacccggtgtggngggcatcc

SEQ ID NO: 8206 - DNA, 543 bp, Homo sapiens
  misc_feature (502)..(502): "n" may be a, t, c, g, other or unknown
  misc_feature (543)..(543): "n" may be a, t, c, g, other or unknown
gacatagttatcaagtgtttattcagaaactatttaaaaaattacatgtgctgggatacatatgagactgtaacaacagtagccccatcttacagatatcctgtttgtcattatcatcattgcttgctgcccacagggataaagacattgtatagagacttgtacagtccatgatttggtcttctgaggtgccagtacacgtggatctgtacaaatgcaactgggtttggttaaacaatcgaaaatcggctacaatagtagtcaaatgaacatgtcattttggttcattaataaaaatactttcaaatattttctaataaaacccaaaacttgcaaacaattctctcggaatggcccaatcaattgccctattttttaaaatacattgggatacaatcagctctgttttcttaaaagaaaatgcagattcaattgggtgggttgcattggcttttaaagaattagcccattaaatcttcacatttgaatgattgaaatgccnttctgataccacgttagttttagaaatgccgaatcctaatn

SEQ ID NO: 8207 - DNA, 554 bp, Homo sapiens
  misc_feature (384)..(384): "n" may be a, t, c, g, other or unknown
  misc_feature (441)..(441): "n" may be a, t, c, g, other or unknown
  misc_feature (443)..(443): "n" may be a, t, c, g, other or unknown
  misc_feature (512)..(512): "n" may be a, t, c, g, other or unknown
  misc_feature (532)..(532): "n" may be a, t, c, g, other or unknown
  misc_feature (537)..(537): "n" may be a, t, c, g, other or unknown
  misc_feature (542)..(542): "n" may be a, t, c, g, other or unknown
  misc_feature (549)..(549): "n" may be a, t, c, g, other or unknown
gaaacagttctctttacccgtgatcactgagtgacgcctggggcggggaggccgaccgagagtcgggggcgagggctcccccaccgtccccctgcccccacgccacgtcgcccagcggcatcgtggaaagaggattctcccatgcaaaccccggagccagaggagaaggggaagcgccattctgcgccccctacccccggggcacggacacggccacagcacggggggcggtgaggccccggggacacgagacacgggggagggagaggggaccccgcccgcagatgacccgggggaccggcgaccggacgcggcggggcggagctgagtggcacagggggcgaggcttgtagcagcgagtcccccctcccctcctttcggacnaagaaggaagacttgggccccgcgactgggcaggaaaaaggggagggagcaaccttntncccgcatgccggcccggaaggaaagccccggcccctttccgcggggtaaaggacacccgttttccaacngaaacttgttcaattaattnccaangtttnagaaaanggaat

SEQ ID NO: 8208 - DNA, 545 bp, Homo sapiens
  misc_feature (495)..(495): "n" may be a, t, c, g, other or unknown
  misc_feature (541)..(541): "n" may be a, t, c, g, other or unknown
  misc_feature (543)..(543): "n" may be a, t, c, g, other or unknown
ggtagcatcaattttttatttatagttttttctaaacaagatccgaagaaacttccactttaattttccccttggagtacttaaagtacttcaaggttcaatgtcaaatgcagataaaaccccttcattttcaaacttactaagtgttaacaatacatttgatagtgagcagaatatgaaagtacagatgttatcaaaagaggaaattcttatgatactaggttcagagattaaagaatttgaaacaagggctttcatgactggggaaaatcaaagcttttcttgaagggagtgggcttttaatactcgagctattaattaaatgcagaaatgagataacatagttatcctgaacatcaaaaaagcaacagctaatacagctaatgcattataaataatgtatttcataactgaattaagtaaagcatggttaccactctaggctagacactaatcagtttaacccatttgtagtttctaattttaaaaaagttngcttccatattttaaatttcaatttactatatatatattacatatntncc

SEQ ID NO: 8209 - DNA, 535 bp, Homo sapiens
  misc_feature (444)..(444): "n" may be a, t, c, g, other or unknown
  misc_feature (485)..(485): "n" may be a, t, c, g, other or unknown
  misc_feature (535)..(535): "n" may be a, t, c, g, other or unknown
aatttttaaaatttttttttgtaaagacagggtttccctatattgcccaggctggtctggaactcctgggctcaagggatcctcccacctcagcctcccaaagtgctgggattacaggcagccatgcccagccagggcagtcatttttatgcacaactttctgtggggctcaggtgcacctatgatacataaatttacagttcttgatccccaaacagagcaggaggcagggtgcctgggccaggcttcctttgggaaatgtggtccttgaggtagagtcacagatgccggagggtgaccagcactactggggagagatctcctctgggagagatgcatgccaaaggtcctctgcattcctcatacctctgatgcggacagaggggtgtccagctgaatgatgtggggcccccgcatctctgcaactgggcccgaatcaacttncgtggcctgctgtccccgggctcttggccccttaatccttngctgggcagctccttccggatttttttacatgtcctaagcccgattgggn

SEQ ID NO: 8210 - DNA, 534 bp, Homo sapiens
  misc_feature (60)..(60): "n" may be a, t, c, g, other or unknown
  misc_feature (63)..(63): "n" may be a, t, c, g, other or unknown
  misc_feature (99)..(99): "n" may be a, t, c, g, other or unknown
  misc_feature (104)..(104): "n" may be a, t, c, g, other or unknown
  misc_feature (160)..(160): "n" may be a, t, c, g, other or unknown
  misc_feature (165)..(165): "n" may be a, t, c, g, other or unknown
  misc_feature (184)..(184): "n" may be a, t, c, g, other or unknown
  misc_feature (202)..(202): "n" may be a, t, c, g, other or unknown
  misc_feature (222)..(222): "n" may be a, t, c, g, other or unknown
  misc_feature (237)..(237): "n" may be a, t, c, g, other or unknown
  misc_feature (267)..(267): "n" may be a, t, c, g, other or unknown
  misc_feature (463)..(463): "n" may be a, t, c, g, other or unknown
  misc_feature (475)..(475): "n" may be a, t, c, g, other or unknown
  misc_feature (491)..(492): "n" may be a, t, c, g, other or unknown
  misc_feature (521)..(521): "n" may be a, t, c, g, other or unknown
gggccacactgaggcatctttatttctctgggtcacacagagcttgggcctgggagcctnttntgcatgggggctgcagctgccaagggagcggctganaccanaacaagcgctcgggtgggccccagtgcaggttgggatgtgcccggtggagtaaggngtganaacccccagcctcactctntgcctggtcctgaagcanacagcagcaggctggcccancctcccctttatganactatcctagggtttgacagcaagtcccanatgaagggtgacaggcagctggggtccacctggtctctcctcagcagggggaaccccctgcgggcagctgggaaggcagtggccaaaggtcaagaagatgaactctgcccaaacctctgctgcctgtggctatggtgggacagggctgcctttctggtcacactgggcaacaagccaattgccaaggaccttccantcccaaggcttnatttcctggcccgganncccttttgttgaacttttcgattaattcnccagggttatttt

SEQ ID NO: 8211 - DNA, 555 bp, Homo sapiens
  misc_feature (513)..(513): "n" may be a, t, c, g, other or unknown
  misc_feature (526)..(526): "n" may be a, t, c, g, other or unknown
  misc_feature (528)..(528): "n" may be a, t, c, g, other or unknown
  misc_feature (555)..(555): "n" may be a, t, c, g, other or unknown
aagaacatcaacatttatttaacatgataaaaaaagaaatgagatatgaacatttgcatttaaacaatagtaagtagcctttaatacattacatgtgctcattgtataatatatacacaatgaacataattacatttgtacacaaactaagtaccggatttgggaacctgcttattgctgtacacatgtattccaatgaaatataagcccagtacttcaaaatacctacactttgttttttttttttttaagaaaagataagcagtaacatttgtgtttaagctgacaggagtgtggcagtaactgctgacattgcaatctgaccgagaaagaattatagcagaaaacaggacatacttcacttagcaataaaatggcacattttaaatacatatatataaaatttttacaaatcaagtgtgaaacaaaagcactgcagtagctaaaatgggaagaaaaaaagaaaaccagcttcaatggaaataatactaactttaggaaaatgagaagccnaaaaatttttttntnaattccccagaccttaagaaacattgn

SEQ ID NO: 8212 - DNA, 551 bp, Homo sapiens
  misc_feature (476)..(476): "n" may be a, t, c, g, other or unknown
  misc_feature (492)..(492): "n" may be a, t, c, g, other or unknown
  misc_feature (494)..(494): "n" may be a, t, c, g, other or unknown
  misc_feature (513)..(513): "n" may be a, t, c, g, other or unknown
  misc_feature (515)..(515): "n" may be a, t, c, g, other or unknown
  misc_feature (546)..(546): "n" may be a, t, c, g, other or unknown
actcactgcagtatgagggacaaatcacaaacacttactttggagaaacagagaccatagtgtagactttacaaaatcactttttaaaatctctgtattgtgctcctcaaatacctagagccagtctttgcataaaatatcacagctttatctataaccttaaaattctgcagcagcctaaagatatggataagatataccaccacttgctattctgaaatatatctattaccatatccaacctaatgatagtatctaaaaaattctttcttccataggaagtctctgacaagctgttattcatttccttgacgttaaaagaatctggggccaacatttgtattttatcagaaaaaaataaaaaaaaagtttacctaccatgttcatattaagaacaatgtctatacaagtcagttgtcaattattttaagagaaaggtgaacatgaacatcagattaacttaattctggcagacnaaagtgaacaactttngnccagtcagccattatctantnccggggagatggccacctttccaaaagggtnttttc

SEQ ID NO: 8213 - DNA, 484 bp, Homo sapiens
  misc_feature (46)..(46): "n" may be a, t, c, g, other or unknown
  misc_feature (68)..(68): "n" may be a, t, c, g, other or unknown
  misc_feature (127)..(127): "n" may be a, t, c, g, other or unknown
  misc_feature (129)..(129): "n" may be a, t, c, g, other or unknown
  misc_feature (179)..(179): "n" may be a, t, c, g, other or unknown
  misc_feature (187)..(187): "n" may be a, t, c, g, other or unknown
  misc_feature (301)..(301): "n" may be a, t, c, g, other or unknown
  misc_feature (326)..(326): "n" may be a, t, c, g, other or unknown
  misc_feature (441)..(441): "n" may be a, t, c, g, other or unknown
  misc_feature (449)..(450): "n" may be a, t, c, g, other or unknown
  misc_feature (470)..(470): "n" may be a, t, c, g, other or unknown
  misc_feature (474)..(474): "n" may be a, t, c, g, other or unknown
  misc_feature (476)..(476): "n" may be a, t, c, g, other or unknown
  misc_feature (484)..(484): "n" may be a, t, c, g, other or unknown
atttcaacaaacatttattgagcacctgctaagtgccaggcactgnggcaggcctgcaggaatacagnggtgaatgaaagcagaccatgtccctacccctcacggagcttacagtctagcggggcananagtcatccagcaaccccctaataaagatataactacaaactgcgatcagngcctttanaaaaggaaagaatgccctaaaataagggtccctggcccaatctacagggtcaggcagggcttacttaaggatgctgaaaagcaaaacgagcaagtggggaggtaggggagtganaggctgcttgggaacactgtggganaggtgatgaatgcagtccccgacaaggtgagtttgaggaattatttgggccatcagtcaagtggagatgcccgagtttggatacatgaagctaagggaagaacccggagaaaganaagggccnnaaagttaagaaggaaaaccngccnantggggctn

SEQ ID NO: 8214 - DNA, 545 bp, Homo sapiens
  misc_feature (441)..(441): "n" may be a, t, c, g, other or unknown
  misc_feature (478)..(478): "n" may be a, t, c, g, other or unknown
  misc_feature (484)..(484): "n" may be a, t, c, g, other or unknown
  misc_feature (493)..(493): "n" may be a, t, c, g, other or unknown
  misc_feature (507)..(507): "n" may be a, t, c, g, other or unknown
aaagtttaacagtatttattcaatttgttcattcttcctcactgaagtttcttgggccttacatttttaattgataaaatagtcttaaattaacattcaaataatagctcgttccctgaaataatctagagaagccctgctccctctctttttgagctacctataataacattctgctgagccaacatggagcagttctcctggcacatcctgcctggggaaaccgtggcagtgactgtcattaatgggagtcacagagcccctccagcctctagactatgctgtcaagtctgtatggtgaaggccctgagtcaccacaacactgaaattgtttgaggtgctctggacccaggaaacactgcctggccatggaacactctagcggaggagaggtgaggattacccctggccatggagcactctggtggaagggaggtgacngattatccctggccatggagcactctatggaagggangtgacngattacctnctggatcatgggcntatgaaagaaaaaggggtggggctctagtaaaccccta

SEQ ID NO: 8215 - DNA, 554 bp, Homo sapiens
  misc_feature (497)..(497): "n" may be a, t, c, g, other or unknown
  misc_feature (520)..(520): "n" may be a, t, c, g, other or unknown
  misc_feature (540)..(540): "n" may be a, t, c, g, other or unknown
  misc_feature (551)..(551): "n" may be a, t, c, g, other or unknown
aaaaccaaaaaacattttttcattaaaaaaagtatttagaacacacaaaacaaggcaacacttattcttttttctcatcttctggtatgggatctgttggtggctcctccactgttgcactgttgctctccgagccagtgttactatcactggttccttcctctgccatactgtcgaccccctcctgcccactctccttgtcctcaggagtagacgtgccttcttcaccattctgttggctctctgttgtttcttcaaggtgtgtctcctctgtctccatcggaatgttctcgtcgtctttcttctcctcgcctttgttagctgcttgttcttcctcaggaacgatgctgctctgactgcgctcagcttgctctgcggcctccttctccctttcctcctgcctttgcggcctgttcctctgcctgtgcaatctcagctggcaattttctccatatccactttactttcagaccggacaaccttttaagctcatggtnaatgaactggctttcaggaattnctcttcttctccggggcgtncctttttgaanaag

SEQ ID NO: 8216 - DNA, 499 bp, Homo sapiens
  misc_feature (10)..(10): "n" may be a, t, c, g, other or unknown
  misc_feature (37)..(37): "n" may be a, t, c, g, other or unknown
  misc_feature (52)..(52): "n" may be a, t, c, g, other or unknown
  misc_feature (116)..(116): "n" may be a, t, c, g, other or unknown
  misc_feature (118)..(118): "n" may be a, t, c, g, other or unknown
  misc_feature (189)..(189): "n" may be a, t, c, g, other or unknown
  misc_feature (207)..(207): "n" may be a, t, c, g, other or unknown
  misc_feature (209)..(209): "n" may be a, t, c, g, other or unknown
  misc_feature (247)..(247): "n" may be a, t, c, g, other or unknown
  misc_feature (253)..(253): "n" may be a, t, c, g, other or unknown
  misc_feature (293)..(293): "n" may be a, t, c, g, other or unknown
  misc_feature (324)..(324): "n" may be a, t, c, g, other or unknown
  misc_feature (329)..(329): "n" may be a, t, c, g, other or unknown
  misc_feature (420)..(420): "n" may be a, t, c, g, other or unknown
  misc_feature (450)..(451): "n" may be a, t, c, g, other or unknown
  misc_feature (459)..(459): "n" may be a, t, c, g, other or unknown
  misc_feature (469)..(470): "n" may be a, t, c, g, other or unknown
  misc_feature (495)..(495): "n" may be a, t, c, g, other or unknown
agtttaaaanaaaagagctttatttggctcacggctntgcaggctgtacaanaaacagtgagggcttcaggctgcttccacttatgcaggaagatgaagggaggcaacgtgagcananatcacagggcaagaatgggttgaggggtaggggtaagtgccaggtgccagcctcgttttaacagccagctntggggtgggggagggacntntagagcgagaacttactcattaccccaccaatggaacnaagccnttcatgagggatccaaacacctcccattaggccccacctncaacactgggaatccaatttcagcatgaggnttgcngggttgaatatccaaactacatcactttatcagataaatgagtagtcattcaggttgaaaaggggctcaaatcctttaaggggtcattcanaatggtcaaggtcaaggttttttgcaaccnntttactgntcattaatcnnttatttaccttccgattaagggaanggcc

SEQ ID NO: 8217 - DNA, 537 bp, Homo sapiens
  misc_feature (27)..(27): "n" may be a, t, c, g, other or unknown
  misc_feature (456)..(456): "n" may be a, t, c, g, other or unknown
  misc_feature (476)..(476): "n" may be a, t, c, g, other or unknown
  misc_feature (483)..(483): "n" may be a, t, c, g, other or unknown
  misc_feature (524)..(524): "n" may be a, t, c, g, other or unknown
  misc_feature (532)..(532): "n" may be a, t, c, g, other or unknown
  misc_feature (534)..(534): "n" may be a, t, c, g, other or unknown
  misc_feature (536)..(536): "n" may be a, t, c, g, other or unknown
aatatttgaagaaatttattgagtcanatatgagtgaccatgccccatgacacagccctcagaaggtcctgaggacatgtggcaaaggtgttcttcaaagtgttcattattaaggcatccatctcccataacttcaatgcactttgctaaacaatgcattatttctgaggacatctgaatctgtttctgtaccaatggtcttaatcagaacatcacataaattgccacatctgtgtgagatactcaggaccacggactctcacacactccagaagaaaaggcacggattctgctgctgcccctccaacaccattgtggaaataaaatttcagtaaagggaccaccagtttgacaacctgcttggtgtactccacaaagcagtcaaatcagctatgtgctgcaaaaggtcactttttttttctttgagatggagtctccctgtcacccaggctggantgcaatggcgcaatctcggntcactgnaatcttcggctacctgggtcaagcgaatcttctgaaacagncccaagcngnana

SEQ ID NO: 8218 - DNA, 560 bp, Homo sapiens
  misc_feature (7)..(7): "n" may be a, t, c, g, other or unknown
  misc_feature (123)..(123): "n" may be a, t, c, g, other or unknown
  misc_feature (468)..(469): "n" may be a, t, c, g, other or unknown
  misc_feature (482)..(482): "n" may be a, t, c, g, other or unknown
  misc_feature (548)..(548): "n" may be a, t, c, g, other or unknown
  misc_feature (552)..(553): "n" may be a, t, c, g, other or unknown
  misc_feature (556)..(556): "n" may be a, t, c, g, other or unknown
gctttanatgcttctggtcccatcactgggacctaaaagaagctcacatgtggtctctggaaatgctgaagctgtggactgtagacattattttcagtccttgtcctggtggctgcataccanatgctgctccttccctgtgtgtggccagctgtacacagtgacatgctcccaaggccgcggcacaggcggtgatgggaactcctccccgggccagcctctcaggctgcagccccacggcaccctgaggccctcatctctgctcggcagctaaaacatctccttcttcgatgctctgcaactgcagcctctggctcacaagagttctgctgcctcggcggcccccgaagccgccccccgggacaagtccgtgctgtaaccaagacccctggcaaagccttctccccaaataaagtttgattttggcttcggcctcaatggctttggccaaacttgctgcgtaactgnncaaggacttgggnactttaacttttacatgaagaatcgagttcttgggaacttctttgaattggtccaccttatccctnaaanntanccaa

SEQ ID NO: 8219 - DNA, 548 bp, Homo sapiens
  misc_feature (404)..(404): "n" may be a, t, c, g, other or unknown
  misc_feature (423)..(423): "n" may be a, t, c, g, other or unknown
  misc_feature (457)..(457): "n" may be a, t, c, g, other or unknown
  misc_feature (475)..(475): "n" may be a, t, c, g, other or unknown
  misc_feature (483)..(483): "n" may be a, t, c, g, other or unknown
  misc_feature (519)..(519): "n" may be a, t, c, g, other or unknown
  misc_feature (534)..(535): "n" may be a, t, c, g, other or unknown
  misc_feature (537)..(537): "n" may be a, t, c, g, other or unknown
gagacacggtctcgctctgttgctcaggctggagtgcagtggtgcgatcatggctcactgcagcctcgacctcccaggctgaagccatcctcccacctccgcctcccgagtagctgaggctacaggtgcacgtcatcatgcctggctaatttttgtatctgttgtagagacggggttttgccatgttgcccaggctggccttgaactcctgggctcaagtgatccgcccaacttcggcccccacaaagtgccgggactacaggcgtgagccactgcacccagcaggggttgaacttttcaagccaattgcggaaacatgccctatcggccccagccccacctaactcttgctgaattctcctctcttcagacttgaaactccacatgtccttgaatgtctgganaaaccctgggacgtgccgntattcatgggtagctctggtcaatggcaccggtnggtctttgaacttcttancgatgcanaacaaaaaccccgtttgggtataaaaaacatccatnaacaagttggcaccnngnccttgggttga

SEQ ID NO: 8220 - DNA, 565 bp, Homo sapiens
  misc_feature (456)..(456): "n" may be a, t, c, g, other or unknown
  misc_feature (494)..(494): "n" may be a, t, c, g, other or unknown
  misc_feature (505)..(505): "n" may be a, t, c, g, other or unknown
  misc_feature (528)..(528): "n" may be a, t, c, g, other or unknown
  misc_feature (537)..(537): "n" may be a, t, c, g, other or unknown
  misc_feature (546)..(546): "n" may be a, t, c, g, other or unknown
  misc_feature (565)..(565): "n" may be a, t, c, g, other or unknown
gaagtagaagaacagatcatttaattatacaaacaaaatcgctttcctttgctccagcgagtccaggcaacctttcaagttcatttgctgcctgaaagaaaggtttttagtatcagaaagaacctcgctgtcctccaatatccacagggaaaacaagatcagaaacaaaagtccaccatggaagaaatcccagagcgatccaatttggaaagaatttaattaacaaaataaaacggagggaaaatggtccaggtggggccctagggagatcggacttctgtcccagctgaagtctgcccagcacacctggtgggcagcccctgggcctgtcactgcagaactggccttgacaagcagacccactgtgcgcgacgccacggtttccttacgcactcggcattatgtacagatatgaaaaaacccaacggcaggtggctggaaagtggcttctagctnccctatgctggcttggcacgttatgcatgccaagccangaaggtttgcnggctttacccaacaggtaatttngcaaaaagngaaccaccnccaaaaggttaaatttttn

SEQ ID NO: 8221 - DNA, 542 bp, Homo sapiens
  misc_feature (486)..(486): "n" may be a, t, c, g, other or unknown
  misc_feature (495)..(495): "n" may be a, t, c, g, other or unknown
  misc_feature (524)..(524): "n" may be a, t, c, g, other or unknown
  misc_feature (538)..(538): "n" may be a, t, c, g, other or unknown
attttttttttaatacaatcaccacaacataagaaaatttaggtttcaactgatgttaaagcacatttctgtatctggtggtttttaaaaaaattacatattatatatttgacattttaaaagacaacagaaacaaatccacagattactccacctttacccccactttcagctgaaaggttttaagaaaaatcttgcaggttatgaggaccagatggagcttaaaaacagatccggaactttttttttgaaattttatttactttttttttttgtatctcaagaatacttaaaggaaaaaaaaaagggttctatgagccagaggaattcccaattcactttgaaattaccatacctatcttgccatatcaaacatttcaattctgttaactaaatgaactacataatatccttaaaaatcagccagagaagagaaaaacaaatctcgcttcattattgactttgacccaaacttattctttcaangggtagttnacccactaaatatggctattataagaacntctttcttaaaagnagtt

SEQ ID NO: 8222 - DNA, 529 bp, Homo sapiens
  misc_feature (479)..(479): "n" may be a, t, c, g, other or unknown
  misc_feature (483)..(483): "n" may be a, t, c, g, other or unknown
  misc_feature (496)..(496): "n" may be a, t, c, g, other or unknown
  misc_feature (505)..(505): "n" may be a, t, c, g, other or unknown
  misc_feature (526)..(526): "n" may be a, t, c, g, other or unknown
  misc_feature (529)..(529): "n" may be a, t, c, g, other or unknown
gagatggagtcttgctgtgttgcccaggctggagtgcagtggcgcaatattggctcactgcaacctccgcctcccaggttcaagtgattctcctgcctcagcctcctgagaagctgggactacaggcacgcgccaccacgcccagctaatttttgtatttttagtagagatggggtttcaccatgttgaccaggatggtctcgatctcttgaccttgtgatctgcctgcctcagcctcccaaaatgttgggattacaggcatgagccaccgcgcctggcccactagctctagtttttatcacacattgtcacctcagatattcataaaggttagatgttgcaaaataataaactctgtccacaataaacacaggcactttactaaaaatgctcatatagacctgtggttatcatctaaaaccatcttctagaaatggagatactagcaaagagcctttcctttgccttctcttctcctntttnaccatcccagggncttaatttnggacgtttaacttccaaaaanggn

SEQ ID NO: 8223 - DNA, 524 bp, Homo sapiens
  misc_feature (354)..(354): "n" may be a, t, c, g, other or unknown
  misc_feature (361)..(361): "n" may be a, t, c, g, other or unknown
  misc_feature (472)..(472): "n" may be a, t, c, g, other or unknown
  misc_feature (482)..(482): "n" may be a, t, c, g, other or unknown
  misc_feature (485)..(485): "n" may be a, t, c, g, other or unknown
  misc_feature (488)..(488): "n" may be a, t, c, g, other or unknown
  misc_feature (517)..(517): "n" may be a, t, c, g, other or unknown
  misc_feature (520)..(520): "n" may be a, t, c, g, other or unknown
gttttaaataattgagcttcaagtaagggcagcaagtagtttttcttctttttctttctgtttttcttttttcttttctttttttaaagacgtgttttgccatgttgtccaggctggtcttgaactcctgaattcaagtaatcaacctgtcttggcctcccaaagtgatgggattacaggtatgagccaccgaacccagccagcatcaagagttttaaaattaaggacataacgccatttcacactttaaatagactatagtgtagtgtaaacatagcttctttttttaaatagagacaggatctccctatatgcccaggttgatctcacaattcctgggctcaagtgaccctnccgcctncgctcctaaagtactgggattataggcatgagccatcacacccagccaatataacttcatattcacaaggaaacaaaacaatttggggtgactcacttgtagcaatatccngcttaattgnggnggnctcgaatcaaatctacaatatcttgaggnatnggct

SEQ ID NO: 8224 - DNA, 528 bp, Homo sapiens
  misc_feature (394)..(394): "n" may be a, t, c, g, other or unknown
  misc_feature (525)..(525): "n" may be a, t, c, g, other or unknown
cttaatacttatctttattatgaaagtgtttccaaagtaaaatgatcctcataataatgattgcttccagagatcaagaatgaataattatattttcatataaaaatcagcaaaacacaataacaatacataaaataattctaattggctaacagtatttcattccatttctgacagagatgctcaagcactgaattgtcttaagaaaacaagtaaggttttgtcacctatcctatttctcactgcaagttgaaaaaaatcaaatccaaacaccaccaccccttctatgacaacaaacggctgtggaggtaaatgactatgtgggcaaagagttgatgaaaatcatgagcttaggggctttatgaaactttgggaaatcaaactcagaggttgntttccattcttaaagtaatgaagctctaagttaaagtttcagaatcatcacataactggtcctattccatactcatttcttttttttttttgcaggaatcttaatttcctaagggaggttcatggatgacnggg

SEQ ID NO: 8225 - DNA, 523 bp, Homo sapiens
  misc_feature (391)..(391): "n" may be a, t, c, g, other or unknown
  misc_feature (430)..(430): "n" may be a, t, c, g, other or unknown
  misc_feature (449)..(449): "n" may be a, t, c, g, other or unknown
  misc_feature (456)..(456): "n" may be a, t, c, g, other or unknown
  misc_feature (463)..(463): "n" may be a, t, c, g, other or unknown
actaaattatacaataatagactcaagattgccattgcttcttcactacccaaaatatccaagtctagcgcagcagcttcaattccaccagttgttctgtaagatttattttcctgacagaaacaaccactgcattattatttttacatataaagccacattaagaagtggatactgaatacagaagcaattgtccttggttttctactcctaagaatggtcaccaagtcataatatcctcaccaatgggactgcttcttaacacccctcaggaattatgaattctgaggttaaatggtcatatcatgatcagaataataaaaaaagatagcaaaaatgttaaaacaagtatagagcattcaggaacagtgaggggaaaagccatttctgnttccgtctaaatgcagacctcttcatgaaatattttggnggaagttcttaagcctggnatgaatnacatgcntataccctgcccagatggaaacctgaaaaaggatattttaattggtttggatagggaacc

SEQ ID NO: 8226 - DNA, 536 bp, Homo sapiens
  misc_feature (459)..(459): "n" may be a, t, c, g, other or unknown
  misc_feature (498)..(498): "n" may be a, t, c, g, other or unknown
  misc_feature (511)..(511): "n" may be a, t, c, g, other or unknown
cattctctgagtgctatttattgtctcaatcttcattgcttaaagtcaggaaacaacaaacacattcatatttgtggcaaaacatctacctactcatgacatggcaaatagtcattttacaataacaatacagtacaatatgatcgtgctactttcatggctaggaatgaagttgttgggtttctctttcagagctacccctaaaggcattcactttatattctctgaagagaaccagctaaccaggcggaacatccactaagaatcttccacataaccagaccccaggagcttgcctattgcccataccagagaggcccatttggaaatacaccatctggtctcttgagcacagacctggagtgtgggattcagcttggctggctccaaagctggcccctactggatcaagctgagatccccagcctgcacaggctggattccactggccaacacgtnggccccatggtgggtcctggccggggggttccttttggnaaagacctggganaggaaaggagctttctatctggagg

SEQ ID NO: 8227 - DNA, 524 bp, Homo sapiens
  misc_feature (420)..(420): "n" may be a, t, c, g, other or unknown
  misc_feature (427)..(427): "n" may be a, t, c, g, other or unknown
aataccttggctttaatgatttttcaaggttaagaaacaaattcaaattggttggagcttcaactcagtaattacaatcacaatgcatctctgaaaggccctgcatttggaggcagagtaatctgcaaagatgatagtttttacatatgtcctgttacctacaccaatataattactacattatcttataaagacaaacagttgcttcaaactctttaaaaaatatatatataatgagtttcccaaagactcgagtctatattcaaagatgagtaaaaaaaatccattacttccctagggtcactttcttcctttactcctgcttaaatgcaaaagctgatagtttctgatttgtagaaaaatctaaaggtttctgctttttagacaaattcaggttcttttttgctttttcttcctggntttctgnttcatcactttcatcaaccacacgttttcgcttctttgcttcagttccttcacttggccgttcttccttggctttggtagccccaaccttttttttt

SEQ ID NO: 8228 - DNA, 537 bp, Homo sapiens
  misc_feature (429)..(429): "n" may be a, t, c, g, other or unknown
  misc_feature (453)..(453): "n" may be a, t, c, g, other or unknown
  misc_feature (461)..(461): "n" may be a, t, c, g, other or unknown
  misc_feature (484)..(484): "n" may be a, t, c, g, other or unknown
  misc_feature (513)..(513): "n" may be a, t, c, g, other or unknown
  misc_feature (530)..(531): "n" may be a, t, c, g, other or unknown
  misc_feature (536)..(536): "n" may be a, t, c, g, other or unknown
accaagttcataattttattatactctgaatagagatgatatttaaggagcagagaaaatgactatacaaaagatttatagaacattcatttacatactggatatattctttacagtatcagaaaagtaaaaatatgcactaacaaggcagagaagacgttacaaggtatttgatgctgagaataaatgcacagtgacttttaacatggctatagcttaacactggaggaatacaacaatacgttcttttactgagtagttagtaggaccctggctataacatgcgttgggcacagttcgtgaactctccgcatttactccccagggcagtacgtgcctgtccagcgggagccctggagacaaaatgcctggaaacgttccttttcctgtggccctagaccggtgtcacggtgggggctctcttacggnttctgagcccacagtacaatctgngatgaccncacaagttggtctggttaatgcncatggtaccccaaagggagaaaggaaacnttctataccagtttttnnaaaang

SEQ ID NO: 8229 - DNA, 514 bp, Homo sapiens
  misc_feature (426)..(426): "n" may be a, t, c, g, other or unknown
  misc_feature (436)..(436): "n" may be a, t, c, g, other or unknown
  misc_feature (450)..(450): "n" may be a, t, c, g, other or unknown
  misc_feature (463)..(463): "n" may be a, t, c, g, other or unknown
  misc_feature (470)..(470): "n" may be a, t, c, g, other or unknown
  misc_feature (494)..(494): "n" may be a, t, c, g, other or unknown
  misc_feature (510)..(510): "n" may be a, t, c, g, other or unknown
catttgaaaaatatttattgagcacctgttataaggggctgagaaccataaaagacactaggggtacagaaaggaataattaagacggcctgctcttgagctcacagtctagtaaggaaggtaaacataaacaaatcattacaatacaacaggaaaagagctagagcggagatatagaacaattgcacagaggaaagagtaactaattctgcctgaaggtaacaaggaagagatggcacttgattttgaagtttaaggatgagtgatattttagcacggcagagggcagagggggcacagggcattccaggcagagggaatagcatgtgcaaaggcactgaggtaaaaacatgagcatggttggttcaaagaatggtgttgaagggtacacagaggcgggctgtaaagggtcttgtcaccacactnggaagtttgnattttatcctgtangccatgggaaagntttaagnccacatttttcatttgggtcccanggtttcttagaggctnttgt

SEQ ID NO: 8230 - DNA, 544 bp, Homo sapiens
  misc_feature (496)..(496): "n" may be a, t, c, g, other or unknown
  misc_feature (527)..(527): "n" may be a, t, c, g, other or unknown
cttttttttggtaaggagaagcaggagtaaaggggagtacctgaaatagaaatgaatcatgttaagaaatagtaaaatcaaaattaacttggttaataagtttgattttgataaaagtaaatagacatgctatatagaacaaatgaatgagtaatgtaaataacttaaaattgagagaaaagctctcttttcagggctagctacagctctcccacaaaggggcttttgcataccacataacctgggtatgagaaaaagtatgggcagagggcagtgttgagtttttgtatctgtaacttaaggtagtgttcaaaatgtcctacaaagttccttccagctgtaaattctttatatctaattcctacctccttcgtggagcctgtttttactactccaggtacatcagatttctgaaaccaaaaaatgaatgcaatttaaatgtggctagaattgactagcaaggcctagatctttaagtaataataatatattttgnaaccattaataccttaagatccttttcaagnatttggataccctggaa

SEQ ID NO: 8231 - DNA, 532 bp, Homo sapiens
  misc_feature (496)..(496): "n" may be a, t, c, g, other or unknown
  misc_feature (500)..(500): "n" may be a, t, c, g, other or unknown
  misc_feature (506)..(506): "n" may be a, t, c, g, other or unknown
  misc_feature (510)..(510): "n" may be a, t, c, g, other or unknown
  misc_feature (515)..(515): "n" may be a, t, c, g, other or unknown
  misc_feature (518)..(518): "n" may be a, t, c, g, other or unknown
  misc_feature (520)..(520): "n" may be a, t, c, g, other or unknown
gcattttaacttctttaataattcactcaaaactgtaacacgagaggaatccactgtttagttaacatttacacacaattataaagaataaaagactgaatacatttatgaacaaactgcagtatgtctttaggttcataggctgctcaacacatttaaagcgtatagcaaatgaagtcacagaactatagggctacaagaaaatcccacaagtttatagcttaactggaatcagatttatcttgatacagaataatctataaactcatttaatggtcattttgtctcatctaacaaaccacacagatgtcaaccaccgggccttgcaaatgcagagtggccatttacatttaaaatgaagtattatagacaaccagaataaaatcaattcccgtgtttactattttccattttcaatatgagcatttgaaatgttaatatgagatcaatttcactatttaaactcacattacatatctgaaactccaatgagtcngcangaattngacntctgnagncnttggctttacat

SEQ ID NO: 8232 - DNA, 541 bp, Homo sapiens
  misc_feature (508)..(508): "n" may be a, t, c, g, other or unknown
  misc_feature (520)..(520): "n" may be a, t, c, g, other or unknown
  misc_feature (523)..(523): "n" may be a, t, c, g, other or unknown
  misc_feature (538)..(538): "n" may be a, t, c, g, other or unknown
aacatgtatttctcaaaataagattcaccatgaacattattttagatatttttacatcttctttagctaaccaagtgaaaaatccaatatacacaaataggtactttcatcagtacataaaacagcaataggtagcaaggttagaaatcagaatacaagttcaattgaataaatacaatactagtacagagacacccatttttaacccacaatgaaaaatctgagccatgaataggttttccattttgaatctaacttctagatgatctgtattttgaccttaaaggggccaaaatatttaatatgggtgaagctcatgttccattacctgtaaaggtctaatgcaacagaaaaatggtcattttacattggttagaatttttaactaggtctttcatattattttgtttagcacatgacagacttatacacatattttaaaaaatcaaacatgggaatttctatatacatcaaaccctttaaccaatggtctgggctctggaattgntattataggtgntcnaaaattttccaaacnaac

SEQ ID NO: 8233 - DNA, 537 bp, Homo sapiens
  misc_feature (418)..(418): "n" may be a, t, c, g, other or unknown
  misc_feature (447)..(447): "n" may be a, t, c, g, other or unknown
  misc_feature (529)..(529): "n" may be a, t, c, g, other or unknown
aaaggccagaaacaaactttaattcccaagccggacccttaagtcacaaggaacgtcagatccggctcactccctgacagggtgaattggaaactggcccctacttggtctctaaccccttccactgggtctagtggggactctgacgccgaacaggggctgtagatcagtgagtgtgtatgtgtgtgtggaggggcagcaggggccgctttccacgtggttacataagcacgtgttggggttgggcaggtgttcctccggtctgagggtcctcgtatgtccaaagtctctgtgcataatcgcagacccagatgtgtttgcatttggtagaatcagggtgcttaaaaaggggtgactgagggctgcagttgcagaggtggctggggactgtgcctctgtgggggccggcgtgtctcantgggaagatactctggggaacccgggacnatgtcgtacgttgggtagctgtgtggacaagtggttgggggtgtgtggacatcggtggtcacaagctgggaaaatggtgtancccaaaaa

SEQ ID NO: 8234 - DNA, 531 bp, Homo sapiens
  misc_feature (1)..(531): "n" may be a, t, c, g, other or unknown
nnnnnnnnnnnnnnnnnnnnnnnnnnnnnnnnnnnnnnnnnnnnnnnnnnnnnnnnnnnnnnnnnnnnnnnnnnnnnnnnnnnnnnnnnnnnnnnnnnnnnnnnnnnnnnnnnnnnnnnnnnnnnnnnnnnnnnnnnnnnnnnnnnnnnnnnnnnnnnnnnnnnnnnnnnnnnnnnnnnnnnnnnnnnnnnnnnnnnnnnnnnnnnnnnnnnnnnnnnnnnnnnnnnnnnnnnnnnnnnnnnnnnnnnnnnnnnnnnnnnnnnnnnnnnnnnnnnnnnnnnnnnnnnnnnnnnnnnnnnnnnnnnnnnnnnnnnnnnnnnnnnnnnnnnnnnnnnnnnnnnnnnnnnnnnnnnnnnnnnnnnnnnnnnnnnnnnnnnnnnnnnnnnnnnnnnnnnnnnnnnnnnnnnnnnnnnnnnnnnnnnnnnnnnnnnnnnnnnnnnnnnnnnnnnnnnnnnnnnnnnnnnnnnnnnnnnnnnnnnnnnnnnnnnnnnnnnnnnnnnnnnnnnnnnnnnnnnnnnnnnnnnnnnnnnn

SEQ ID NO: 8235 - DNA, 538 bp, Homo sapiens
  misc_feature (311)..(311): "n" may be a, t, c, g, other or unknown
  misc_feature (472)..(472): "n" may be a, t, c, g, other or unknown
atatttaaattttttaactgtaagtaaattcaaacaaactgttataaaacagaatacacagttgtctgcatagatcataaaaaacataaaaaccagaatgctgggtaggtgctggtggtgaaaactgcagggctaaaacttgctcaacaatgaactagggaccactatggcttaatgaacatggcccacccctcctactaatggttttgtcaacttttggaccctagaaattcagaattttctccttcttcctctgccagctttggtccgtgtccgactacctggctggacagtaacttgctttttaaagnccactaagcaatctgtggcttctgaaatggaaacaaaagacttgacgggagattcatttaagtcacgacgtgtgaaagaactctgcatctctctgctgcaagcctgcctcttcatcctggtgaaggcaccctgaaggctcctggttctgaagacttgatgnctgcattggaggcttggcttaaactgttccaagaaactaagggtcggccttactggggccttttct

SEQ ID NO: 8236 - DNA, 549 bp, Homo sapiens
  misc_feature (455)..(455): "n" may be a, t, c, g, other or unknown
  misc_feature (523)..(523): "n" may be a, t, c, g, other or unknown
  misc_feature (540)..(540): "n" may be a, t, c, g, other or unknown
  misc_feature (546)..(546): "n" may be a, t, c, g, other or unknown
  misc_feature (549)..(549): "n" may be a, t, c, g, other or unknown
aaatatttaaatgtttattaggtattatacttatgaaaagtgcaaaaacaaagaactacagcttactgatttatcacaaagcaaacaccacataggccaagaaatattacattgcaagcaccttacatactccactcatgcccctttcccatcaccagcctctccctccctttgaaaagtagccattagtcttaatataatgcagtcatttctttactctcctttataattttaccacctaagcattcatatatatgcatgtgtataatacagtttttatctacagaagtgtaaataaaactattgctttgctttgcctatatttgaactttataaaattaaaatcacatagtgtatggtattcttctgtgctgtttttcacgtatattcatgaaatcaatccacattgtggcatactgctgtaatttgcttatttcattgatatataatattgnacaaaatggtacaatttatcaatttctatttataatggacatttgggctggttcagttggggctattnagaaaaatggggcatgnaccggnttn

SEQ ID NO: 8237 - DNA, 560 bp, Homo sapiens
  misc_feature (494)..(494): "n" may be a, t, c, g, other or unknown
  misc_feature (502)..(502): "n" may be a, t, c, g, other or unknown
  misc_feature (512)..(512): "n" may be a, t, c, g, other or unknown
  misc_feature (534)..(534): "n" may be a, t, c, g, other or unknown
  misc_feature (546)..(546): "n" may be a, t, c, g, other or unknown
aacagcttgtactttattacatatgcaaccttgccatgcctgccagttaactcccctcccgccaatgttatcctcatgatatcagctccctcttggggccactgagctgcccccctttccttctgggctggagtagtggtgcccctcaagcaggcaatgggcagggggagatccacaattaatcgtcgcagttctcttaaaagtattaacacttaaataagcactcttggggagttgcaaaggatattcaggatgggatgcagtgggaggctacccctcatccaaggtacaggctggaatgagctacagctggtctatcgtgggcctcagaaggtgaagagggaccgtattctggggcttagtgtgggtggggcatatcctccccaaacttgttctggtgggcgatgttcttcacatctaggaaagcctggtggtggacataggcctgacagtagtaacaccaggctgacaggtcgatgtaactgaaggaccancgggtgtncaagaatttncatggtggttggaacatgtggncattgatgtacnaccccagtagactt

SEQ ID NO: 8238 - DNA, 554 bp, Homo sapiens
  misc_feature (502)..(502): "n" may be a, t, c, g, other or unknown
  misc_feature (504)..(504): "n" may be a, t, c, g, other or unknown
  misc_feature (518)..(518): "n" may be a, t, c, g, other or unknown
  misc_feature (529)..(529): "n" may be a, t, c, g, other or unknown
  misc_feature (554)..(554): "n" may be a, t, c, g, other or unknown
aacacaataccatttatatatgatacacaagacaaacatatttgaaaggtacatccacaagtatgcaaacattcaaagttctggaaagacacacattaagccatgacaaccacagaagggctaaggaaaatttccatgttgaaacacttctggggccaggtgtgatagctcacgcctgtgatcccagcactttgggaggccaaggtaggcagattacctgaggtcaaggagttcaagaccagcctggtcaacatggtgaaaccttgtctctactaaaaatacaaaaattagcctggcgtggtggtgtgcgcctgtagtcccagctactcaagaggctgaggcaggagaatcacttgaacccgggaggtggaggttgcagtaagcccgaggtcgcaccactgaactccagcctgggtgacagaaccgagactctgtctcaaaaaaagaaaaaaattacccggcatgctggcacatgcctgtaatccagctcttcaggaagctnangcaggaaaaacccntgacccccganatggaaggttcaatgagccaaggtn

SEQ ID NO: 8239 - DNA, 554 bp, Homo sapiens
  misc_feature (440)..(440): "n" may be a, t, c, g, other or unknown
  misc_feature (465)..(465): "n" may be a, t, c, g, other or unknown
  misc_feature (525)..(525): "n" may be a, t, c, g, other or unknown
gcttcaggcgcttttattaggttccactgcagggctggggtcaatgtaatgcaaatccaagcccagtgatgcacacctgtgagccgaaacagagccgaagcaggagcacctgtgtcccaggagcagctggttggagggagccagggccaggccccacctcctctcgggaccaggagactggcagccgctgtgttcacctgggcaggtgtgcacccagtcacccccactggattatggtgctggtagcatgagagggtgtgtccacaccaagggcaggtgaagatgcgaggtggggctgagacctccttcccacaagaggaggtggctgagcctcccagggcctgaactctcacagcagggctcacccccaagcctgtatgcttagctctgactctctttggacaataaaataaagtgcattactgaacaaagagtaactnaaaaccagaatcagacaaatcgccnatgctttttcctttacttaaagaccaaagaaacatgaatgatgtgaatgcccggaacttnagagtaagggaaatcttgtggaggacaac

SEQ ID NO: 8240 - DNA, 551 bp, Homo sapiens
  misc_feature (548)..(548): "n" may be a, t, c, g, other or unknown
aacagatttgtatcagtttattttggtgcaaaaactgtgaaattcatgcacaatttttccataatatgtatttttccatgagcttcttgaagaccacttgtactagaaaactgtattcaagaggatatataaaaggattgtagatatgcaagtgccatttacttctggcatgcaaggatggttcaacatattcaagcaaatcaatgtgatataccacttgaacagaatgaaagatgaaaaccacatcatctcaacagatggagaaaaatcatttcacaaaattcagcatctgatcatcatagaaatcttaaacaaaatagatggagaaggaaatttacctcaccaatagaaagaccattgatgaaatgaccaatgtggagataaccaagcagggaaaatagaatccttttcccgtaggatctcacatgatgcaagaacgttctcactttttctattcaataaatactggaagtcctagccagagcaatgaactagccaaaagaaatgaatgcctcaaaatcaggaaaaagttaaaatatatttttggnaga

SEQ ID NO: 8241 - DNA, 555 bp, Homo sapiens
  misc_feature (441)..(441): "n" may be a, t, c, g, other or unknown
  misc_feature (447)..(447): "n" may be a, t, c, g, other or unknown
  misc_feature (457)..(457): "n" may be a, t, c, g, other or unknown
  misc_feature (519)..(519): "n" may be a, t, c, g, other or unknown
  misc_feature (527)..(527): "n" may be a, t, c, g, other or unknown
  misc_feature (533)..(533): "n" may be a, t, c, g, other or unknown
  misc_feature (547)..(547): "n" may be a, t, c, g, other or unknown
actagagacgaggtttcactgtgttggccaggatggtcatgatctcctgaccttgtgatccgcccacctcggcctcccaaagtgctgggattacaggtgtgagccaccgcccccggcctgggcttggttttctttaggtttatcctgtctggggctcatggaacctcttcaaacttaagtttttatcttacaccaaatatgagaaatgtttcatcattattttttcaagtggttttactacatcacactttctccttttcttccaggatactgaggtcatgaatgttagccatttggtatcataacactgctccccaaggctgttgcacatatgctgaataatttaagattatagtctacacttctgaattttaggttatgacactcttgggtctgtcaagtcccacgggtgatggagatactggttcatcaggcgaagtnacctantcaggttcangaggcaagttctattggaaaccatgtggggtcgtgcttttcatggtggatctggcttaaagnctacgcanaactgnttatggctcttttnggcgaagg

SEQ ID NO: 8242 - DNA, 525 bp, Homo sapiens
  misc_feature (504)..(504): "n" may be a, t, c, g, other or unknown
  misc_feature (511)..(511): "n" may be a, t, c, g, other or unknown
  misc_feature (522)..(522): "n" may be a, t, c, g, other or unknown
gcaacatttaatacagtttttatttgtttaatttggtaaatgtagaatgtaatggtttcaaggcaaaccctgcactacttcagtcacaacccaatagttaacatgattctgaagaacagtcttatctgcaatatctacccacttctaaacaaacacatctatagaaatccatgtacatatatattagttttcaacaagtcaggattttcaacaactctaaaatttcaattttatattctgaacacacttcaaaattatccacttgatgcaggatataaccatagggagataaaaattcatgcaatgatactcaggttttttttttttaaaggtaaatccaatatttgatcattcaatgctacataaagtgcattgaatatcgaaaataaaacaagcgccaattttatcattaattaataacacatttattatcttgaaaccaaactggcccaagttactttttggctttttgagtcaactctggattaactcaattcttttaanctttctngggaataaaancca

SEQ ID NO: 8243 - DNA, 530 bp, Homo sapiens
  misc_feature (459)..(459): "n" may be a, t, c, g, other or unknown
  misc_feature (487)..(487): "n" may be a, t, c, g, other or unknown
  misc_feature (491)..(491): "n" may be a, t, c, g, other or unknown
  misc_feature (513)..(513): "n" may be a, t, c, g, other or unknown
ggagggcaggtaactttattcagagcacatggcgagtaagaggcaaaacttctgcctgcgagtccaggatttccttcactggaggacactgcttgctccccagagctcaagaccctgttttttgtctcactcccacccacagagctcccgtacccaggcatcagctcccactcccactcctgggggctccatttccttcctgcccaccattcagcctgggccagaagttgccactggcaactctagtcctgggccagatctggcccacagacgtgtttatttggcctacaaaaagcagctaatactttgaagttaattgtcaacatataacctttgggaaattaaacaaaaaacttgattcccattttcttaaaaggcctgtgttccctctcacagcgaaagcaggggagcagccacttcctttagaacaggtgctagcccctattcagatagcttggntcttctttaaactgggctcaactggccnttancccaagctttggttcccttaanaaccaggcctggcccct

SEQ ID NO: 8244 - DNA, 519 bp, Homo sapiens
  misc_feature (479)..(479): "n" may be a, t, c, g, other or unknown
  misc_feature (481)..(481): "n" may be a, t, c, g, other or unknown
  misc_feature (493)..(493): "n" may be a, t, c, g, other or unknown
ggcttccaataaaaaataattcaactttattagtatgaaatattttgagataattagtgacccaaatgcatgattctccaatatgaaaggtgttcagcataagcatacaatcatttagtaaaactgctctttatgagacccccagaaaagctggaggcacttcctctttttggtggagagagaagacactacttaactggccatttccttgctggagtttattccgattcccttttgtctgattcttcctcctcaaactcgactaaaggagtgtgtctgttggcctgagcaccttctctgtagaacactttctttactgtgccatcctttggagactttatggtatgctccatcttcatggcgatcataaccatgagggaatctcccgctttcactttgtctccagctttgacaaacaccttttcaatggtccagtcataggagctaaagggcccgcctgagtttcttgggagctcacngnagataagatttngggacctggaaggcaaactcaatcct

SEQ ID NO: 8245 - DNA, 523 bp, Homo sapiens
  misc_feature (447)..(447): "n" may be a, t, c, g, other or unknown
  misc_feature (476)..(476): "n" may be a, t, c, g, other or unknown
  misc_feature (483)..(483): "n" may be a, t, c, g, other or unknown
  misc_feature (499)..(499): "n" may be a, t, c, g, other or unknown
  misc_feature (514)..(514): "n" may be a, t, c, g, other or unknown
gggattaggagaacactctttaatgataaagcctgtccaagtactaaggacaattagagtaggcaggtgacctgtacaaagtattagtgataacacaacattcagcttcctaagagttaaaacgtgctgcttacatgaagggagatgatactgagctaagaagtcctggtatagagaagcagagagaccaacctacttcatattatttataaaatagagaatattctcagctaacatgctgggagaaaaaattcttccaaaaaggcagaattacaatcaatgccaagatttacaaattccatcatgtttaaatataaggacaaaaataaacatttcttatttaaaaaaaacccacaaatttccccaactatagcttatctgttagcacttctttatcagtctgactattctttaaaggccttaaaacatgaatttgggattaaaacnaattaaagtgcccaaggtttaagaagccntatggtnacctaaggaggtaacnatataatttttaganccatcatgg

SEQ ID NO: 8246 - DNA, 570 bp, Homo sapiens
  misc_feature (444)..(444): "n" may be a, t, c, g, other or unknown
  misc_feature (482)..(482): "n" may be a, t, c, g, other or unknown
  misc_feature (485)..(485): "n" may be a, t, c, g, other or unknown
  misc_feature (502)..(502): "n" may be a, t, c, g, other or unknown
  misc_feature (513)..(513): "n" may be a, t, c, g, other or unknown
  misc_feature (523)..(523): "n" may be a, t, c, g, other or unknown
  misc_feature (543)..(543): "n" may be a, t, c, g, other or unknown
  misc_feature (549)..(549): "n" may be a, t, c, g, other or unknown
atatttaacagtgatttattcaaacatgtttcacgtttgtgtattattaggtaacaaggatattagaattgagtctttactcctatcctctagccagttagttttatcagggagataatgcacacatgtgtacatggaaagatacaaaataatacaatgccaaagaaaggaactcaaaatatgataagacagaacttgagctagatcttttgaaaagttaggatttagataagttgagaagaatgagagaaaattgctcacaagagttaggaatatttgtgatgtgtttgggaaaaaaataaatggaatcatttcactggaattgagaaatcaattaggagatattaaaagctggggaaaggctggattctaggggtttcatatgtcatgaagacatagatttttgagccaggaatattcgaaaagcagtgttttggaaaatangcagcagtaaataaatgagaaaattaaagagatttgangcnggtagatttctaatttnaaatcatcaangccgagaaangaaggaaggaaaaccaaggncgtttntcagtatggtccttcagggac

SEQ ID NO: 8247 - DNA, 576 bp, Homo sapiens
  misc_feature (555)..(555): "n" may be a, t, c, g, other or unknown
  misc_feature (563)..(563): "n" may be a, t, c, g, other or unknown
cactgtgaaatatttatttttgttttgtagtattaagcatgattaaaccagtgcagaaaaatactaagtacattgggtaaaagatgagctagctgttctagtatttgctttttgtaatccagttaagaccatgagcatatacaatatcatcactaactcaacaatgtagctgcagggtaacatgtggataccctgtgtgctctactggcctccaaaggcattcaggggatcatcaaagatgttggacaccttgtgttcaaatcttggttcaggtgcggcctgtgcagatcggctttttggtttggttgtcttagcctggataccagtggagaagatgtcatccatatcatcatcaaatatagacttggcttccactttctttttggacttttcttttggttttacagttaagtcagcaaagatatcaatggtatcatcaaataaattagattccaatggtttctccttctctctgggtttctgaaaagggttaaatgcttccgtgcaaaatttatcatcctcaaaaatatcttgggtggtaatatgacatcctgntgactacnggatttggctcat

SEQ ID NO: 8248 - DNA, 354 bp, Homo sapiens
  misc_feature (5)..(5): "n" may be a, t, c, g, other or unknown
  misc_feature (57)..(57): "n" may be a, t, c, g, other or unknown
  misc_feature (118)..(118): "n" may be a, t, c, g, other or unknown
  misc_feature (130)..(130): "n" may be a, t, c, g, other or unknown
  misc_feature (167)..(167): "n" may be a, t, c, g, other or unknown
  misc_feature (201)..(201): "n" may be a, t, c, g, other or unknown
  misc_feature (228)..(228): "n" may be a, t, c, g, other or unknown
  misc_feature (236)..(236): "n" may be a, t, c, g, other or unknown
  misc_feature (257)..(257): "n" may be a, t, c, g, other or unknown
  misc_feature (280)..(280): "n" may be a, t, c, g, other or unknown
  misc_feature (289)..(289): "n" may be a, t, c, g, other or unknown
  misc_feature (302)..(302): "n" may be a, t, c, g, other or unknown
  misc_feature (326)..(326): "n" may be a, t, c, g, other or unknown
  misc_feature (334)..(334): "n" may be a, t, c, g, other or unknown
  misc_feature (345)..(345): "n" may be a, t, c, g, other or unknown
ggacnccaactgcagcgtgatttattggacaagacgtgcacttttcaacagggcctnagtaaccacggtttccttcactgatcagtacaggaccagggtaaaggggcttaaagataanaaagacaaactnttcccaggaacagatggggaaagaaaggaggaagaanaggcatgtcctcccttcctccttccctagtactntgggcctccgttcaccccgtgctggantggggctnaccaagggaagctgggggcantgtgtgtcacagccagacatganctgaggctntgactgtccactnagggtcaaaatggccaggtggacnatcaactntgtccccactnaggccccca

SEQ ID NO: 8249 - DNA, 562 bp, Homo sapiens
  misc_feature (422)..(422): "n" may be a, t, c, g, other or unknown
  misc_feature (467)..(467): "n" may be a, t, c, g, other or unknown
  misc_feature (507)..(507): "n" may be a, t, c, g, other or unknown
  misc_feature (520)..(521): "n" may be a, t, c, g, other or unknown
  misc_feature (538)..(538): "n" may be a, t, c, g, other or unknown
  misc_feature (543)..(543): "n" may be a, t, c, g, other or unknown
  misc_feature (552)..(552): "n" may be a, t, c, g, other or unknown
aaattgaagaaagtgaaaagagtaagaggggacattttgcatgcaaatgggccactgccagaagagcccattaaaatgtaaaaactccacattcagcctgacaaaacggtgcaaactgctgtgtttgccagagggccggcaataaagctcacaacaaaggggccgggggacaatggcagactgaatggcctctgccagcaggtccccccgtgcgttgccatggggaccccaccggggcttactaaaggtatttcctgaggagaaaggccgagcacacaggcccaggcagcccggctaatcctgacaggaagccatggccattcagcagcccaggggcttggggcccagagttttgttttgtttttattaaaaaaagatttcggccttttgtgcgtccacctcgtcactgtaatttaatgccnaacccgcctgcactagccaaagccacagcaggaaccttgacccgncccgagaccccccaaaaacagatccccccgagcttggcancaagacacgtgtnnaatccccttgggaatcnaggcnccaaaactnttggcccgga

SEQ ID NO: 8250 - DNA, 544 bp, Homo sapiens
  misc_feature (465)..(465): "n" may be a, t, c, g, other or unknown
  misc_feature (476)..(476): "n" may be a, t, c, g, other or unknown
  misc_feature (484)..(484): "n" may be a, t, c, g, other or unknown
  misc_feature (487)..(487): "n" may be a, t, c, g, other or unknown
  misc_feature (518)..(518): "n" may be a, t, c, g, other or unknown
  misc_feature (540)..(540): "n" may be a, t, c, g, other or unknown
gagatggagtttttagctctttttgcccaggctggagtgcaatggcgtgatctcgtctcaccgcaacctgcctcccgggttcaagtgattctcctgcctccgcctcctgagtagccgggattacaggcatgcgccaccacaccaggctaattttgtattttttttagtagagacggggtttcttcacattggtcaggctggtctcgagctcccaacctcaggtgatccgcccgcctcagcctcccaaagtgctgggattacaggtgtgagccccacacccagcctaaaaaatgtttttcatattatattccaggtaatcccagacctctatggggtaaatctggggatttcttggaagaaagtgcactcatggagggtctgtccacttggctcactccaacagtttgaatttggaattctgcttttcttcatgaagcacaagtcttataagcccacacctacggncttgagtctgnactcttancangtgggaactgggactgggggttggctaacangggggccactgggcaaattggntttt

SEQ ID NO: 8251 - DNA, 537 bp, Homo sapiens
  misc_feature (374)..(374): "n" may be a, t, c, g, other or unknown
  misc_feature (468)..(468): "n" may be a, t, c, g, other or unknown
  misc_feature (489)..(489): "n" may be a, t, c, g, other or unknown
  misc_feature (516)..(516): "n" may be a, t, c, g, other or unknown
  misc_feature (537)..(537): "n" may be a, t, c, g, other or unknown
ctaacatgcttgtatttattatattaaattacaaatgcctggagttacatttgcttgttttgtgtgtgcgtgcctgcgcatctatgtgtgctagctccatattaaaatcaacatttaaatattaatgcaaggtcacaaatataaatggctacttgttttttttcccttaaaaattttagtgcagctttgctttccttaaagtaatatttaattttccattattttctatttaagcccttcatcgtgggtgtaaatggtactgaagccccagaaagtcctacagagatttttcaccctacagtagctctatgcttcaagcctaaatatttataataacctgaatattatccctgtttcaaggaagactttcttgnctacggttcaccctagctatgattttatatctaaaagataatgccaacaacaaaacagcctatacctaaaattgatgggttattctgagtctgngcagatcatctgatgaaatgnaactacttacccaaataaagacgatgntctgtacactggatagcaatn

SEQ ID NO: 8252 - DNA, 151 bp, Homo sapiens
  misc_feature (145)..(151): "n" may be a, t, c, g, other or unknown
atgagtaaagttaaactttactttacagtaaattttttttctatatacaaagaattacagtacatgtttatggggactcctaacacagggctcccctctttttcactaggagtttcacttacagctgacaatctatgggggcggnnnnnnn

SEQ ID NO: 8253 - DNA, 537 bp, Homo sapiens
  misc_feature (307)..(307): "n" may be a, t, c, g, other or unknown
  misc_feature (424)..(424): "n" may be a, t, c, g, other or unknown
  misc_feature (443)..(443): "n" may be a, t, c, g, other or unknown
  misc_feature (452)..(452): "n" may be a, t, c, g, other or unknown
  misc_feature (462)..(462): "n" may be a, t, c, g, other or unknown
  misc_feature (472)..(472): "n" may be a, t, c, g, other or unknown
  misc_feature (490)..(490): "n" may be a, t, c, g, other or unknown
  misc_feature (529)..(529): "n" may be a, t, c, g, other or unknown
gagaggaaataaagtttatttaaattcagtttgtcaaagtacaaatatctttgtacaacttacgttcttctttcttaaaacttaaaagctagtagtatattttataagcatttctccagattttgatttcacaatccacaataaaaagactgtttaaaagaacttatttgtagaaattctaaagttgtgcatttacttgaaaagttactttcacaaagggtttttcaatatttcatcttagttgtataattaaacagaataaatggaagaattacacataaaatactattcaactagccatttttgntattttaaaacttaacaagtctttttttttttttatatagcacacatatcctaacattttctactggataatataacagtaacagaaaagcatgtgttggtcaaaaaagatactatngaatggccaggcttattgnatatttggnggtcccatgngtaacactgngtacatcctcaattttangggctttaaaaatggtttggttttgaaaccttggttacntaacgatt

SEQ ID NO: 8254 - DNA, 542 bp, Homo sapiens
  misc_feature (398)..(398): "n" may be a, t, c, g, other or unknown
  misc_feature (501)..(501): "n" may be a, t, c, g, other or unknown
  misc_feature (509)..(509): "n" may be a, t, c, g, other or unknown
aatctcatttcattaccaggccctgcgtgaatgccatgttgctttggaaaacaaaaccaaaaaagaaagtcttggtagggaggggctttgggaaggaccatgagagagagacagtgagaaagacagattgatttatggagctccatgactagatgctgattttccaccagaggtcaaagggccaccccactgtgccaatctcctctttctccttctctcctcgggcagatgagcctggtagcccctggcagtgatgatgtgggaaccacctccacagggaatcactaggggaattctcataggaggctcccctttctctgtccccttctcctgggcagtggttcttagggggaacttctgggaatgtctgggggctgatgctgctacagggcctgcanagggtgttactggcattgatgccaggggccaggattgctggatttcctacaagggtaggacatgttcaatgacaaaatattggcctcctaatggcaaatgccntaattaanaagcctttgcaatgccggacaagcttacaaagg

SEQ ID NO: 8255 - DNA, 542 bp, Homo sapiens
  misc_feature (454)..(454): "n" may be a, t, c, g, other or unknown
  misc_feature (465)..(465): "n" may be a, t, c, g, other or unknown
  misc_feature (470)..(470): "n" may be a, t, c, g, other or unknown
  misc_feature (510)..(510): "n" may be a, t, c, g, other or unknown
  misc_feature (538)..(538): "n" may be a, t, c, g, other or unknown
atgatttgtcttttaataaaaatggtaaactggagagagaaaattaggtttcaaaaactatagcacacctgttaaattctagtcttgactgatgtttttcaatttttatggttttcgacagtttaaattacatctgttacaggaatcaacccctgcatacatcacactcaagtcaaagcctgaaaagctgaggaagcaatcccaacagcccagaggaacgtcctaaatatcaatgtaaagaaataagaaatcttaagttgaaaatcataaaaaataactaactgagtgacaattactcatctgactcagtctcactcttacctcaccaagtactttttgtcatttctacctctccttttaagccaaatattaaagcttatttatggaaattatttaccatgccacccttgcgggaactgctttactggactatttgcagtaggactatgtctgnagcaccctganggtanggattcagacagacaatcttcaatacccgaacattttgcntaaatactatccttccgcaggaataacnagtt

SEQ ID NO: 8256 - DNA, 380 bp, Homo sapiens
  misc_feature (22)..(22): "n" may be a, t, c, g, other or unknown
  misc_feature (30)..(30): "n" may be a, t, c, g, other or unknown
  misc_feature (36)..(36): "n" may be a, t, c, g, other or unknown
  misc_feature (187)..(187): "n" may be a, t, c, g, other or unknown
  misc_feature (193)..(193): "n" may be a, t, c, g, other or unknown
  misc_feature (196)..(196): "n" may be a, t, c, g, other or unknown
  misc_feature (212)..(212): "n" may be a, t, c, g, other or unknown
  misc_feature (222)..(222): "n" may be a, t, c, g, other or unknown
  misc_feature (243)..(243): "n" may be a, t, c, g, other or unknown
  misc_feature (283)..(283): "n" may be a, t, c, g, other or unknown
  misc_feature (300)..(300): "n" may be a, t, c, g, other or unknown
  misc_feature (303)..(303): "n" may be a, t, c, g, other or unknown
  misc_feature (315)..(315): "n" may be a, t, c, g, other or unknown
  misc_feature (343)..(343): "n" may be a, t, c, g, other or unknown
  misc_feature (353)..(353): "n" may be a, t, c, g, other or unknown
  misc_feature (376)..(376): "n" may be a, t, c, g, other or unknown
ccccattttccagatgaggacnctgaggcncagagnggttttatttagctgctgaattccctgacaagcacagagacagattaggtgtcaggatattatttatagagcccttggcctttatatccctgaatcagtcatttgacacccagttcttgatttcagttccaaagttatttcaaccactctnatcatnaanccattctgaaaggganaaaggttttnttaaaaatgatcatggagaanaagtagaaaaaaatgacctctggagttggacaaagctggntccaaatcctgcaattnccncttactagctgnttaactctgaaaaagcttttaagttttnggaggttcantatccctttttttttaaaatggngatc

SEQ ID NO: 8257 - DNA, 534 bp, Homo sapiens
  misc_feature (460)..(460): "n" may be a, t, c, g, other or unknown
  misc_feature (475)..(475): "n" may be a, t, c, g, other or unknown
  misc_feature (503)..(503): "n" may be a, t, c, g, other or unknown
  misc_feature (530)..(530): "n" may be a, t, c, g, other or unknown
gttgtttgcctttttatttggccaaatccatagcgactataactaaaccaaaacatgagctaagtaaatgaaaactactttcttctggaggtttattttggataaaatagttgaagacagactacaatgagacattgtaaaataagactagaaaataatttaagagcgtattttaagcacgggattccgacacactcataaacgtgtttgctcccagctcttacaaaagaaaataaggtttttctccatcaaaaacaacccagttacaccagtaaatcttcccagttctgaaaatctgaagcaactgatactccattaaatgtggaaacactgtctactcaaaatatttgtaatattatgcagtgacaaaaatttcccacacctatatagggttaaccatagttttcagcaaagcaacaagtgctttacttatttggctttttcagtttatacagagctncaattcatgaaaccntctgggccaaaccaggaaataacagcancctttaacgaagcccgccaccaacggntctt

SEQ ID NO: 8258 - DNA, 540 bp, Homo sapiens
  misc_feature (393)..(393): "n" may be a, t, c, g, other or unknown
  misc_feature (423)..(423): "n" may be a, t, c, g, other or unknown
  misc_feature (442)..(442): "n" may be a, t, c, g, other or unknown
  misc_feature (492)..(492): "n" may be a, t, c, g, other or unknown
  misc_feature (536)..(536): "n" may be a, t, c, g, other or unknown
  misc_feature (538)..(538): "n" may be a, t, c, g, other or unknown
ctgctacaaagaggacatatatttgtacatccttacccatatacataataacacaatttacacataatatcttggagtgggtcatcatggaaaaggggtctggagagccccttctgcctcccctgccccaatccctcttcaagggatgcttatacacttggtcactggggcccttcccaactagtttgatggggctcgtctggacacagaaattcagacatgtgactaaatgctgatgggcatgtatacacattcacacccacacacacatgcagacacctggtgagaaaaggaaaaataaaattcctagcccttgggtgtaggcctctttccagagttacaagcatcagtgcctcctccatctagaataatggttttaaaaagctacccctnactggctcaaactggggcagaaggggaacngctaggaaaccaggaaganggaagaaggggccaggaatctttcgaaaatataaggcgtttttgacctgngatcaaataaactttgttcccaaaaaaaaaaagcaccggttttnantt

SEQ ID NO: 8259 - DNA, 553 bp, Homo sapiens
  misc_feature (450)..(450): "n" may be a, t, c, g, other or unknown
  misc_feature (469)..(469): "n" may be a, t, c, g, other or unknown
  misc_feature (491)..(491): "n" may be a, t, c, g, other or unknown
  misc_feature (508)..(508): "n" may be a, t, c, g, other or unknown
  misc_feature (539)..(539): "n" may be a, t, c, g, other or unknown
gaaggaaatctgtctttaatgagcaaatgtaaggctgcgttttctttgcgaagtctccacaggattttcacggcaaaaccaatgagaaaatgtcctttcaaagagaagaccgagtgtcccgagaacattttcttgaaagcgcgtgcacgggccgccctctcgaggcatcgtaatgtgcttcaaagaacacttggtaaaaccctctggctaaaaaatcaaaatttccaaagcatatacatttgaaaaaaacaaaatctccacttaaaagcttattttgacttgttgcccgggatcaattgcaaaagcgcttctgttgagaaaggacagttcagccaaactcaagctggtttttagaaacagaactggaggaagaaaaacccagaaaacataaggcactgggcaaatgtgacgtaggctgggatgaaacccattcttccagagcccggtctnttccacagcacaaagctgnttctcatgcaaccagctggctnaaggccccgaatgtgtncccagaaggaggaccgggcttggggaagggnaaaagggaagcttt

SEQ ID NO: 8260 - DNA, 518 bp, Homo sapiens
  misc_feature (412)..(412): "n" may be a, t, c, g, other or unknown
  misc_feature (431)..(431): "n" may be a, t, c, g, other or unknown
  misc_feature (439)..(439): "n" may be a, t, c, g, other or unknown
  misc_feature (462)..(462): "n" may be a, t, c, g, other or unknown
  misc_feature (489)..(489): "n" may be a, t, c, g, other or unknown
  misc_feature (498)..(498): "n" may be a, t, c, g, other or unknown
  misc_feature (506)..(506): "n" may be a, t, c, g, other or unknown
  misc_feature (517)..(517): "n" may be a, t, c, g, other or unknown
agttcttcaggttcttctcctggaaaggcggaggacacaccaaactgcactggccctgttaggggacacggcaccctcgtgggaccaggctcagccctcggggtggcacgaggtcctgcaggctgcaggaccctcacactccagccccgtctggtgacccaacccgggcccgtggtgcatgctggggaaggccactggccggcccctgggcttcggctcctgaggaggcatggccccacaccctgcccggccataaatatatacagattcctgggcatccagggcaccaggaccgacgcagagctggggtcctgtccctaagcctgtggcacagcgactcttgacatgggagccagggagctgggaccgccgcacccctcccctgcctccctcctggggtcaccaccctcangcggctgcagctggcctangacgccgnggaacttgctgggtgcttgtggnccagttctttgaccttttcacaatgtnctgggccgnggaaggcnatgggtactcna

SEQ ID NO: 8261 - DNA, 532 bp, Homo sapiens
  misc_feature (442)..(442): "n" may be a, t, c, g, other or unknown
  misc_feature (488)..(488): "n" may be a, t, c, g, other or unknown
  misc_feature (496)..(496): "n" may be a, t, c, g, other or unknown
  misc_feature (510)..(510): "n" may be a, t, c, g, other or unknown
gagctgataattgatctttattatacagaaatgtgaaggccataagcattaaatgagaaggagtttggcagtgaacattatgcagattcaaactgaaggtatcctcgtcttactgagatataaaaataaacactaagagttgcaagaaagaactcaattcaacttctatctcccaatcaagctataactttccacaggaaaacctggtttcaattcatgccgaattgttcaaagaaaagaaaaagctaaatcagtgagagacaacacatggactggcttttgtcctattagagagccagactgaagctgtattcagcctcacatttagagactgtttcctattacaatttatatctctatttgcctaagagatacctaaagtgaaaaacaaaaaaatgttaactgactggggcattttgtgggctaagtagatttggcagangagagaaatgaataataatcattaattattctaatcaagaggattnatgtcagnctggtcatctggantaacccttgacgtttggtggtt

SEQ ID NO: 8262 - DNA, 548 bp, Homo sapiens
  misc_feature (498)..(498): "n" may be a, t, c, g, other or unknown
  misc_feature (507)..(507): "n" may be a, t, c, g, other or unknown
  misc_feature (510)..(510): "n" may be a, t, c, g, other or unknown
  misc_feature (517)..(518): "n" may be a, t, c, g, other or unknown
  misc_feature (520)..(520): "n" may be a, t, c, g, other or unknown
  misc_feature (533)..(533): "n" may be a, t, c, g, other or unknown
agctttgtgggctgagtttattttgcttctggttataaacaaatgtagtgtatacacacatctgtccaagaaatcttgcacaaggtggattttacatggggtatcatgcacaagattaaaaacaagaccaaaaggtggaaattttaaaagaggaaaatataaaggctccaaggtttaactgctctgggtagaagagatcacatctgttgactgaggatcacagaaaggcccaaaacgtccataaatatccttggctcgtactgcaaagtagtatttgctaccagatacaaactgggtgagagtacatgccatgggcaagggaagtgccttgacttccccaatctttttccattgtgagggcacagtggcactgggttcctcatggtaagcatagagatggtagctatcaacagtggcacagcttcgatccaccttcagggacaccccatgacagtactatgccattttgactctgaacgcctgctactttcaagtggngcttctgangcnaaaaaanntncttggcaagtttntgggggcaaaccctt

SEQ ID NO: 8263 - DNA, 546 bp, Homo sapiens
  misc_feature (447)..(447): "n" may be a, t, c, g, other or unknown
  misc_feature (455)..(455): "n" may be a, t, c, g, other or unknown
  misc_feature (478)..(478): "n" may be a, t, c, g, other or unknown
  misc_feature (487)..(487): "n" may be a, t, c, g, other or unknown
  misc_feature (524)..(524): "n" may be a, t, c, g, other or unknown
  misc_feature (534)..(534): "n" may be a, t, c, g, other or unknown
  misc_feature (538)..(538): "n" may be a, t, c, g, other or unknown
ctaagcagcaagccacgcacctcccgcgctggcgaaatccgagacccgccccttccggaagttttgacactttgtgcgccccgggcaatgcgattgagagggtaatcatccggtccgttatctaaacccgtcactccgggaaacagcgacccgatctttccggatccgcgctctcccagcatcctttgccttccggtatgtggccccgtctggctagtcccgcctagcgcgcccatttcgagcccaagtttccagctcgggtttccaggctcagaattttccaggagtaggttcttgggcagtggctgtgggagctggaatggcgcagctggaaggttactatttctcggccgccttgagctacctttttagtatcctgcctcctcttctccgccttcagccgggcgttgcgagagccctacatggacgagatcttccacctgcctnaggcgcancgctactgtgagggccatttctncctttccangtggggtcccaactgttcccaacccaagaaaagcctnaaagggccancgtncccacttc

SEQ ID NO: 8264 - DNA, 551 bp, Homo sapiens
  misc_feature (452)..(452): "n" may be a, t, c, g, other or unknown
  misc_feature (474)..(474): "n" may be a, t, c, g, other or unknown
  misc_feature (501)..(501): "n" may be a, t, c, g, other or unknown
  misc_feature (530)..(530): "n" may be a, t, c, g, other or unknown
  misc_feature (532)..(532): "n" may be a, t, c, g, other or unknown
  misc_feature (544)..(544): "n" may be a, t, c, g, other or unknown
aaattactaatgaatgtatttgagaaatccaaattacatgcagacagaaactggtcacaaaaaccattacatttctctatactaaaactgtacaatgttttaaacatttccaatcatgcaacggtaatgaagatcagcatgaattttataagagttgatgggagttcaatgaacaggatttaacacattttacaacccaaatcaaagttgaataatacatccaattcccctaaatttatctatgcgttgagactgaaatgcacattattcccccacaactcctccccctaccccattcccaatcaattaccttacctataaaaccttccatttaaccttttaagtcagatttgatgggtaaacatgtaatctacagtatactctccattattatttcaggatagacacacatatagtcagatgctgaatcttcattacattcctttcaaaangcatctaaactggtgcaattgnctatgaaaattcaggcctaggaaaccnagaaaactgggaggcaagaatctgactangnaggttccaactntatccga

SEQ ID NO: 8265 - DNA, 551 bp, Homo sapiens
  misc_feature (448)..(448): "n" may be a, t, c, g, other or unknown
  misc_feature (476)..(476): "n" may be a, t, c, g, other or unknown
  misc_feature (484)..(484): "n" may be a, t, c, g, other or unknown
  misc_feature (515)..(515): "n" may be a, t, c, g, other or unknown
  misc_feature (523)..(523): "n" may be a, t, c, g, other or unknown
  misc_feature (540)..(540): "n" may be a, t, c, g, other or unknown
  misc_feature (549)..(549): "n" may be a, t, c, g, other or unknown
cacattcaaaacagtacatactttattttcaagcatacaagaaacactaaactcttccagtgccagtacactctccatgaattcttcatatagaattgggtatattggaagcaagttgtttctggtgaaatttctgatgatcaggaatcaagactcagtagccctaaaggaagagagttttgtatccaatatcctcaaaaccaagacatagtatattttactttcaaagtaaactataaacattttaccatatccttcaatccataaagcatctcactgtgaaatgatccatgttgactctgcataattctcagaagtcacttcaagtgatgagggactaactataaaacatgcattatttgaagtacatgagcatgaaacatcgaagtctacaacttatcttaaaagaaagagtaagttccaccagctttttattggttgaataacnagaacacacaaaaccaggcagagaagtncgcaaggnaatggatgatcatatttcactggtttttggncttttggnccttcatctttcaagcncttccgggntt

SEQ ID NO: 8266 - DNA, 561 bp, Homo sapiens
  misc_feature (463)..(463): "n" may be a, t, c, g, other or unknown
  misc_feature (485)..(485): "n" may be a, t, c, g, other or unknown
  misc_feature (530)..(530): "n" may be a, t, c, g, other or unknown
  misc_feature (547)..(547): "n" may be a, t, c, g, other or unknown
  misc_feature (553)..(553): "n" may be a, t, c, g, other or unknown
  misc_feature (558)..(558): "n" may be a, t, c, g, other or unknown
caggcaggtgaaagcatgattttgctttatttggacaataaatgtaggaaaaaagagatatacctagttgataagggttgcattcttctgaatcatcccgttatcaacttgaccaagctaaaatctttctcacaatccacttctctttctcttcctaatctgcatggttccaggttagagttggccaaaagaggagcttgttcaggattttgaagacagaagtaaagcagtggccattactctcagcaggtcgtttactctgcatccagcccatactcttgaatgctgacctactgaccaagcaaattctcatccatggccccagagattcaatagctacacagaggcatcccatagccccctagaggagctcctcctttgctttccattcaatcccagagctgtgggattctcctgcatttcttttttacttctctagtaaaatgtaatcagccttttctgnagcatattccatcaatcactgncaaagaacatgaacttcacattaaagaccttaaaaggggcctccnttttttagccaaaaaanggaccnggttnccg

SEQ ID NO: 8267 - DNA, 553 bp, Homo sapiens
  misc_feature (459)..(459): "n" may be a, t, c, g, other or unknown
  misc_feature (461)..(461): "n" may be a, t, c, g, other or unknown
  misc_feature (470)..(470): "n" may be a, t, c, g, other or unknown
  misc_feature (474)..(474): "n" may be a, t, c, g, other or unknown
  misc_feature (493)..(493): "n" may be a, t, c, g, other or unknown
  misc_feature (549)..(549): "n" may be a, t, c, g, other or unknown
actttcttctggaggtttattttggataaaatagttgaagacagactacaatgagacattgtaaaataagactagaaaataatttaagagcgtattttaagcacgggattccgacacactcataaacgtgtttgctcccagctcttacaaaagaaaataaggtttttctccatcaaaaacaacccagttacaccagtaaatcttcccagttctgaaaatctgaagcaactgatactccattaaatgtggaaacactgtctactcaaaatatttgtaatattatgcagtgacaaaaatttcccacacctatatagggttaaccatagttttcagcaaagcaacaagtgctttacttattttgtctttttcagtttatacagagctccaatttcatgaaaccatactgtgccaaaccaggaaataaacagcaacactctagcgaagccacgccaccaaacngntactatctnctgnccttttaccagcttttctntttccagacaggcagggcttgggctttatatcaacacgggttattcgcttcctttntttc

SEQ ID NO: 8268 - DNA, 547 bp, Homo sapiens
  misc_feature (460)..(460): "n" may be a, t, c, g, other or unknown
  misc_feature (466)..(466): "n" may be a, t, c, g, other or unknown
  misc_feature (494)..(494): "n" may be a, t, c, g, other or unknown
  misc_feature (500)..(500): "n" may be a, t, c, g, other or unknown
  misc_feature (509)..(509): "n" may be a, t, c, g, other or unknown
  misc_feature (513)..(513): "n" may be a, t, c, g, other or unknown
  misc_feature (540)..(540): "n" may be a, t, c, g, other or unknown
actgttttaagatcatttattagaacagtcattcagaagccattgagacatcaggcagcagaaaggaaggtgggatggagcaggccctgtgaaggaccaagaacaaagtaatagccacagttatgaaatttcattttattctgataaagactaatatatgcttgataacctagtgataatccataagtttggtatttcacaacattttttagaaagcacataagattaacattcaaataaggcattatagaaagttttataaagaatgaagtgtttcctatatttcttttaaaaaaccttggttcatcttgaaagatcgatgaattttttaaatatcagaagaaaagggaaataaaattttccccccaaaacacataagaaccacttactggcacttgtattttaagtcctgggaaaaaaacggaacagatttttaaaggcaataacgacttgtaagacngcttgnttcatttgatttggcacgaagtaaagtnagagtnaatatgccntggnagacataatccaggttttcctcatctntcatatt

SEQ ID NO: 8269 - DNA, 439 bp, Homo sapiens
  misc_feature (368)..(368): "n" may be a, t, c, g, other or unknown
  misc_feature (400)..(400): "n" may be a, t, c, g, other or unknown
  misc_feature (425)..(425): "n" may be a, t, c, g, other or unknown
  misc_feature (428)..(428): "n" may be a, t, c, g, other or unknown
  misc_feature (430)..(430): "n" may be a, t, c, g, other or unknown
  misc_feature (433)..(433): "n" may be a, t, c, g, other or unknown
  misc_feature (436)..(436): "n" may be a, t, c, g, other or unknown
gacacgagacataaaaacttttaatgaaggaggacacagctcagagcccttccacatgcggcccaaccctgccccacggagaccggccatggcaaccgctcaatcagaaggtgttcttgatgcggccggccaccagcctaaggatgtccccgatcttcttctgccagttggcgatgtccttggacacggcgcaccacagctccccatgccgaggctctgcactctcacagcgcttcctcacctcctcctgctgctcctcagtgccatgctgcagctcaaacttgtagaagaaggcccaggcatcccccaggtccgagtcaatcttcacagtgcggtggaaccactccctggccttggtgatcttccgntgactccaaaacagcttggccacggccaggancacatgggggtcatgctcacacttnttnanggnatncac

SEQ ID NO: 8270 - DNA, 548 bp, Homo sapiens
  misc_feature (408)..(408): "n" may be a, t, c, g, other or unknown
  misc_feature (469)..(469): "n" may be a, t, c, g, other or unknown
  misc_feature (531)..(531): "n" may be a, t, c, g, other or unknown
  misc_feature (544)..(544): "n" may be a, t, c, g, other or unknown
  misc_feature (546)..(547): "n" may be a, t, c, g, other or unknown
cagaaattgaatagttttttatttgtttgggtcaatctcagtactactagaactcaaaatactatattctaattgttctaatttgtaccatctgcaaaagaccctttaagactgcttcaatgattctgaaaagaattaacaaaaccctgttactaggtgcctgaccttagatattacaactgtttcatttacaaaacctccactacaaaacactaagcttgcaacaaaacaacaaaatgaaagccacataatttgagtaacacaatagtacatattcttcagctgatgagagtaatagggaaatgtatatacttcctacacaaatgcatctagggaaagcaggctatatttattcaagaactagaaaaaggttacaatataaatctatcaaacaaaattcatttttgntatattcaagtaactcatatatattcaaatttagaccaaatcaaggacaacaatccaatcncaggattattatatagctcaaggggccaaaaacaacagtctttggcaatccaggacttttcntaaatccccaatntnna

SEQ ID NO: 8271 - DNA, 543 bp, Homo sapiens
  misc_feature (402)..(402): "n" may be a, t, c, g, other or unknown
  misc_feature (475)..(475): "n" may be a, t, c, g, other or unknown
  misc_feature (523)..(523): "n" may be a, t, c, g, other or unknown
  misc_feature (538)..(538): "n" may be a, t, c, g, other or unknown
  misc_feature (542)..(542): "n" may be a, t, c, g, other or unknown
actgaaaaactcagactttattcagattaagttcctctacaaaaagtagggttctgtcccatgtgtctctgacacatttacaaaataccagttttttaaaattttggtcaaattatgagtggttgatttaaaaacttttccaagaagaagaaaagcatggagtcgtaatttaaagaactcaataaaaacttctattttttattttaaaataatatacacagtgttattttcttcaagaccgtcctgtggatgtgaaatccgtcttcgcgtcatgtatctcccatatccagcagttcagccatccagctacctttgggaccctgctgcaccttgtgtttgctggggagtcactggagagtgcatctctgttcagtttcagggcacgtctcacacatttgctgntccttattcattggtgacacaggggataggtgatccactacttgctgtagaatgtccttactttcactaggangcagattactggaatagtattgggggaccagctgcataaataggtcangagagattctgaggnaatnc

SEQ ID NO: 8272 - DNA, 531 bp, Homo sapiens
  misc_feature (488)..(488): "n" may be a, t, c, g, other or unknown
  misc_feature (497)..(497): "n" may be a, t, c, g, other or unknown
  misc_feature (531)..(531): "n" may be a, t, c, g, other or unknown
ctttgatcaagtttttaataagcttttttcttacatgtacagtcatcttaaaaagacaaatattaactattataagttaaatactatacaatttatgagaaatgtaattttgtgaatttgaaaagtaaaagggaggtaactactaaacggattaaagaagaaaattctactttttaagacattttaaccagacagaaagtgagaaattactaatttaagtaaacactaaaaacttttactgaagctggagaccttatactattttagatcaaaccttcatctacacagctttaaataaactttaaaaaatcttttctagtacatataagactgctaaaaagagtgcatgactgggggaaaaaaggcatatgctagaatgtgaactcctgaagaacagaaatacatttcattcatctttatccctggattcctaacacaatgcctgggtcaaactaaaatgcttaaacaacgtttgctgcttgaagtgnactggggcnaatacatctttccactttgggccagtttccttcn

SEQ ID NO: 8273 - DNA, 465 bp, Homo sapiens
  misc_feature (273)..(273): "n" may be a, t, c, g, other or unknown
  misc_feature (279)..(279): "n" may be a, t, c, g, other or unknown
  misc_feature (295)..(295): "n" may be a, t, c, g, other or unknown
  misc_feature (412)..(412): "n" may be a, t, c, g, other or unknown
  misc_feature (423)..(423): "n" may be a, t, c, g, other or unknown
  misc_feature (434)..(434): "n" may be a, t, c, g, other or unknown
  misc_feature (451)..(451): "n" may be a, t, c, g, other or unknown
  misc_feature (459)..(459): "n" may be a, t, c, g, other or unknown
  misc_feature (461)..(462): "n" may be a, t, c, g, other or unknown
aacaagacccaactatatgtttattagagaagaaccagcaaatatattgacaaatatgttgaaagaaaatgggtggaaaaatacaccatgcaaacagtagacatcaaaaggctagactggctagactgatatcagacaaaatatacttaagccaaaatgtacactgcatatttttaagtggagaattttatattgtatgaaattttatgttctgtcaattatatcacaataagaaatgtattatcaatttcattactccataatgataaaagnctaatngtcaaggacaacacancagtcgaaatttgtatgcatccaatatatgaagcaaaaatacatgaagcaagtaactgacagaatgaaagtgcagaagagatagttccacaaacatcactgcaaatattaacatctntacctagcagntactagaacanttagaccagaaaatgantaaagacntnnaag

SEQ ID NO: 8274 - DNA, 525 bp, Homo sapiens
  misc_feature (453)..(453): "n" may be a, t, c, g, other or unknown
  misc_feature (479)..(479): "n" may be a, t, c, g, other or unknown
  misc_feature (481)..(481): "n" may be a, t, c, g, other or unknown
  misc_feature (483)..(483): "n" may be a, t, c, g, other or unknown
  misc_feature (493)..(493): "n" may be a, t, c, g, other or unknown
  misc_feature (497)..(497): "n" may be a, t, c, g, other or unknown
  misc_feature (521)..(521): "n" may be a, t, c, g, other or unknown
cttgcacaagtcatcttgttacacaattaggtgacatgcttaattctccccagcatggggacattcttcctttctgcaacttcacacacacaaaatccctggagctgtcccaagtgtgtacagtaataacgttcacatggctactccaagcatccagtgatggcaaccaaacgagatgcagttaccacagagcagtagtctgacttttgataatcaggaataaagaacccagtggtgaaggtgctgggtcactgcctcaatgtggggtaccttggaaactgcctgccaaacacaggtcaaggtggaacatacatcctcctggggaacggctggtcaaccagtcatgtctaggagttgagagttctactgtgggaagaggtggcaacagctgataacacaaagcactgtgtagaccaaagtgaaagtccccatcaattgctggttctaattcangtgacttctggtatattatgggaccngntngaccaaaacnggtngttaaagcttgaaagatttaatangcct

SEQ ID NO: 8275 - DNA, 536 bp, Homo sapiens
  misc_feature (453)..(453): "n" may be a, t, c, g, other or unknown
  misc_feature (457)..(457): "n" may be a, t, c, g, other or unknown
  misc_feature (463)..(463): "n" may be a, t, c, g, other or unknown
  misc_feature (475)..(475): "n" may be a, t, c, g, other or unknown
  misc_feature (481)..(481): "n" may be a, t, c, g, other or unknown
  misc_feature (510)..(510): "n" may be a, t, c, g, other or unknown
  misc_feature (529)..(529): "n" may be a, t, c, g, other or unknown
aattcattaacattcattttggtgataaaaattccttagggtgggagcaaaatcacattcccaagcaaatgttaaatcttcctgagggaaaggggtacagttaaacattaaattctcaaaataccactgagctcagagaggtgattgcaggtccctctgaggcaggctacaccccacagtgatgacagacttggcaggttctgcagtaacacggtcttcttcattcagccagcgagatcgacggtgatgcccactggggcacagaggaagggtgcccctcgctgggagggccaaggaaggctaccggaggggcaagtccagcccatcagggtcacatcatgggatcacagcagagttcagacagaacaacttaaaactctgcaaaagacactttaaaaacatgatctcttgaaaaaataaatcgcaacaattttcaacttcatgccaatcganggcngaagantgtgaataatgnttaaanggaaaacttgaaaaataacctggatcttntttggcggaatcagttatntccaaat

SEQ ID NO: 8276 - DNA, 534 bp, Homo sapiens
  misc_feature (360)..(360): "n" may be a, t, c, g, other or unknown
  misc_feature (384)..(384): "n" may be a, t, c, g, other or unknown
  misc_feature (411)..(411): "n" may be a, t, c, g, other or unknown
  misc_feature (527)..(527): "n" may be a, t, c, g, other or unknown
attcatatccacaaagtgggttggtaagtattattagtgcaaatttctgctgacctgcagcatttagtccataaactttggatatcctaggcgatccatcagagtccagcagatgttttcaattagtttaatttcatctctaggcaagttctgtttccaaacattagtattagttggtgatatttccccttcatagggaaggtaaaaaaggtttgtagaggtggcaaacaatatttggtttaaactagcaggagacaaaggaattccaagaaaggcaaaaatcctttcagtagttttctgaggaaaatgcacaatatcttcaaacttgaccagctggtagctagtaggcagcaaatctgnatttattctcaaggctgctgctgnatttgctagccacaagtgagacaaganggacactgcatttgatttggatttggataattctttcctcaatgggtcatactcgaagcataaccccgaatttaagttacatttgccttacctccctctattttaacaatttgctnaaagccc

SEQ ID NO: 8277 - DNA, 545 bp, Homo sapiens
  misc_feature (378)..(378): "n" may be a, t, c, g, other or unknown
  misc_feature (445)..(445): "n" may be a, t, c, g, other or unknown
  misc_feature (480)..(480): "n" may be a, t, c, g, other or unknown
  misc_feature (485)..(485): "n" may be a, t, c, g, other or unknown
  misc_feature (521)..(521): "n" may be a, t, c, g, other or unknown
  misc_feature (531)..(531): "n" may be a, t, c, g, other or unknown
  misc_feature (545)..(545): "n" may be a, t, c, g, other or unknown
aatgaaaattttaatttatatttttgttaaaatataaaagtagcattaaattatcaaagtctaaattagactaaatataaatgttatacaacccactgaatggatttatagtttgacagtgttccttgcaagtgtctactcatcttccatctttttcctttttttaaatcattctgccccagtcttcacttaatcatcacatgcactttattccatcaaacatcacttctcaggatcattctacctgaagaatcattaagcctgtttagagcttttccagtcttaaaatttgtcatcttgactacacatcccaaggtactacttttctcactttttctggttagccagaatgttccattaagaaacaataaaagttgnatagttctctaagatgaaagattagtatattcaatggctattatattaaccatttaggtggacatcnacaaaaactatccttatattaattgactggaggtnttacntaggaaataagtaccctctctttgcattcacttaangctacagatnctcaggaatcaaan

SEQ ID NO: 8278 - DNA, 502 bp, Homo sapiens
  misc_feature (281)..(281): "n" may be a, t, c, g, other or unknown
  misc_feature (423)..(423): "n" may be a, t, c, g, other or unknown
  misc_feature (458)..(458): "n" may be a, t, c, g, other or unknown
  misc_feature (462)..(462): "n" may be a, t, c, g, other or unknown
  misc_feature (464)..(464): "n" may be a, t, c, g, other or unknown
  misc_feature (479)..(479): "n" may be a, t, c, g, other or unknown
  misc_feature (481)..(481): "n" may be a, t, c, g, other or unknown
  misc_feature (498)..(498): "n" may be a, t, c, g, other or unknown
gatttctctgtattttatatctctttgttaagtttattaatgtataccgtttttcaaataaacattttgaacagcccaaatcaatcaaagccatgagatcacaaagtgttgcttctcgacacaacattagcttgttcagaaaatccaaaagccacatccaaagatcaatgatgctaccttaaagacatgagggaggctccttaagaccctagagacaccaaggaccccacagggccagtcatatgaacaggctcagaagccggcttgatcctcagcacctntgcaaagccatcaccaaaccagcaagtgacatgcgctatgtctacggtaaagtagaaaaggcggtcctggcaaagcttccggcggtcacagaccgaggatccgctgacagcacagcctcaatggcacgctttgcttctctgntgactgaaaattttaaaatgacgcctggccacatnttgngnactgagcttgcccangnccattttggcttgaggngtaa

SEQ ID NO: 8279 - DNA, 546 bp, Homo sapiens
  misc_feature (416)..(416): "n" may be a, t, c, g, other or unknown
  misc_feature (448)..(448): "n" may be a, t, c, g, other or unknown
  misc_feature (471)..(471): "n" may be a, t, c, g, other or unknown
  misc_feature (484)..(484): "n" may be a, t, c, g, other or unknown
  misc_feature (511)..(511): "n" may be a, t, c, g, other or unknown
  misc_feature (526)..(526): "n" may be a, t, c, g, other or unknown
  misc_feature (544)..(544): "n" may be a, t, c, g, other or unknown
aaaacaacagaaatttattgtctcacagctgtggaggccggaaatctgaaaccggggggtcagcaagcagggccgtgcccccctgtgaaggctttagggaaggatcctgtcctgcctctccgggcagctggtggttttctggcagtccttgggttccttggcttgtggttgcgtccctcactctgatctccgactccttcacacggctgccttctccctgcgtgtctgtgttcatgtggccatctccttagaaggacaccagtcatggtgggttaggggccaccccagtgacctcatggtgactaattaatctgcaacgactgtgtttccaaacaaggtcacattctgaggtgcttcaagttaggacttcagcctatcttggggtcctcagccctaaccagggcacccactgcctncggcatcagctcctgctgggcaagcgcccggnctggtgctctgctccctgcttancccgtgggcttgnccacatgacaagggaaaatggtctgcntgcatttaacttganaaaggaagcccttacttnct

SEQ ID NO: 8280 - DNA, 542 bp, Homo sapiens
  misc_feature (471)..(471): "n" may be a, t, c, g, other or unknown
  misc_feature (481)..(481): "n" may be a, t, c, g, other or unknown
  misc_feature (493)..(493): "n" may be a, t, c, g, other or unknown
  misc_feature (505)..(505): "n" may be a, t, c, g, other or unknown
  misc_feature (507)..(507): "n" may be a, t, c, g, other or unknown
  misc_feature (509)..(509): "n" may be a, t, c, g, other or unknown
gttcaatacagactataattaaataatgtcccaattagagtgtgagctcagaaagggagcttccaagaaaagcttcacaaaagaaaggaccttggaactgaggtatctgacacctggcactcattcaaggaatatttggtgaataaattataggtggaatattaataggcagcagaaatgatggtggatgggagaattccaagcagacctcggaggccttgaaatgtttccctgtatagaaagcagtaggtagtcggtatgaatatttattaggtaaggctagaaatataggatgatgtcatgttgctttgaattctcttagaaggagtactgacaatattctgtggacagtgggagaaggtgtgggattctgaatggtttttgagctggtgaacagctgacagatgagcagtttatagaatggtttctctgtggaagcaggggaatggactggttaaggaagaaccttanttcttaaccngatgacaccaangggcttttgcantngnccgggtaatgggcaggaggctcaattttatacc

SEQ ID NO: 8281 - DNA, 537 bp, Homo sapiens
  misc_feature (232)..(232): "n" may be a, t, c, g, other or unknown
  misc_feature (264)..(264): "n" may be a, t, c, g, other or unknown
  misc_feature (336)..(336): "n" may be a, t, c, g, other or unknown
  misc_feature (427)..(427): "n" may be a, t, c, g, other or unknown
  misc_feature (434)..(434): "n" may be a, t, c, g, other or unknown
  misc_feature (456)..(456): "n" may be a, t, c, g, other or unknown
  misc_feature (477)..(477): "n" may be a, t, c, g, other or unknown
  misc_feature (479)..(479): "n" may be a, t, c, g, other or unknown
  misc_feature (518)..(518): "n" may be a, t, c, g, other or unknown
cccaaaaatatatttaataagcttgttatataaaatcaaacacttaacattgtcaacatttcttcagttattcaaactcactgatatctaactgggagtagtttgtattctggaagacttcctaagctaaaagtatatttacatatttacaacacatgtaaatataactgaagaactacttcaaataatgttgaaattcacagaattctagagatttatagttatagtttanaagtatcaccaatttgtttgcaatcaaatgtncagcactaattatgaagaatgttttaactattaaaccaaaaggggagaaaaactgggagggaaatatatggngttaaagtcctgtgataaatacttagaaaattaaaaagtaataatatacattcgatttaatgaccaaaaattttttttgaatccctggtgncattttnggagcttaacccagtctgtcanaaggcagtattgctatgctgncngaacctttcactggctcgtcaaagccttgctaaagccgnacagcactggctggaaaaa

SEQ ID NO: 8282 - DNA, 551 bp, Homo sapiens
  misc_feature (290)..(290): "n" may be a, t, c, g, other or unknown
  misc_feature (514)..(514): "n" may be a, t, c, g, other or unknown
  misc_feature (519)..(519): "n" may be a, t, c, g, other or unknown
  misc_feature (538)..(538): "n" may be a, t, c, g, other or unknown
  misc_feature (551)..(551): "n" may be a, t, c, g, other or unknown
aaaggataattgaggaaaaaaaaaaatcaagatttggggggaattacctacaaagatgtaaggtaagtccgttggttggtgatggcctagccatcttgtctggtttttaaaatgtgcttttctgcctcgtcctgtctcgtcttcctctaccccactcccgggcgtggaattccaacttggtagtgctggagccctggggttgatggggtcatctccaatatgatgtggattcctttccgatgggttggcaggcagatggaacaaggggtggaagacttaaaagcaacctntcaggccagggggaagggaaggagctccaggccggttcagaccaggaagcctgggtaccaccttctctggctcctcttttcagacctccaggttgccccccagagcttcacaagtctctcttcttccttcccatcccctaatcctcgttcgccctttcccatacaagtgtgttaatttgggccctttttgggatctaccctgaggaagaagccccctggttaanagganaggtcttgtgtaggtgggntgggggttcccan

SEQ ID NO: 8283 - DNA, 558 bp, Homo sapiens
  misc_feature (503)..(503): "n" may be a, t, c, g, other or unknown
  misc_feature (511)..(512): "n" may be a, t, c, g, other or unknown
  misc_feature (528)..(528): "n" may be a, t, c, g, other or unknown
  misc_feature (541)..(542): "n" may be a, t, c, g, other or unknown
  misc_feature (549)..(549): "n" may be a, t, c, g, other or unknown
aaatgttcacggcagctttatttgctttatttttatttagaaattggaaataatcgaaatatcggtcaacaggtaaataaataaactgtggtatatccatgcaatacaaaatgtggattattgatgtacacaaaatgggtgaatgccaaaataattatgctgagtagaagcacctccccccacagtacttgctctgcgattccactcagataaaattctagaatatataaattaacctttagtgagagggagcagaccagtggttgcctgaacatggaggacacgagggacggtttagaccggggtgtgaaactgctgttggtggtgatggacatgttctggcgacagcttcacaggcaaatgcatcggtcacttcacgtatgtgcagttcattacctgtcagttacacctcaacagagctgttttaaaaagcaaggtggggccggctttggtggctcacacctgtaatcccacactttgggaaggccaaggaaggaggatcnttgaggcnngaattttaagaccagnctgggcaccaatnngaccctnttcttttta

SEQ ID NO: 8284 - DNA, 524 bp, Homo sapiens
  misc_feature (264)..(264): "n" may be a, t, c, g, other or unknown
  misc_feature (266)..(266): "n" may be a, t, c, g, other or unknown
  misc_feature (296)..(296): "n" may be a, t, c, g, other or unknown
  misc_feature (304)..(304): "n" may be a, t, c, g, other or unknown
  misc_feature (414)..(414): "n" may be a, t, c, g, other or unknown
  misc_feature (434)..(434): "n" may be a, t, c, g, other or unknown
  misc_feature (446)..(446): "n" may be a, t, c, g, other or unknown
  misc_feature (449)..(449): "n" may be a, t, c, g, other or unknown
  misc_feature (468)..(468): "n" may be a, t, c, g, other or unknown
  misc_feature (487)..(487): "n" may be a, t, c, g, other or unknown
  misc_feature (499)..(499): "n" may be a, t, c, g, other or unknown
  misc_feature (521)..(521): "n" may be a, t, c, g, other or unknown
acaagggccaaatgtcccacgtttatttacatatgaaatgtgtttcatacagttatgatggatggagtgcataacacctgacagcagcaagaccttttgaggaaccgaacattgactacagtatatcatgcaagtatctatatatacacaaaagaattccttttcttaaaaaaaaaaaaaaaaaaggtacaaaacatgttcagggataaatacaagatacaaaatgcaaaagaaaacacaaaacaaaaccaaaaaatagaactntntcagagaactataaacggaagggacagaanagtacctntgctgcattttaataaagcagaactaccgacgttaaatatacttcttgaaatggctgaactaaacccgggtggctcagtgcttaaggtaacggccaattgcaatacacangcggttgcattgataagtcngtggttgaaagntgngcattccgacttttaagtnccataacggtttgggaatncccccagaacanggaaccccactttttttgcaancaa

SEQ ID NO: 8285 - DNA, 472 bp, Homo sapiens
  misc_feature (282)..(282): "n" may be a, t, c, g, other or unknown
  misc_feature (399)..(399): "n" may be a, t, c, g, other or unknown
  misc_feature (404)..(404): "n" may be a, t, c, g, other or unknown
  misc_feature (409)..(409): "n" may be a, t, c, g, other or unknown
  misc_feature (433)..(433): "n" may be a, t, c, g, other or unknown
  misc_feature (452)..(452): "n" may be a, t, c, g, other or unknown
  misc_feature (461)..(461): "n" may be a, t, c, g, other or unknown
  misc_feature (471)..(471): "n" may be a, t, c, g, other or unknown
ccagatatattgagggtgacccctctgagattagcacaggagagttagaaagattataaagatacacggtcccctccctgctcccttcccccacccccccacccctggacagacacacacagcacaacagcccctctccctcccacccccccgtacaaatatggcttctgtgtaatatggacagagtggttcagcttgaagaggaaaagtcattttcccaaaagcgggtgctgggagacaagaagctcaacaggcctggggccccagggctctcttgctgtngtaagaggagtaggccccggcttaggtgaggggctgcctgtggtgcccaaggccctaaccagcggctggaagattcacaactgtattacctgaactgaagggggtgggcaggcctgntagantgcanttgccctttttggatgcccattgngagaccagggaaggaaaancctgggggnaaggtggganc

SEQ ID NO: 8286 - DNA, 483 bp, Homo sapiens
  misc_feature (100)..(100): "n" may be a, t, c, g, other or unknown
  misc_feature (117)..(117): "n" may be a, t, c, g, other or unknown
  misc_feature (242)..(242): "n" may be a, t, c, g, other or unknown
  misc_feature (251)..(251): "n" may be a, t, c, g, other or unknown
  misc_feature (277)..(277): "n" may be a, t, c, g, other or unknown
  misc_feature (288)..(288): "n" may be a, t, c, g, other or unknown
  misc_feature (295)..(295): "n" may be a, t, c, g, other or unknown
  misc_feature (301)..(301): "n" may be a, t, c, g, other or unknown
  misc_feature (324)..(324): "n" may be a, t, c, g, other or unknown
  misc_feature (423)..(423): "n" may be a, t, c, g, other or unknown
  misc_feature (437)..(437): "n" may be a, t, c, g, other or unknown
  misc_feature (457)..(457): "n" may be a, t, c, g, other or unknown
  misc_feature (459)..(459): "n" may be a, t, c, g, other or unknown
  misc_feature (462)..(462): "n" may be a, t, c, g, other or unknown
  misc_feature (470)..(470): "n" may be a, t, c, g, other or unknown
  misc_feature (481)..(481): "n" may be a, t, c, g, other or unknown
agacaatttacacaaatttattagcctcctatgactcagtaaagcaattgaaaaaatatagctttataaggcataaatgattttatgttttaactaaggnactttctggtaaacagngcccatacattttaggaaatatttcagtctttagagaataagtaaggcaaaaacaggtccaggagtctacagatgacctcccctcaccacaagtccaagtcatttttttttttttttgaaacggngtttcgctnttgttgcccaggctggagtgaatggngtgacctcggntcactgnaacgtntgcctcctatattcaagcaagtntcctgcgtcagcctcctgaatagctaggattacaggagcatcgcttgaacctgggaggtggaggttgcagttagcccgatatgaccccactgtctccantttgggccccaaantgagactgtctcaaaaaatnanggnaaaagaanggaaaaaaaanaa

SEQ ID NO: 8287 - DNA, 549 bp, Homo sapiens
  misc_feature (431)..(431): "n" may be a, t, c, g, other or unknown
  misc_feature (440)..(440): "n" may be a, t, c, g, other or unknown
  misc_feature (456)..(456): "n" may be a, t, c, g, other or unknown
  misc_feature (474)..(474): "n" may be a, t, c, g, other or unknown
  misc_feature (488)..(488): "n" may be a, t, c, g, other or unknown
  misc_feature (524)..(524): "n" may be a, t, c, g, other or unknown
  misc_feature (526)..(526): "n" may be a, t, c, g, other or unknown
  misc_feature (544)..(544): "n" may be a, t, c, g, other or unknown
  misc_feature (549)..(549): "n" may be a, t, c, g, other or unknown
aagacaagatgcaggaagaagaaattgagaattcactacataacttcccaccatcaaggctttacaacagcaacattttgttttccttaaatgttcctgtttggtagtccaatgctcaaaaactgaagacagtatgttttggatcacttttgtcctggaagaaaaaaaaaaaagtctaggggtcctctacaaatagttatgaccaaagctcagcaaagaatgggaatgactgcaattaaatgccactggccctggctcactaacagccagccagtccctgctatctggcaacctttgtgctagcttcctgcctcttgctacacagagaacacagggcctgtcttagctcaggccaccataacgaaataccaaagactgggtgacttaaacaggcgaacctgattttctcacagttctggaggctggaaatncaagatcanggtgccagcatgatangggtcttggtgggggctntctttctggcttgnaaaagggcactttctcttttttaaaatggaatgggnancctatggatggctggacncacan

SEQ ID NO: 8288 - DNA, 552 bp, Homo sapiens
  misc_feature (422)..(422): "n" may be a, t, c, g, other or unknown
  misc_feature (425)..(425): "n" may be a, t, c, g, other or unknown
  misc_feature (489)..(489): "n" may be a, t, c, g, other or unknown
  misc_feature (493)..(493): "n" may be a, t, c, g, other or unknown
  misc_feature (513)..(513): "n" may be a, t, c, g, other or unknown
  misc_feature (524)..(524): "n" may be a, t, c, g, other or unknown
  misc_feature (535)..(535): "n" may be a, t, c, g, other or unknown
  misc_feature (543)..(543): "n" may be a, t, c, g, other or unknown
gtcattgcccaaagctgattctcttgctttttatttcttgaatggcataagccacgtcaaagggctaaaaatgcatttcaagccccagctgaaaaccaactggagagggtgaggcaaagagagaaaaggagagaacacaaacttgttgctgggagtagaggctgccacctgctccctatggacatttgcaaatgctggtgaatgactggaccctccaggaatagtgccctgatcctagccccaaaatgtatccaagtggagaacatgcagagcccactgtcccaggagaactcccctccccaaagggtgacagaacacgaagtagactgtatatgaaggcaatggacagggcagatggagtgttagcatcactctctttaggcacttgtgtaaggaatgtaggctctccagtgagctgcctnctnccagagccctccattctggtcttcaactgggcttgtgcctatagggcaccccatgctgtaaccngcanggaaaaagtaaagggggagnttcttaacaancctgaggcttnttcaaaangaaggttgg

SEQ ID NO: 8289 - DNA, 559 bp, Homo sapiens
  misc_feature (542)..(542): "n" may be a, t, c, g, other or unknown
aatatttgctattttctttaatgccttagttctggagaaaggctaaaatctcatcatattgacattaacacatttttaaaaagtgtctctcaagtgtaatatttaataaaactaggtactgaaaaatgttctgaaatttttcaagtcaatgttgttttcaagtatattaaaatgctcagaagaaaaaattctccatggttataattctgatcaatctataaatgtactttttaaaagagagttccaacagaggtggataataggtaagttcctcagacacaggcatacagtctttttgaagaaatagaatgccttgttaccacaacctggttgattttttttttttaaacactgatttcaggcacaatggctgaatccacttctgggtcatctttctcctcctcttggttggtttacaagagtagtgaatacttcagttatggacagaaagaaagacacaaactctgaaacggagacttcacttttcactacaaaggaatcaaagtcactgagttctcattggttggggtggaatctgctgnccctgtgccaaaaatag

SEQ ID NO: 8290 - DNA, 557 bp, Homo sapiens
  misc_feature (525)..(525): "n" may be a, t, c, g, other or unknown
  misc_feature (555)..(555): "n" may be a, t, c, g, other or unknown
gcaatttatgcattttattgtatatattttataactcaatgaaaatgttatatcatatattacatgtaattatatgtgcatataattatatacacatacaacatatatatacacacatacacacacacacatacacccctatatatgattatggcagccttctacttctccaacgcattcttttttttgtttttttgagacagagtctctgtgtgttgcccaggcttcaatgcaatggcatgatctcagctcactgcaacttttgcctcctgggttcaagtgattctcccgcctcagccccccaagtagctgggagattgaggccgcggtgagctgattgtgccactgcactccagcctgggatagagcgagaccttgtctctaataaatacacaagcaaaatccaaagttcgctttggattgctagcccatcaaaaaggctagctccttgaaggtgggaatttttgccactttagttccctgctgcatgcccagcaactggaacaagtgccttgcacatagtangtgctcagtaaatgtgaaggatgaatgaanac

SEQ ID NO: 8291 - DNA, 549 bp, Homo sapiens
  misc_feature (460)..(460): "n" may be a, t, c, g, other or unknown
  misc_feature (504)..(504): "n" may be a, t, c, g, other or unknown
gcaaagaaggaatgaagggatttattgaaaatgaaagtacactccacagtgtgggggtgagcctgagcataggagcacaaaagccctgttacagaacttctgagagtttaaataccctctaggtgattccattggttacttggggcacacgttatgtagatggagagcctgttacagaacttctgagagtttaaacaccctctaggtgattccattggttacttggggcacacgttatgcagatggagaggatgaagttacaaagtcatttgcttggcctatgtcctatggagaaggtatttcctatcataactgaagtgtgaatcagcctatgttccctgcactcagaccctattttcctgcctcctacctacagctgtgtggtcctgagctgtcacctcttccctttgaagctcaggttcctcatcggtaaaatgaggcagaaatactcactgctganatgtgtgaggatcgcacaaactcagtgtctcaacatgttgtacntgtgtttgggccctctgagcccttgaggcttgccccaggtggaac

SEQ ID NO: 8292 - DNA, 554 bp, Homo sapiens
ggaaggggaggtcataaatgttgaatctggcaaatcataaatttcttgtcttaacattgccgcatttactatcatctcatttgaaagctgatgtgtttgggctgggtgatggcagaggggtgggagttgggggatgctggctctgaaatgccagagaggcattaagaactctggaagcatctggctactggtagacattttacacagatagcaatttctgaccaatccatttcaatgatttctaacccatactcaactatccagaggatactgttttaagaacattattgtaaactgatactctctattcatttacaaaattcattcattgcatactttttgtttaatagcttggattcagtgttacagatttgattgacccaagtgaaaaaatactgacactaatcatttttaagtgctatttcagaagaatatgcgcaatgtttctaagttattgtgactttgtgactgtcgtagctttaaattataatactaatatcctactctgagaaatgtgtaagacacaggtctaacaaacaactacattaacctcg

SEQ ID NO: 8293 - DNA, 554 bp, Homo sapiens
  misc_feature (2)..(2): "n" may be a, t, c, g, other or unknown
  misc_feature (467)..(467): "n" may be a, t, c, g, other or unknown
  misc_feature (549)..(549): "n" may be a, t, c, g, other or unknown
  misc_feature (554)..(554): "n" may be a, t, c, g, other or unknown
gncttccatatgacactttcattccccatacttttctgtgaagaaagacgcagaggtagcaaagacaagagacaagtagattgcaaaaagaaatgtttttgtagaaaagggaaaaactctatgggagatgaaataaaatgagcaagttctgaggggtgatggacagatcaaaaacagatgatcttcaagacaacataatcacccataaacgtggtaaaacaaaaaattacacttccaatttggtggaaagagtgccacctgctgacactttctggaataaggtagtttagcccatttgaaagaagctgtattgccttctcaaaaacaacgaaaacctactattgatcaatgaaggtaacaagatataacttcaacaaagtaaaacaacgaacacataattatcccacaaaataagaatttaaataaagaattatcaaacctggaattctactcctgtcaattattgnttctggcatatggtaggggttcaaaatacatttgttggagcgaattctaacatagtactatttagttttctgaaaatcctgnaatgn

SEQ ID NO: 8294 - DNA, 552 bp, Homo sapiens; identical to SEQ ID NO: 7665
  misc_feature (1)..(552): "n" may be a, t, c, g, other or unknown

SEQ ID NO: 8295 - DNA, 551 bp, Homo sapiens
ggtattccttttattataatgttttaaacttggcttaaagttcaaaatactatttccagataactttccactgttacatcaactaggcaactttgttatgtttatgttatatgtatcagttacttatcagcacagaattttaaccactctgctaaattttgagaaaacagctaaactcaatataaaatttggcctacagaattatagtggctatttgttactaaaaatattccaaaagaaatttacttattttactatattccatattctttaacttaaaatctgctgccactgtttagtaaaagtgggacaaataaaattctttaaaatatagaaaatacagttcctgttaagattttgcaaacaaaaaattaataaataatacaatttgagtactctaaaacaatatactttgtagtctagattgtggttttggtcagtatgtctgacactatgaagatttacatcagttcagggaatgagttctaatctattaataaatagtcaatataaccaaacacctgacaggattccccatatgaatattttta

SEQ ID NO: 8296 - DNA, 554 bp, Homo sapiens
  misc_feature (510)..(510): "n" may be a, t, c, g, other or unknown
  misc_feature (512)..(512): "n" may be a, t, c, g, other or unknown
gtttccagaagagaaatttaatctaatttacatacttctaggtacatcgataaccaaaatgtggccactgaaaaaagttaaaaggtcaatcagctcctggcttctagctggcccaggattgcaaaataaaaagatccacgttccttattctctacacaaaacgcgtttttaaaaaagtgaaaggtctagggagctatacatagaaagcaacagtgaaaagggagagggagcaggagtgggggaggagagtcccaccccccaaccccaccctccagggccccagagcccctgaggctctttggggggccttgacatggcaggaggcagctgtcagctctgagctcttcccagctgggaaggcccctctcgggggcagccaacaaggatttccgtggcattgtgggctcagtggggggctcccaggccccagcaggccccacagagggagcgtggcttccctgagcaagcaccgtggcatgatgtggtcgttcaacccaggaactgggggtncngggcaagtcccgggtcttacgaggtgcctgtttgtgtgtgtt

SEQ ID NO: 8297 - DNA, 553 bp, Homo sapiens
  misc_feature (503)..(503): "n" may be a, t, c, g, other or unknown
  misc_feature (552)..(553): "n" may be a, t, c, g, other or unknown
cacagaaccggagtattttattgcaccaagatcttggcaacacgtggggctccccaggcccccggaaaggaggtgcagaggatgggacacagacctctgcacacacacaggtgcggccatgcaaccaggacgcggggcaggcaagtgagaggacctgggagaggtagctgctgtacacaggccccactccctccagctccattcccaagcacaaaattcaacagacccagatcctaagtcaaccaagtgactgctatgacaaaggcttgggttattgacatttacttacatacgtgtacaagacctagagtttgaactcgttttctgggcctcatctttcccttccctatctggttgatgacttcggtggagggaagggacgtgactccacccaacagtgataaacgctgcagaaagtcatctcgtgctcaccactgcccaagaattaacgaatgtatgtaccccaggaaaagggtttacagttatctagtggagaagggaanaaactgatttggaggaaaagaagggagagaaaggacccagataaatttnn

SEQ ID NO: 8298 - DNA, 543 bp, Homo sapiens
  misc_feature (496)..(496): "n" may be a, t, c, g, other or unknown
  misc_feature (528)..(528): "n" may be a, t, c, g, other or unknown
  misc_feature (538)..(538): "n" may be a, t, c, g, other or unknown
aataattactctttatttaaaataaataagccctcttacttacagggaaaatatgaaagcaaactctgtcctcctggtctaagacagaaaccacattcagaatatgttcattgaaaaaggaaagatttgttgattatcaaacaaatctaggtacttcaatacacattgtttctttgaaaaataaagactgaaaggaataattcatttcaaaaagtcacaggttagaaaaccaattttccttctgaggctcattttagcaaatcctccaagtgttcccaaatcttttaaaaaagctacatcccctgagaaagggccctttccctgtagccctcttgctctgacaccagcagccctgcacccttctgccaagtggctccctgcaggacggtgctgttgccgggcaggaatggccctccatggcaacctccagcaggcaggagctcaccacctgctttctgcaaactcactcacttggctcagctattctgcaatgganaggaagttccttacagccaaagtattctaagntcacattttncagtt

SEQ ID NO: 8299 - DNA, 548 bp, Homo sapiens
  misc_feature (492)..(492): "n" may be a, t, c, g, other or unknown
  misc_feature (548)..(548): "n" may be a, t, c, g, other or unknown
aacttgtctgtattttctgttattctaccacaaatttctttcaactctttttataaaaatgcctgtctccttagttgacctctaagtttctaggttctttctttttcttcttttctttttcttttttctttttttgagacagagttttgctcttgttgcccaggctgaagtgcaatggcgcaacataggctcaccacaacctccacctcctgggtttatgtgattctcctgcctcagcctcccaagtagctgggattacaggcatctgccatcatgcctgtctaattttttgtatttttagtaaagatagggtttctccgtgttggtcaggctggtctcaaactcccgacctcaggtgatccgcctgcctcgacctcccaaagtgctgggattacaggcctgagccactgctcatggccagttctttcattttttgagtttctgtttctgatctaaagtttaccactggtttccaatttgtttgtgaagcanagaatattggcacacttagttgcttgcataaacattcctttcctataagatatagn

SEQ ID NO: 8300 - DNA, 552 bp, Homo sapiens
  misc_feature (531)..(531): "n" may be a, t, c, g, other or unknown
  misc_feature (543)..(543): "n" may be a, t, c, g, other or unknown
  misc_feature (549)..(549): "n" may be a, t, c, g, other or unknown
aaatagggatgacatttctccatgtttgtcaggccttggactctctacgtcaggtgatccatccacccacctcggcctcccaaagtgctgggattacaggtgtgagccactgcgcctgacccttgcaggtacttcttaaagctatggggttttcccagagcttggtagcatgtgtgttcaaagggctatcaatgttgagttgtcctagcaggcactggatagagagcaggatggtcctgatatcatacggggcagaccacttctccttcaggatgtccaggcatatgttaccctgggtgtccacgttagggtggtagcagggtgtgaggaacttcactgtgggtgcatcgtaaaggtgggtagtcattgaggaactccagcaagagcttatacctcagatcttcatacactgtgccagctgcttcatggatggtgtccatttgataaggctttcagggtaggcagaaattcttttgtcaccaggcatcatgaggggtcatcaacttctgctgtaccttttggctacagggncccaagcaatgnccctgntgg

SEQ ID NO: 8301 - DNA, 499 bp, Homo sapiens
  misc_feature (15)..(15): "n" may be a, t, c, g, other or unknown
  misc_feature (27)..(27): "n" may be a, t, c, g, other or unknown
  misc_feature (53)..(53): "n" may be a, t, c, g, other or unknown
  misc_feature (55)..(56): "n" may be a, t, c, g, other or unknown
  misc_feature (115)..(115): "n" may be a, t, c, g, other or unknown
  misc_feature (214)..(214): "n" may be a, t, c, g, other or unknown
  misc_feature (289)..(289): "n" may be a, t, c, g, other or unknown
  misc_feature (296)..(296): "n" may be a, t, c, g, other or unknown
  misc_feature (377)..(377): "n" may be a, t, c, g, other or unknown
  misc_feature (420)..(420): "n" may be a, t, c, g, other or unknown
  misc_feature (437)..(437): "n" may be a, t, c, g, other or unknown
  misc_feature (456)..(456): "n" may be a, t, c, g, other or unknown
  misc_feature (474)..(474): "n" may be a, t, c, g, other or unknown
  misc_feature (484)..(484): "n" may be a, t, c, g, other or unknown
  misc_feature (490)..(490): "n" may be a, t, c, g, other or unknown
  misc_feature (498)..(498): "n" may be a, t, c, g, other or unknown
actgtttgttttttnccaacagagttncggtcttgttgcccaggctggagtgnannggcatgatcttggctcactgcaatctctgcctcccaggttcaagcgattctcctgcctnagcctcctgagcagctgggattacaggcatgtgccaccacacccggctaattttatatttgtagtaaagacagggtttctccatgttggtcaggctggnctcgaattcccgacctcaggtgatctgcccgccttggctcccgaaagtgctgggattacaggcatgagccaccgngcccggnctactagtgttttatctttgattctctgtcagccctcacccctggttcttgcctttcttgatcaacaccttttcttgcctntgtccccttctctccctgtatctctcactcccctccaacctgngggacagtggtgtggangaggaaccataggcctganagtccatctgactccttnctggacccanaagcangagaaggng

SEQ ID NO: 8302 - DNA, 560 bp, Homo sapiens
  misc_feature (548)..(548): "n" may be a, t, c, g, other or unknown
aaatgttcagtcttttatttaaaaactataaacagtcaccaaagtaaataaagccattctataacataaactgttaggtctatattttttactgcacatcctaaggacacagcagaaatggtggttgggaggccttccacatttttggatgctaatagaacaggcaataggcagttataaatggatacatttcacgctgggggaaaaaagacaatttaaggaagtgagcagtttctgagcaggaatgtggtacagtattaagaatggaagaataatacaataaaattccacactatattaagatagaaaaagtagtgaagaaaatatcatacctgcacataatgcatatataacacaggagaaaacctgtataaaattccatgtatttaaaccaatttacaaatacaaaaaattctgtccaagctctgagcttgtacacgacaaacgtttacagtggatacatgttaaggaaaaccaaaaaataccttcaaatagtttttcttcttaaaaaatgacctgagatatattattccatactcttttagccngcaaaatgaggt

SEQ ID NO: 8303 - DNA, 553 bp, Homo sapiens
  misc_feature (465)..(465): "n" may be a, t, c, g, other or unknown
  misc_feature (485)..(485): "n" may be a, t, c, g, other or unknown
  misc_feature (535)..(535): "n" may be a, t, c, g, other or unknown
  misc_feature (550)..(550): "n" may be a, t, c, g, other or unknown
ggcataacacaatcaggcttttttttttttctttttccttttaaatataaggcaacttgccaacacataacttaaaactggtcttcagtcacattgcttcagatcactagagaatttctggctaacgaacagtagtggatagtgaacaaaatgcaaaaccttaaataagaaccatcagctgacattccccagagacaagaggaaaggtaagggcttatttcatctgtaaaaaataaaaaagcccaattctgcatctttaacagaatggtgcaaaaatttgtaacaaaacagtctaagtttaaaattacagaaaagtgtttctagccaactaattgtcgcttgggatgagacgtgctgagcatggagtggatgaaggtatgctctaagaatggacagagggcaggaggggcttgtttccaatgtaggcccagcttcaggtgttagaaccatgctcatttggtaaangaagtctcaaagagcttaangctttgggttggtttttttttccttcattaaactgaggggctgcactaanggtgaatctacctgnggg

SEQ ID NO: 8304 - DNA, 548 bp, Homo sapiens
  misc_feature (521)..(521): "n" may be a, t, c, g, other or unknown
  misc_feature (529)..(529): "n" may be a, t, c, g, other or unknown
  misc_feature (533)..(534): "n" may be a, t, c, g, other or unknown
atttccatgaattcaaagccttttaatgatgtgaacacttactccccatttcttttttacattgttacaaaaaatttacatacagttttctgaaagtggcattttgttggttgttattatactgatgacacatattaacactttgtattgaagaagtatcataaaaatcacagggcattacagatttttgataagaagtagtaatagcattgtcttttaacagctggaggctcccaggcatactctttggtgagaaatgattaattttatattttcattttgatgagaatcttttcttgtttttaccagttataaaaacaaagctttttctttgttgtgatactgtgcactaagacttagtttcttgagctgatgctaaataaaatgagatcaataggaatattccaggaggtcgtgagaagtttttagaaaggatggcatctacatatatatggagctctgaaaactgttggagagtatgacctgggactgaaactgtggagcacatagccaggtcacangcttcganagcnnaaagagttgctctg

SEQ ID NO: 8305 - DNA, 550 bp, Homo sapiens
  misc_feature (492)..(492): "n" may be a, t, c, g, other or unknown
  misc_feature (542)..(542): "n" may be a, t, c, g, other or unknown
  misc_feature (549)..(549): "n" may be a, t, c, g, other or unknown
agtataataactttttatttgacatctacaagattttggcatcttgcagctttttaccaggtttatacaatctcgatttttcaatagtgcaacctgtggaagcaaaaaaaaaaaaaaagaaaaaaaagaaaaaaagaaaagaaagaaaaagaaagaaaagataaaaagaccaactgtcccctcacttgtttttataaacatctattataggcgaaacaaaacttacccatattatatagataagtgtctattcacatttgtacattaccatttttaacagcttgagataaactctacgtcttacaacacattaaacaatattcaagttactgagtaacaacaataacaacaataacaaaagaacacacagcagaagcctcaagtgtttcctcattgtctacaactcaggtatggtttcctttttatgagtgacaaagcaaattaagataatgaagtaaaaaacgattgtttgcaagatgaaagccaatttgnacttccttctaaaactacctttaagttgcaaatgtaaatttaagaagctnatagccnt

SEQ ID NO: 8306 - DNA, 563 bp, Homo sapiens
  misc_feature (353)..(353): "n" may be a, t, c, g, other or unknown
  misc_feature (498)..(498): "n" may be a, t, c, g, other or unknown
  misc_feature (528)..(528): "n" may be a, t, c, g, other or unknown
  misc_feature (543)..(543): "n" may be a, t, c, g, other or unknown
  misc_feature (551)..(551): "n" may be a, t, c, g, other or unknown
  misc_feature (561)..(561): "n" may be a, t, c, g, other or unknown
ggcttagtgcaacaaggtatttggtggtctcacatgacttgaacatccaggcctggctgtcacgggaaccgcatctcttcccattgcagctacttggcaggtggcgggatgtcccccagccaccgacgtccccctgcctgctccgcaaccccagggcctgcagaaaaggcccacgagactcagactggcagagacttaggcggaccaggaacaggggcgcagtctccgtcccacccaaaccctaaccagagagaacacggcacgttgtgccagacggaggacggatgccagcgagggtccatgtcctcactgccgacaaggctgggagctgggccaagtgaagcagaggcctncacgtcagatgtgagcgccaccggcccaggtgactgcagttcttccctccttccgttcggcttgagcccttcagaggatcggaaaggctgaagcctgacctggtgccgttgtcctgggtgggtctgtcctgctggtcggttctgnccttttcgggaggttggctggcacttgcangtggaaagcttctgngttacctnagggaaaagngg

SEQ ID NO: 8307 - DNA, 570 bp, Homo sapiens
  misc_feature (515)..(515): "n" may be a, t, c, g, other or unknown
  misc_feature (545)..(545): "n" may be a, t, c, g, other or unknown
  misc_feature (570)..(570): "n" may be a, t, c, g, other or unknown
ggagagagatgtatttataccagtggggctaaggaggaagcagtccagtgggggactttgagtgctgtgcagtgttctcttaagagtcgtagtacagtcctggggtcaagtctctttccctaatctttgctggggaagccttgagccttgatttatccttcccttggctttgggctttgaggaagttggggatggaggggatgatgcttctttaggtttctctattccaagcccctctgaatttctagttgcaacctgccttcacacagagttgatgggaaagattagttgtagatgtcggtatgggattgagcctacagcaagaggaagaagggaactccagtatagagtacacaaaggaaaagggcaggaaagataccaaaggcttatgaaaacaaaggaagggaagaaaagagaaaaaaggtggaaaatcaggtcccagattgcttgttaggaagaatgaggtaattttgggcctaggaatgcacaatccaaagcttgattttcaccacctncattggtctcttcgagccttccttccaaangttcttcccggcttaaagccagcan

SEQ ID NO: 8308 - DNA, 556 bp, Homo sapiens
cttgtcccatgggcacataatttagaatacatgctctcaaatgacaaaacatcaaaggtgagaggagggaccaacaatgaacatgatcttttttaaaagggggtaacagaaatagtaatcttttataattataaatcctctgcataccataaaatgatttggtttagctttcaaacatcatctaaacaaacaaacaagacagagagggaagttcactgctggggtttgcaaagaagggcatctgttcgtgggcagatgctgcagggtggctgctgaaaagctccttttatgtgcatgatggtggtcttctcggctacagtacaagtgcttgtgcatcaagtataaaatacaagcctttaatcacatagatcagctttttagcttttgtaaatttaaaaacaaaaaggataaataaggcactgtacttttaaaaacgaaaactgcttggttccaagtttaaaacccaaggacaccagaatataatatataacttccttacctcagagaaggactctgcaaggttccttttcatctgagaagcatttctggcatctaa

SEQ ID NO: 8309 - DNA, 558 bp, Homo sapiens
  misc_feature (489)..(489): "n" may be a, t, c, g, other or unknown
  misc_feature (512)..(512): "n" may be a, t, c, g, other or unknown
  misc_feature (528)..(528): "n" may be a, t, c, g, other or unknown
  misc_feature (536)..(536): "n" may be a, t, c, g, other or unknown
  misc_feature (542)..(542): "n" may be a, t, c, g, other or unknown
  misc_feature (557)..(557): "n" may be a, t, c, g, other or unknown
ctgtggatattttaaaagtttatttctattttaactagcccacagaccccattctttgagggctgatctgatttctgacaaatggtctatagaccctcctctcggaaacttccaaaaaagtctgcaccttccatcatgatgcacattttaagttaaaattgccaatacaacccttaaaatgcaagtttattgaataaagctgagaagagcagtaaacagacaaaaaatgcatccacctaaataaaaaaattcacatatttacatagttcagtaactgttaaaagttttcacatgcagaggttaatgcacaggaaaatgttggtaatagcgtctggatgtcttgaaatgcggaaagcaatgtatagacacacaaacacattaaggtttagctataggtcaattaacaaacctatgcagtccccacagagtcacacattctagttccaattcctccttttaggcacaagcaagttggccacattcttttgnaatgggtcacactggccattaanggggttgaacaccgtnccaggttnaaaatnccttcatttccgaanc

SEQ ID NO: 8310 - DNA, 540 bp, Homo sapiens
  misc_feature (493)..(493): "n" may be a, t, c, g, other or unknown
  misc_feature (534)..(534): "n" may be a, t, c, g, other or unknown
gtttttgaggagatgaggtcttgctatgttgctccagctggtccttcacttatttaatcctaccagctagtgttctggtatctcctctgaatttttaattaatttcacttccagagaattaagtattatttttgttgacagtttgttctctcaaacggcattgcatttagtaatacttttttagttgttggggtttttgttttttcaaatgttactaatttgtttccctttccagctgaagaaatagtgaccaggggagtaaatattctcaggccactgtgtttgtatattatggacaatcaagaaagaactagggtatgttagagacagaactccagaggtcaggtcatctccgtctactcacttggtggacttggctaagtcacgtgatctctctgggcctccatttcttcatctataaaatgggactaatactttcaacctagtacatgaaaagaaaatatgctgattggacccatcctacttctggtgnaaccttacaccagagcccaggctgggtggtcatggatggtnccctgc

SEQ ID NO: 8311 - DNA, 536 bp, Homo sapiens
  misc_feature (436)..(436): "n" may be a, t, c, g, other or unknown
  misc_feature (504)..(505): "n" may be a, t, c, g, other or unknown
  misc_feature (509)..(509): "n" may be a, t, c, g, other or unknown
  misc_feature (511)..(511): "n" may be a, t, c, g, other or unknown
agggctgagaaaatattcagtttattaaatattgtgaatgggtggaatatcagatacatcatctcaatatgtaaatatcctatcccatctcaacatcaaatttagattacctggatttcttctttgcttttctctatgattacagcagagatcattatgtattttattagtttcttcagtctttaaggtatttttggatgatgttcaaataaactccaagttatctccaactttttctgaacaaaatatttccattcttaagatacaggcttgtaattcacatacttgatgctactcaatggcgtcttatctgtattttcttctcacatttgactccagagtattcagtgcggcaggaacacacattggggaaatatgcatctgcctccataaagacattttgggttgcaaattggtattgacaccggactccttnccaggaggaaggacaatggcatatgctgggcccaatgcattcaccaccgttttacatttctgcaagcnnaaangngtgttgcatcgttcccactccacca

SEQ ID NO: 8312 - DNA, 543 bp, Homo sapiens
  misc_feature (477)..(477): "n" may be a, t, c, g, other or unknown
  misc_feature (526)..(526): "n" may be a, t, c, g, other or unknown
ctcgagacagggtctctgtcacccaagctggagtgcagtgacacaatcaaggctcactgtagcctcaatcttcagggctccagggatcctcccatctcagtctccttgggagctgggagtaggcatgtgccaccatgcctggctaattttttaatttttttgtagagatggggtcttgtcatgttgcccatgtcggtctcaaactcctgggctcaagcgatactcccaccttggcttcccagtattgggattacaggtgtgagccaccatgtctggcttgcttctctttttgtattctaaaattcaaaggcctaagtatcaaatccctaaatctccaaatactgtcacagataaagactcaataataaactccctccgaaagtttagacaggctcaggtgagagacttgttcaaggggttataaaaagaaacaccagtgctctgcagaagaatcaagtttttaatttttttaaatgnatctattttaatgggaataagttgatcattagaatttgtaaaccaaaanggtaatttctcaagttt

SEQ ID NO: 8313 - DNA, 462 bp, Homo sapiens
  misc_feature (424)..(424): "n" may be a, t, c, g, other or unknown
  misc_feature (435)..(435): "n" may be a, t, c, g, other or unknown
  misc_feature (439)..(439): "n" may be a, t, c, g, other or unknown
  misc_feature (448)..(448): "n" may be a, t, c, g, other or unknown
  misc_feature (450)..(450): "n" may be a, t, c, g, other or unknown
  misc_feature (456)..(456): "n" may be a, t, c, g, other or unknown
  misc_feature (458)..(458): "n" may be a, t, c, g, other or unknown
ctggaaactaaagatttttatttaatccaaatgttgcactggaagaagaaatcaacagtggtatatttacttaacaaggatgtgtgtaatacaagacaaccctggggattacacacttgaaggaatggaagtggcaaaggttaacaggcagaaagcagctggatgaaacagtttattttcatcttagaagattctagctatctgtggagaccaccactgttccccgaaaagctaaagttgttaagtttgtaggagtaccacaggtccttccccctgctgcaagacagagacttgctctgttgcccaggctgcagtgcagtggtgcaatctcagctcactgcaacctctgcctcccgggttcaagcaattctcctgcctcagcctcccatgtagctgggatacaaggtgtgtgccaccatgcctnggttaattttngganttttagtananattggngnttta

SEQ ID NO: 8314 - DNA, 491 bp, Homo sapiens
  misc_feature (423)..(423): "n" may be a, t, c, g, other or unknown
  misc_feature (430)..(430): "n" may be a, t, c, g, other or unknown
  misc_feature (439)..(439): "n" may be a, t, c, g, other or unknown
  misc_feature (447)..(447): "n" may be a, t, c, g, other or unknown
  misc_feature (452)..(452): "n" may be a, t, c, g, other or unknown
  misc_feature (456)..(456): "n" may be a, t, c, g, other or unknown
  misc_feature (476)..(476): "n" may be a, t, c, g, other or unknown
ctttgtccaatgattaatattttgatatctattgacaatcccttagaactttaaatctcaaaaacaaaaaagtactgtggatctccatagtttatacagaattatgtgaattctataaacttttctgaacaaaacaattacatgtcaagaatccatgaagcctggaagatacgctcacgtttttgaggtttgtattaatgccagtttttattgtattagacaaatgctctctgagaatcgaagacttctaaaggtagacaggcccagtttcccattagagttctggaagcagagcctggggaaggtctgtcacttgcccatcactggaccagccagaagccagcgggggccaggcggggtctgcaggctgcaggtcccttccagtcctgtccctgctgccctttggggaccattttggttaanaaccttngccggttgnccttgaancttcnagcncccttaccttaggcctaaanggttcctgaaacccc

SEQ ID NO: 8315 - DNA, 555 bp, Homo sapiens
  misc_feature (373)..(373): "n" may be a, t, c, g, other or unknown
  misc_feature (404)..(404): "n" may be a, t, c, g, other or unknown
  misc_feature (433)..(433): "n" may be a, t, c, g, other or unknown
  misc_feature (450)..(450): "n" may be a, t, c, g, other or unknown
  misc_feature (454)..(454): "n" may be a, t, c, g, other or unknown
  misc_feature (460)..(460): "n" may be a, t, c, g, other or unknown
  misc_feature (505)..(505): "n" may be a, t, c, g, other or unknown
  misc_feature (543)..(544): "n" may be a, t, c, g, other or unknown
  misc_feature (550)..(550): "n" may be a, t, c, g, other or unknown
  misc_feature (554)..(554): "n" may be a, t, c, g, other or unknown
ggagtaggcatgggtcaatgattgtttattgaataaatttactactggagtaagaagtggcttagagtccagtgtaacatggtggctgggagtgtgagtggatgaatggggggcccgatataggaactggggcctcggggatgaggccgagttccatcctgccttcttccacgaccatccttaccttcccacccccaccgctcccattctgcagatgagaaaaccgaggctccgaaaggaaaaaccactgcctggattcccacgcctcttctttaactcatttgcaggtgagggcagggaaggaaaatcctagggtcagcattggggagggggggactctcctaaatttattgggcaacaggctgcaggtganggggctgacaggaagaagggtccggggtgtnaataaccttaaaaaccgtaggtgacaacnggaagttctttaagaanaccnttgccnaagggaaaggttttggggggttttccaagggttttgccaaaaggnccccggccaaaccttgggccagaaaatgggggttttannccttangggnt

SEQ ID NO: 8316 - DNA, 467 bp, Homo sapiens
  misc_feature (29)..(29): "n" may be a, t, c, g, other or unknown
  misc_feature (103)..(103): "n" may be a, t, c, g, other or unknown
  misc_feature (212)..(212): "n" may be a, t, c, g, other or unknown
  misc_feature (218)..(218): "n" may be a, t, c, g, other or unknown
  misc_feature (392)..(392): "n" may be a, t, c, g, other or unknown
  misc_feature (398)..(398): "n" may be a, t, c, g, other or unknown
  misc_feature (413)..(413): "n" may be a, t, c, g, other or unknown
  misc_feature (438)..(438): "n" may be a, t, c, g, other or unknown
  misc_feature (442)..(442): "n" may be a, t, c, g, other or unknown
  misc_feature (448)..(448): "n" may be a, t, c, g, other or unknown
  misc_feature (454)..(454): "n" may be a, t, c, g, other or unknown
aaagatagagttttgcttttgttgctcangctggagtgcagtggcacaatcttggctcactgcaacctctgcctcccaggttcaagtgattctcctgcctcancctcctgagtacctgggattataggcatgcgccaccttgtccggctaattttgtatttttagtatagacggggactcaaactcccgacctcaactcatccgcccgcctnggcctnccaaagtgctgggattacaggcgggagccaccgcgccgggccatcttagatcttagagcccactttagtccttgaaatacatctgagaagccaatggcagcgaatgacggtgcccgcctgccccaggcaccttgggtgggccaggccctgcttcaggaggtggcggccacttcngggatnactgatgcagccccnacccccatggtttgtcgggactaanctgngtcttnaaggtntgtgaaacttcca

SEQ ID NO: 8317 - DNA, 509 bp, Homo sapiens
  misc_feature (460)..(460): "n" may be a, t, c, g, other or unknown
  misc_feature (467)..(467): "n" may be a, t, c, g, other or unknown
  misc_feature (471)..(471): "n" may be a, t, c, g, other or unknown
  misc_feature (476)..(476): "n" may be a, t, c, g, other or unknown
  misc_feature (480)..(480): "n" may be a, t, c, g, other or unknown
  misc_feature (492)..(492): "n" may be a, t, c, g, other or unknown
  misc_feature (495)..(495): "n" may be a, t, c, g, other or unknown
caggtaaaaccacattgcctttatttggctaaagaacaaaatccaaaataactcagaacaaactaagaacagacaggaaaattacagactgaaccccacttgaggaagacttccccacggactcacactggtgatggggcgaacgttcaagacgaagccagcagtcctttccaagactcttttgtcttttagggatcctcaatacaaaacaacccaactaatccaggatatgtgttcaaaacagtcagttttccccctcaaaaggcgggaaggcccacttcaaacctccaggaacacaacccaagtcatcccagtgttaaacctggtgcttccgttttctgcctcaatccgagcgctaacataaaatcttggcagacaacaatctttctttttcaagaaaattaacatttaatgggataatcccaagaacatggtctacttaatttgctttggaaaattnaaacttngggnccctntttnttcccaagggcngtntttttttttgagaa

SEQ ID NO: 8318 - DNA, 518 bp, Homo sapiens
  misc_feature (421)..(421): "n" may be a, t, c, g, other or unknown
  misc_feature (429)..(429): "n" may be a, t, c, g, other or unknown
  misc_feature (459)..(459): "n" may be a, t, c, g, other or unknown
  misc_feature (473)..(473): "n" may be a, t, c, g, other or unknown
  misc_feature (495)..(495): "n" may be a, t, c, g, other or unknown
  misc_feature (504)..(504): "n" may be a, t, c, g, other or unknown
  misc_feature (518)..(518): "n" may be a, t, c, g, other or unknown
aactttacaaaatttgttttatatctgttagaaaatgtacagacataagtattttcagttgacaaagcatcaaacccagttctgcctagtgataagtttcaccctagagtatgtatgtaacgttttagcttatccatcctttcttggagcgcctccatttccattgaaagccaggctggagcaggacccttttggagtagtgactcagttgcttccaaagcccctgctattgtatgcagcgctgacctgtactcttcttcccaggggaactcctgacgagctctttttgcataaggctgtaaagatgacctctttgcttcttctacagtcacattagcaaagggttcccagaaaatacctttttcctgtttcacacgttccactttggcaagcttcagtttcatctacaaacccagctttntccagaangggtccactttggtccttaagtttttttanaacttgggacactntgggaaccttttctttaagaanttgggcccntaagggaatctggn

SEQ ID NO: 8319 - DNA, 513 bp, Homo sapiens
  misc_feature (463)..(463): "n" may be a, t, c, g, other or unknown
  misc_feature (482)..(482): "n" may be a, t, c, g, other or unknown
  misc_feature (484)..(485): "n" may be a, t, c, g, other or unknown
  misc_feature (489)..(489): "n" may be a, t, c, g, other or unknown
  misc_feature (505)..(505): "n" may be a, t, c, g, other or unknown
  misc_feature (511)..(511): "n" may be a, t, c, g, other or unknown
aaatttaaaaagatgtcctcactgcacaagtgactacgggctacaggcaaggatgggagacggaggcttcaacacaactcattgcacttagaaccgttactaaccgaaacaccatttgcttgtcaacaatgtacccttgacagcagggagaaacttctttatagtctctgcttcagacaagatttacagctttctccaaggccagaggccaattgtgaccacaagtcttgtttcttgtccaccagacccaatcctctggcaccttgtaccccccgttcctcagcaatatgctcggcctaggttccagaggcagctggaaggaagcagctatgggctcattcagttctgtttgcccaaatccagaagccctaggaaagtcccgtctgagtcttgactcctggacccttcaatggcttgaagtccggtacttgggcacaaccccaatttcaccggggtggggaangctttgaaattggaaaccncnnatanccctggaggccttggnaaaaantt

SEQ ID NO: 8320 - DNA, 508 bp, Homo sapiens
  misc_feature (464)..(464): "n" may be a, t, c, g, other or unknown
  misc_feature (467)..(467): "n" may be a, t, c, g, other or unknown
  misc_feature (470)..(470): "n" may be a, t, c, g, other or unknown
  misc_feature (483)..(483): "n" may be a, t, c, g, other or unknown
  misc_feature (488)..(488): "n" may be a, t, c, g, other or unknown
  misc_feature (492)..(492): "n" may be a, t, c, g, other or unknown
  misc_feature (508)..(508): "n" may be a, t, c, g, other or unknown
gttcagagtagctttattttaatagccaaatattggaagtgatccaaatgtccatcgacaggtgaatggattaaacaaactgtacagatgtggtatatccatacaatggaatgttattcatcaataaaaagaaaagaattgacacacacaagacacaagaatctaaaaaataattatgctgcgtgaaagaagacagacaaaagaagagcacgtactctatgattccatttatataaaacttaagaaaatgcaaacgaatctgcagggacagaaagcagttcagtggctgccagagagagggttttctcagggggaagaggcctaagaaaacttttgtgggtgatggatatgatccccctgttgattgtggtgacagtttcacagatgtaaacatatggcaaaacttatcaaattatccactttaaatattaacccgtgtttggatatcaattttaccttaattnggnctngttttaaaaaaantttgnctcncaagcttaaaaaaggn

SEQ ID NO: 8321 - DNA, 490 bp, Homo sapiens
  misc_feature (299)..(299): "n" may be a, t, c, g, other or unknown
  misc_feature (424)..(424): "n" may be a, t, c, g, other or unknown
  misc_feature (454)..(454): "n" may be a, t, c, g, other or unknown
  misc_feature (462)..(462): "n" may be a, t, c, g, other or unknown
  misc_feature (467)..(468): "n" may be a, t, c, g, other or unknown
  misc_feature (478)..(478): "n" may be a, t, c, g, other or unknown
  misc_feature (484)..(484): "n" may be a, t, c, g, other or unknown
ccatatttcatttccattttattacatgttcacattatttcctgaaatcatcttagaaccttttgtttttgcaaaattttagaggtccaggccctgtgatagctatgtgatgttttttccagcacataaagcaaattcatgatgtgaaagaggcaaatgacaatagttaaagtatgtcttattttgtaataggatttttttaataaaaaattattgtggaacaaggtacattaaatttggcttgcaattaggaaatatgggagccggacttgaagagcgtgtgattgagtccccacatntaactgatgaggaaacaggctcagatgggtctattgatgggtccacttgctagaagcaaaactggaactagaaaccacgccctggcttctaggcagcaagcaataagtttttgctaaatttggtncccaacatttaaaaccaattccccaaaatngggaaagncaaanngggttttaantggggntttttt

SEQ ID NO: 8322 - DNA, 399 bp, Homo sapiens
  misc_feature (14)..(14): "n" may be a, t, c, g, other or unknown
  misc_feature (87)..(87): "n" may be a, t, c, g, other or unknown
  misc_feature (118)..(118): "n" may be a, t, c, g, other or unknown
  misc_feature (120)..(120): "n" may be a, t, c, g, other or unknown
  misc_feature (143)..(143): "n" may be a, t, c, g, other or unknown
  misc_feature (220)..(220): "n" may be a, t, c, g, other or unknown
  misc_feature (229)..(229): "n" may be a, t, c, g, other or unknown
  misc_feature (306)..(306): "n" may be a, t, c, g, other or unknown
  misc_feature (311)..(311): "n" may be a, t, c, g, other or unknown
  misc_feature (364)..(364): "n" may be a, t, c, g, other or unknown
  misc_feature (366)..(366): "n" may be a, t, c, g, other or unknown
  misc_feature (377)..(377): "n" may be a, t, c, g, other or unknown
  misc_feature (387)..(387): "n" may be a, t, c, g, other or unknown
  misc_feature (399)..(399): "n" may be a, t, c, g, other or unknown
aatgaggcacctgngggactttattaggtaaacagaccccagctccagccacaggcttggaccggccagctgacagtgcggcctcanacacccccgccaggttccctcctccctcctntntcagggtcaccagtgtgtgaaanatcggggcatgccggccacagggggaagcagggttcaggctgccccacctgggtctggccctggcaggcgccccctnacctggctntgctgtgggagccgagaacaaagacatcacctgcctggctcctgctgccccggggggtcaagccagcacccaccctnacagnggcctgggcaggggctggggtgcaaagcctacccttcccctgtgagccagacngnaaatgcatttnccaaaatgtntcgaggggcacn

SEQ ID NO: 8323 - DNA, 530 bp, Homo sapiens
  misc_feature (410)..(410): "n" may be a, t, c, g, other or unknown
  misc_feature (425)..(425): "n" may be a, t, c, g, other or unknown
  misc_feature (441)..(441): "n" may be a, t, c, g, other or unknown
  misc_feature (446)..(446): "n" may be a, t, c, g, other or unknown
  misc_feature (477)..(477): "n" may be a, t, c, g, other or unknown
  misc_feature (497)..(497): "n" may be a, t, c, g, other or unknown
  misc_feature (512)..(512): "n" may be a, t, c, g, other or unknown
  misc_feature (519)..(519): "n" may be a, t, c, g, other or unknown
  misc_feature (527)..(527): "n" may be a, t, c, g, other or unknown
gttgacacaaaatctttttattccccatttgccatcttttccacaaacctctcaggtacagatcggaagaaagtgcatataaaccctgccttatttaaccaggcccaccgcctccgggacagcccctgggggagccccatcccgctaggtagaagggaaggccacaccaagtgctgagtgagccacccagacagcaggtgctctgggagggaggggcgacaaggggtaggggaaggcttcctggaggagggagaggcctggccctgagagacagggggcggtccctgaaaagggagagagaaggcacacttctccgggaaccaggccccagcacctgagcattggacccaggcggccaggaagaacacaggccaaggcgggggcctgaaccaaatggggactgtggaacntcagggaacagcccnttttggcttaaggctngagtntaaaaggaccttctaagggcttctggttggntggttccaaaggattccaangggaaaccatgcctncctaggncccaccgntgg

SEQ ID NO: 8324 - DNA, 555 bp, Homo sapiens
  misc_feature (425)..(425): "n" may be a, t, c, g, other or unknown
  misc_feature (432)..(432): "n" may be a, t, c, g, other or unknown
  misc_feature (461)..(461): "n" may be a, t, c, g, other or unknown
  misc_feature (515)..(515): "n" may be a, t, c, g, other or unknown
  misc_feature (522)..(522): "n" may be a, t, c, g, other or unknown
  misc_feature (532)..(532): "n" may be a, t, c, g, other or unknown
  misc_feature (550)..(550): "n" may be a, t, c, g, other or unknown
gtttttagtgtgattgcatttattcttataaatgtacagagctgtagaagtgcaagccaagagttctatagagtagtacataaacaccatatggtaccactcctgctgggaggtaagcctggatacacccctctcctcaggaaactgtcacctgcagaacacacagcactcagaattaaggcagtttggccctgggcacattggtggtattttggtatgtggccactggccctaaacaactgaccatttctaccctgcctcactgcactgtcccaccaggtccctccagctttttctacaaggtaacaccctcctacatggggtcagccagctcagaaacctcttcttcagggacagttgcagctgaatatgccagagctgattattacaacaacgatgcagagggccttggttttggggcctgncaccctnaccctagaactggttaacacccaagccantctgcctgaccaccttcccaacagaagatgtaggctatcttaccttcacagcancttccangacaaaactngggcctttacctgggtgntggct

SEQ ID NO: 8325 - DNA, 559 bp, Homo sapiens
  misc_feature (441)..(441): "n" may be a, t, c, g, other or unknown
  misc_feature (450)..(450): "n" may be a, t, c, g, other or unknown
  misc_feature (460)..(460): "n" may be a, t, c, g, other or unknown
  misc_feature (526)..(526): "n" may be a, t, c, g, other or unknown
  misc_feature (552)..(552): "n" may be a, t, c, g, other or unknown
aaaaagtgaaacttcaaatacagcggaggtggcttctttcctatgaggctggctgatgggtgccagataccaaggcccatgtgttactgaggagacagcctgctgggctggggtcaggagctagcggagggaaacggttagatctcagaaaaatctcatcactatgccctagtagcttaatgacatcactagcatgagcacatggtgtacttggcgggatcttacagctctgttgcccatctcaagacctaagaacaattattaagtttagccaaatcttgcatagacgtggttagaatttattgcacattggaacaaaaatatatattttttgttgttttggaaaagaccattagcaataaaaaattttttgtctgtctgtctggtttggggatgtacattggctgacagcatctaagttctaagaagaaagaaaaagtnttaaaaatnaaaattaacntgacaatggcataagccagaagccatttcctatttaataagtaataatttggattttccaaaaagnatgcccattaaataaaatttttttcnggtttat

SEQ ID NO: 8326 - DNA, 567 bp, Homo sapiens
  misc_feature (61)..(61): "n" may be a, t, c, g, other or unknown
  misc_feature (400)..(400): "n" may be a, t, c, g, other or unknown
  misc_feature (435)..(435): "n" may be a, t, c, g, other or unknown
  misc_feature (492)..(492): "n" may be a, t, c, g, other or unknown
  misc_feature (504)..(504): "n" may be a, t, c, g, other or unknown
  misc_feature (509)..(509): "n" may be a, t, c, g, other or unknown
  misc_feature (518)..(518): "n" may be a, t, c, g, other or unknown
  misc_feature (523)..(523): "n" may be a, t, c, g, other or unknown
  misc_feature (526)..(526): "n" may be a, t, c, g, other or unknown
  misc_feature (546)..(546): "n" may be a, t, c, g, other or unknown
aaaagtttaactttatttttttttactaaagttcagaaatttctgtaagacaagtacattnatgaaatgtttccaaagaaatactgaacaatatatactctagtttgctgaggttccagctcaagagttcaaacctaattcttgtgcaataaaaatcagcatggatcttagatgatctagaatacactgtgttttgaaatccacagctggtttcatttttaaccattatgaaaaaccagtactcctattccatcaaatgtgttttataagcaataataaattcagatccactgtattatgcaacatacatctttggaaagcaacataaacagtgagatcagatcagtagaaatatacacagttaaaagaaatacacaaagtactgtagtttttattaaanactactacttgagaaagaaatctttccacaaaatngcataaaactgttgaatgatgaaagggtttgggaaagcttttccaaaagcttaattncaatggatcttnctganggttggggncaaanggnatttccttcctctctggganattcctggctccctccacgaa

SEQ ID NO: 8327 - DNA, 559 bp, Homo sapiens
  misc_feature (457)..(457): "n" may be a, t, c, g, other or unknown
  misc_feature (467)..(467): "n" may be a, t, c, g, other or unknown
  misc_feature (485)..(485): "n" may be a, t, c, g, other or unknown
  misc_feature (507)..(507): "n" may be a, t, c, g, other or unknown
aaaatatttcaaagtgtagtacacatttattttcatttgttattttctttcatagcagattacagagaaagaaagaaacctctggtttcatgttctccctggaaatattagcattgatacccattttatcctccaacttatgggggaagggaaagtaaaagtgagggagggaagagccagaacctttgggtgagggcaactttgggtcagactgccaggctacagagttaagggaagctggccccagaacagtcctgtggcgattctgttctacttcctgcattccagcagacttgacactgggctcccagacgatccaggacacaatgcctcactgttatgcacacgtatcagctgctctggtaggcttgacaagggtttgctttaaatgaagggtttgctaatttgggacccttccttcatatagttgggcctgtgccccccagagcagacattncttggcctgnatacctgacacagcttgngagttcctgcatgtccccagcnttaccaatggatccgtaaaggggagacttcacttggcccagcttaaaacagg

SEQ ID NO: 8328 - DNA, 530 bp, Homo sapiens
  misc_feature (29)..(29): "n" may be a, t, c, g, other or unknown
  misc_feature (127)..(127): "n" may be a, t, c, g, other or unknown
  misc_feature (191)..(191): "n" may be a, t, c, g, other or unknown
  misc_feature (199)..(199): "n" may be a, t, c, g, other or unknown
  misc_feature (274)..(274): "n" may be a, t, c, g, other or unknown
  misc_feature (329)..(329): "n" may be a, t, c, g, other or unknown
  misc_feature (349)..(349): "n" may be a, t, c, g, other or unknown
  misc_feature (418)..(418): "n" may be a, t, c, g, other or unknown
  misc_feature (436)..(436): "n" may be a, t, c, g, other or unknown
  misc_feature (478)..(478): "n" may be a, t, c, g, other or unknown
  misc_feature (497)..(497): "n" may be a, t, c, g, other or unknown
  misc_feature (503)..(503): "n" may be a, t, c, g, other or unknown
  misc_feature (511)..(511): "n" may be a, t, c, g, other or unknown
  misc_feature (514)..(514): "n" may be a, t, c, g, other or unknown
  misc_feature (523)..(523): "n" may be a, t, c, g, other or unknown
gtccatgaggcattttatttgtaaatatntgtattacatccctagaaaaagaatcccaggatttttcctcctgtgtgttttcgtcttgcttcttcatggtccatgatgccagctgaggttgtcagtncaatgaaactatggagtggaaaaagaaagtgctggtaagtttaatagttcaacatagtgccttntagtgcanaaaaacatcaacactcatcagtggttaagggcgctttcctgtggggcacataggaactgacagtgcctacatganctggtgcctcatgtagcgtatgagccatgactcctgcaacccaaagagccaaatncagagagcccagccacacantcacacaagccctgacttctgcctacaccatgaaacaaactgcactgaaaacaaaaggcttgggaactnctttaaattcaaaatgtnacttttctgctttcaggtaaggagactttgaaagtatttcgnataaaacttggagttttgnaattgnggtttctnccntgtacctgnattaata

SEQ ID NO: 8329 - DNA, 545 bp, Homo sapiens
  misc_feature (531)..(531): "n" may be a, t, c, g, other or unknown
atagagagatttaagtttattgaaatgtgttagaaacaggggaagtatctacaagcagaatcgtaaagccaaggacatttccaaattaatagaaaggaaggaaacagaacagaaacttgacccatccaaataaagcaggggagaagtttaaaaaggaaacaaaaggaacaatacacatagtataagaaaaaatgtctattatttattacacaataattctgaccaccaacaaccaacggcgggggcgggcaggagagaagaacatcttgcttctcaacaaactttcctcccttgctttaacatttttgaggattctttcccaaacctattacacctgtattatgatggttacaaattttccaactcttccactccttccagtgcattatttttagtatcttcattaaacgggcaaaaaaaaagatcccctacttgtaataacaaaacaatgttggaactgtcattaaatcaggatagtggaaaacagatctgttcccagacttgcaggacttttaggttaggaagtccccnaaaaaattaaaatt

SEQ ID NO: 8330 - DNA, 542 bp, Homo sapiens
  misc_feature (433)..(433): "n" may be a, t, c, g, other or unknown
  misc_feature (435)..(435): "n" may be a, t, c, g, other or unknown
  misc_feature (442)..(442): "n" may be a, t, c, g, other or unknown
  misc_feature (448)..(448): "n" may be a, t, c, g, other or unknown
  misc_feature (472)..(472): "n" may be a, t, c, g, other or unknown
  misc_feature (501)..(501): "n" may be a, t, c, g, other or unknown
  misc_feature (508)..(508): "n" may be a, t, c, g, other or unknown
  misc_feature (542)..(542): "n" may be a, t, c, g, other or unknown
gttttcaatacactcatatatttttactttgtaatacaatatagctgtcacatacaatggctctagtaggcttaaatcaaattgcaatgggcaaggaaagccaaagaagggtttacacaatattcaataagcaacagtatctgttcagtgtgcaataaaataaaaaagttctaacctagaaacacagaaaaagaatttattgtttttaagtttcagaaataaaagtaacagaatagtgtataatctgtaacaagctggtcctgtaatttctaaactacagtccaattaaaacatttaagtaatagaaacaatctacatgtttttctaccaggtaaatatacctgagagggttacctataaagaaataggctttaaaacttttaaccacaaagaaccttctgctgcgacattatgaagatgggctatgcatgtngncagactnagtcantttcccggagattctgctcactgnttaactgcaggtagtggtccatcaatggncagagtntttaccatcaataccagttcattcaaccaaagan

SEQ ID NO: 8331 - DNA, 532 bp, Homo sapiens
  misc_feature (5)..(5): "n" may be a, t, c, g, other or unknown
  misc_feature (441)..(441): "n" may be a, t, c, g, other or unknown
  misc_feature (464)..(464): "n" may be a, t, c, g, other or unknown
  misc_feature (468)..(468): "n" may be a, t, c, g, other or unknown
  misc_feature (500)..(500): "n" may be a, t, c, g, other or unknown
  misc_feature (518)..(518): "n" may be a, t, c, g, other or unknown
  misc_feature (531)..(531): "n" may be a, t, c, g, other or unknown
actgnatatcctttattaaattttgccttaaaaattttaaatgctgcatttttataattcacaatagcaacaaaacatgacaattatttgtgtgaaatacagtctaagctctaaaggttcatagattacattcattttataccaggtttgttcatatatatagattaattcatcacagtatacttatttcttaatatacttgcattttatcaagtaaaagaattaaatattaaaagtagcttgacaaaatacagaaatattctgtgcaataaatttgttgtcaactgattcatgactggttcatgaatcatgactgatgtaatctttttatctttctgcccagcttctcttacatgatccttgggaaatagccagttgaaaagaaatatggcaaggtattctagaatggccactaaccatagagtctttcaagatgtgcangttgctttttggattcttcctgnaggngatctggctcttctagaatacagggatatctnggattaaaaaagtccgantttcctcatgaang

SEQ ID NO: 8332 - DNA, 530 bp, Homo sapiens
  misc_feature (390)..(390): "n" may be a, t, c, g, other or unknown
  misc_feature (428)..(428): "n" may be a, t, c, g, other or unknown
  misc_feature (434)..(434): "n" may be a, t, c, g, other or unknown
  misc_feature (436)..(436): "n" may be a, t, c, g, other or unknown
  misc_feature (446)..(446): "n" may be a, t, c, g, other or unknown
  misc_feature (515)..(515): "n" may be a, t, c, g, other or unknown
ggatacataatctttcactgtatttgaggctatcttgagtctctggttgagatctgggtcactaaggcttctgggggatcatgtcttcaacaagccttccaatgaatgtccaaagaaaaacatataatttccttttatttttttttttaccaaagttcttatgaattggaaaataatttgtttcaaagacggtgatgaaaggaaaaaaaaagtttaactttccaaaggtaatgctttcatgaagagttagaaatagcagttttagtaattagttgtaggaattctggttaagacttcaacattttaccttacttaaaagatttgctttatgcaacatttaatgcccagttttgcatggctctaaaaatctttaaaatgcaaaagcttttncagtgactggaagccaacacgacaagaatgaaatgggntgaccngngaattaaccngggttataaaaaaatcccgttcagagaccctttacccaattaaggaacttagccattccttaaatgggnttaacccttgggcaa

SEQ ID NO: 8333 - DNA, 348 bp, Homo sapiens
  misc_feature (293)..(293): "n" may be a, t, c, g, other or unknown
  misc_feature (310)..(310): "n" may be a, t, c, g, other or unknown
  misc_feature (314)..(314): "n" may be a, t, c, g, other or unknown
  misc_feature (336)..(336): "n" may be a, t, c, g, other or unknown
  misc_feature (338)..(338): "n" may be a, t, c, g, other or unknown
  misc_feature (341)..(341): "n" may be a, t, c, g, other or unknown
  misc_feature (347)..(347): "n" may be a, t, c, g, other or unknown
aacatcacataagtttatttcagatgtaacagcaatgttaaaattgacaagtttaattcttaactgcaccaagtaaacttagccatttaagtatttttttaagttattccctccaaaaaactgagggagcttttcttttccaccaccgcaccatggtttcccaatagttctctttttggaggacttttcaattgatgagtaaactgctttagatatttcagaacttcattccccaaatgaaagctaatctggacaaactatatattgcatagatttctctacagattctttgntttaaaacctaaatgcnactnaccataggtggaaatttaggcnanttngcccanc

SEQ ID NO: 8334 - DNA, 550 bp, Homo sapiens
  misc_feature (516)..(516): "n" may be a, t, c, g, other or unknown
cacaaagaatcattttatagattttttttcctgtgtggattctctgatgttcttaccacccctattacttttataggatttatcaccaacatggattctgtgatgaactgtaagatttgatcgccaactgaagctcttaccacatatctcacatttataaggtttctccccagtgtgaactcgctgatgagactgtagttgtgaagaccgactgaagactttaccacacacatcacatttgtatggtttctctcctgtgtggacactctgatgaagttgaagacttgaggcctgactgaagtacttaccacactccccacatttatatggtttttctcctgtgtgcaccctctgatgcatgtcaaggttcaagctccacttgaagcccttcccacactcatcacatttgtatggcttatctccagtgtggactttttgatgggcttgaagatgtgcacttccgacccgaaactctttcccacattcttcacatttgaatgggttttcttcactggnggacttctctgatgggcccaaaaaatttgaggcc

SEQ ID NO: 8335 - DNA, 549 bp, Homo sapiens
  misc_feature (529)..(529): "n" may be a, t, c, g, other or unknown
  misc_feature (540)..(540): "n" may be a, t, c, g, other or unknown
aatgttactttgtttattaacatgtcgttctaaatattacataaatacagcttacatactagagtatcaaacattgttccagtaagaagttcaagagtacatttagggctatcttaagaaatatgaatactttggcttccattattacattagatgaaaaaatcaattcaaataagagttgtcatatcctgctatgattaacaaaaaaacaagtagaaaaataagagagtgtatttaaaaaaaataatcaaatgctttttgaaagacctgttctcttcactgccacacatattcatacaaatgacttagtaatctaatatgagaagtggtccttcacttatattaggaacttggtaaatatttgttgaatgaatgaactatctatggatatgaatttactactttaatttgtgctttttttgaaaaaaagttttcaagtaagagcaatagtaaacatactgaagttcacatttgctcagatcataagcctatagaacagtgattggtacaaacaccacccatcatagcncaaatcaatgngcatttttg

SEQ ID NO: 8336 - DNA, 543 bp, Homo sapiens
  misc_feature (510)..(510): "n" may be a, t, c, g, other or unknown
  misc_feature (529)..(529): "n" may be a, t, c, g, other or unknown
  misc_feature (533)..(533): "n" may be a, t, c, g, other or unknown
ggttcccaggtttattgacaattactcatctatttttgactccccgagtcccagctcccaaactcgctctccctactccaggcttcacggtagtcccagaatgtaggaagtgggacaggatagactttaacatcacccaggcctctggtttccaaagcattttttttctttaatgcagtaaaaccattcctttaaaacccaaaatctctcatggaacccctacgtatcaaatatataaagcaggagctgcccttgttcagggataatatgtggggcttatggctctaagaaacacagtttgacattcactgctctccttacttcagttacctcatggtatagataaatgggctgggcccagagaggggccatgacctgtcctgggacacgcagccactgaagcctttagtccagtgctccttccacagcaccacactggattctggagtctttccagccagggcagaggaagctgcacagtgccacgataagaagttctgggcttctggnacctaccctttaaaactgntggncctagggcat

SEQ ID NO: 8337 - DNA, 540 bp, Homo sapiens
  misc_feature (481)..(481): "n" may be a, t, c, g, other or unknown
  misc_feature (511)..(512): "n" may be a, t, c, g, other or unknown
  misc_feature (515)..(515): "n" may be a, t, c, g, other or unknown
  misc_feature (518)..(518): "n" may be a, t, c, g, other or unknown
  misc_feature (522)..(522): "n" may be a, t, c, g, other or unknown
  misc_feature (524)..(524): "n" may be a, t, c, g, other or unknown
aaaatcaatcagaaatttatttttcttatgtaagtacaaaacacctcttttcatcagtggaccccactcctaggcaacctggccatggtgcccggatgcaggcagtattcaagagtttcttccaaagtcaccagggtgaaaagccattctactacaacctctacatgaccttttaaagtgtacaacttataggacagtcctttctggagtactgtggagggtgaatcaaagcttccagtgtaagtttattgtctggcgaaaacaccagagccaaaaattccaccaaggccctggaaagactgaagtcccctctgtctcatacagtaatcatccatgagatctcccggagcctgggtgatcattacgcccatgatacctgaggcagcgtggactctgccaggggctcctcagacccaaagtggagctcactttggagaagtcggagcttatggccgttagcacctaaggatgtggctgaaangcccagaacaagaaagggctttagagaccnngcncanggtnantttaaaacttgggccc

SEQ ID NO: 8338 - DNA, 538 bp, Homo sapiens
  misc_feature (43)..(43): "n" may be a, t, c, g, other or unknown
  misc_feature (437)..(437): "n" may be a, t, c, g, other or unknown
  misc_feature (447)..(447): "n" may be a, t, c, g, other or unknown
  misc_feature (492)..(492): "n" may be a, t, c, g, other or unknown
  misc_feature (534)..(534): "n" may be a, t, c, g, other or unknown
  misc_feature (537)..(537): "n" may be a, t, c, g, other or unknown
acacacacaaatcctgatttattccctgtttctcatacatcgntggcattgttctacttaaacagcgacagtgatgactccaaaaaaaatgtttagaattagaagtgcatgttaatctgagtaacttaagtacagaaaagagttagtacaccacaagcattttctacacttttattttgtggtgattgtgagacaaacacagtccaaacaatagacttcttgtcctccccctcccaacaactatctgactccatagctcatgcaccccaattacagcaggtgtcgggctggcataaaggcttcttaccaggattccagtttatccttctcaatccttttctcatctctaacaaaaatgccacacatacatgtagttgtgagaggcaaagtcttctttacactcaccaccagggggcgtatgggagcacaaaagcctnacaaaactgnttcaggatcctgccttttcaaggcccggaatccgggggcttccangaattctaacctgggcttggaaagggcattacaaataaactngcnc

SEQ ID NO: 8339 - DNA, 546 bp, Homo sapiens
  misc_feature (1)..(546): "n" may be a, t, c, g, other or unknown
nnnnnnnnnnnnnnnnnnnnnnnnnnnnnnnnnnnnnnnnnnnnnnnnnnnnnnnnnnnnnnnnnnnnnnnnnnnnnnnnnnnnnnnnnnnnnnnnnnnnnnnnnnnnnnnnnnnnnnnnnnnnnnnnnnnnnnnnnnnnnnnnnnnnnnnnnnnnnnnnnnnnnnnnnnnnnnnnnnnnnnnnnnnnnnnnnnnnnnnnnnnnnnnnnnnnnnnnnnnnnnnnnnnnnnnnnnnnnnnnnnnnnnnnnnnnnnnnnnnnnnnnnnnnnnnnnnnnnnnnnnnnnnnnnnnnnnnnnnnnnnnnnnnnnnnnnnnnnnnnnnnnnnnnnnnnnnnnnnnnnnnnnnnnnnnnnnnnnnnnnnnnnnnnnnnnnnnnnnnnnnnnnnnnnnnnnnnnnnnnnnnnnnnnnnnnnnnnnnnnnnnnnnnnnnnnnnnnnnnnnnnnnnnnnnnnnnnnnnnnnnnnnnnnnnnnnnnnnnnnnnnnnnnnnnnnnnnnnnnnnnnnnnnnnnnnnnnnnnnnnnnnnnnnnnnnnnnnnnnnnnnnnn

SEQ ID NO: 8340 - DNA, 543 bp, Homo sapiens
  misc_feature (445)..(445): "n" may be a, t, c, g, other or unknown
  misc_feature (452)..(452): "n" may be a, t, c, g, other or unknown
  misc_feature (479)..(479): "n" may be a, t, c, g, other or unknown
  misc_feature (499)..(499): "n" may be a, t, c, g, other or unknown
  misc_feature (518)..(518): "n" may be a, t, c, g, other or unknown
  misc_feature (535)..(535): "n" may be a, t, c, g, other or unknown
  misc_feature (540)..(540): "n" may be a, t, c, g, other or unknown
aagatctgtgcgttttatttttgtaaactatatctaaaacatacctcaatataaaaaaccagaaacaaaataacaaaaacggggtgagaacaaaaaatacagatgacaggttctgtagttatggtactgaactgagcttcctgtcagccaaaactagaagggaaacatgaccaccacctgacttgttgcagaggctttagatctgagcacttggatctgaaaacagtttctctttagatgccttcaaataagggacagtatccttgatgacaatacagtacatacattcacaattctccaagaccatctctgtgtatatcaaggttaacctggatgaatatttctgcagcaggcatggggtaggcaggcaatatgaccaaatatgtagtttggaggctcaaatgaaacaggagaaagagctcaggaaccatgaagcatggtgcangtatcanggtcaagtattctaaccctaagatcanggtgcatgagaactggagangcctcaatctgagacttanaccaaaggtgtggaatnacttncta

SEQ ID NO: 8341 - DNA, 551 bp, Homo sapiens
  misc_feature (477)..(477): "n" may be a, t, c, g, other or unknown
  misc_feature (517)..(517): "n" may be a, t, c, g, other or unknown
  misc_feature (521)..(521): "n" may be a, t, c, g, other or unknown
  misc_feature (529)..(529): "n" may be a, t, c, g, other or unknown
  misc_feature (531)..(531): "n" may be a, t, c, g, other or unknown
  misc_feature (548)..(548): "n" may be a, t, c, g, other or unknown
cagagcacaagttttgtttaattgattttacatcacaccagaaagcattacagggacactggcgaatagaagtaagctggaacctcatcacagagctcctttcttaccctcagcaacaaaaaggcttgatcttagaagttcaaaattgttccatatggtaaagacacattcactgcctggtcaggccttctgtgatctgggcctaccctgttgatccactgtatttccagctgtttttcaataagcaccatccacacgagtcagtattattttcaaaaggcttctatacttgcgatttcctttcctgcatttctgaatttgtcatgttgcttatcttgctcagaatttccttcattctcaaaagtatgggtgtggtacagattttcgggcagcagcatgtaacactttataggtaggttttccaattgtattggtcacagtaggcagagtaaattcaatagttttttggcttaaggnaacaactttcgaatgccctgaaaggagtgattcagtaaangaanggggatgncnttaaaaaacttggaccnacc

SEQ ID NO: 8342 - DNA, 552 bp, Homo sapiens
  misc_feature (492)..(492): "n" may be a, t, c, g, other or unknown
  misc_feature (518)..(519): "n" may be a, t, c, g, other or unknown
  misc_feature (535)..(535): "n" may be a, t, c, g, other or unknown
  misc_feature (547)..(548): "n" may be a, t, c, g, other or unknown
gttgtcgtgctatttgaatgcatgacagtttatgtagctatccttctgttcatggacccctgagctgtttctgtggggctattataaatgtgctataaatattcttgtacagggatttttgtggacatgttttcatttctcttggattaaaaagctaggagtagaattgctaggttttatggtagctgtatatttaactttttaagaaactgcccaacagttttctaaaaccattgtgctgttttgtgttcctgccagcacattgtactctggttgttttttacatccttgccgacaattggtattgtccacctgttgcattttagccatgcttctggatatgtggcggtatctcatggtggtttagtttgcatttccctgatgactaatggacagtacttttcatgtccttttttccttttaattggataggactcctttgtgcattctggacataaaggattgtcagatttatggggcacatatcttttnccactctataacttgcctgttcttannagtatctggtgatganaaaaagggttanntttt

SEQ ID NO: 8343 - DNA, 541 bp, Homo sapiens
  misc_feature (61)..(61): "n" may be a, t, c, g, other or unknown
  misc_feature (401)..(401): "n" may be a, t, c, g, other or unknown
  misc_feature (440)..(440): "n" may be a, t, c, g, other or unknown
  misc_feature (519)..(519): "n" may be a, t, c, g, other or unknown
gcctttcaacaataaacttttatttagctcaggaatctgcaggtctgtctttaagaccagnggttctttgttcttggtctggacttgcctcaaagtcatgcggttacattcacagctggttcttggctgggatgactggactctgcttcatgtatttctcacatcttttcagtacattatcccaggcatgttctcattgcagaggagctatcccagtcacacaagagtttttcacgcttctgtatgtgtcaaatctgctaaaacaacattggggagagcaagtattatggctgaattcagaatcaagagatggagacaggaacttgcctagtagtgagggagacccaaagtcatgtggcaaagaatatgacacaaggtgggatgaaagattcattaatggnctcagtgcatctactagagcaggcaagggtgtctaaccngaatttagtagaatggcttttggtggattttttaaactttcttttgggcccagtgattaaaggtttcaatgaccggggnaaaccaaagttttttttaaaaa

SEQ ID NO: 8344 - DNA, 496 bp, Homo sapiens
  misc_feature (73)..(73): "n" may be a, t, c, g, other or unknown
  misc_feature (141)..(141): "n" may be a, t, c, g, other or unknown
  misc_feature (268)..(268): "n" may be a, t, c, g, other or unknown
  misc_feature (294)..(294): "n" may be a, t, c, g, other or unknown
  misc_feature (350)..(350): "n" may be a, t, c, g, other or unknown
  misc_feature (435)..(435): "n" may be a, t, c, g, other or unknown
  misc_feature (456)..(456): "n" may be a, t, c, g, other or unknown
  misc_feature (459)..(459): "n" may be a, t, c, g, other or unknown
  misc_feature (466)..(466): "n" may be a, t, c, g, other or unknown
  misc_feature (479)..(479): "n" may be a, t, c, g, other or unknown
  misc_feature (482)..(482): "n" may be a, t, c, g, other or unknown
  misc_feature (485)..(485): "n" may be a, t, c, g, other or unknown
ggaatcattggtttaatggttctgaataaatggttaagattgatgtttccagccaagtgagatttgggtttanatatagtttgggcttaagtatcctttatctcagattaaatgagacagtgcatgtaaaccacttagaanaatgcctggaacacattaactttcattactaatgtttttggtcattcttaaacattttcacttctgccaccaccctttatgcagtctggcacatagctgtcactcagcaaatgtgagcaaacaaacnctagagactttagtctgccaggtctntaacatgcaaagccatggggccaggtccatacactccctccactgagaaaaagacnaatggcttaggctacaaggtttgggtcaccaaggaaagctgtcaaataatgaagtgggtaagcagattcctaaaaattggaaccntttcagcagcagtttcattcncanggagacngagtaatgccctnttnaanctggctcacat

SEQ ID NO: 8345 - DNA, 555 bp, Homo sapiens
  misc_feature (480)..(480): "n" may be a, t, c, g, other or unknown
  misc_feature (488)..(488): "n" may be a, t, c, g, other or unknown
  misc_feature (503)..(503): "n" may be a, t, c, g, other or unknown
  misc_feature (507)..(507): "n" may be a, t, c, g, other or unknown
  misc_feature (511)..(511): "n" may be a, t, c, g, other or unknown
  misc_feature (522)..(522): "n" may be a, t, c, g, other or unknown
  misc_feature (536)..(536): "n" may be a, t, c, g, other or unknown
caagctcccatctagttggtttaatcaagaacaggctcgctaatccgtagaaacaacaatgcttgcaatacaaagtagacctcttaaaccaactcaatctatagaagagttgggcatcagtgagtatttccagccataacaacatttattagttctctggtaaacattttaacatttctgaagaaacagcaaagtgggcatgtatctttaatgtggagcactggggacatatctggagacctacaactctgaggaacagagacaagtgatttgggggatattctcgattaacaagccaaagaatcaggaaaatgggctggaagcgggtagccacacacctctctccctgtgtggggcctctaatatgtgactgatgccttccttttctgtgcctttgaaatctcatgcaagattggctataggtgaattgtattacgaaaccatccaagttcttctagattttattggcctatcgcaagnctctcttnttaattcaaaaagcngttnttcngaaggtctttnacccctcttttttnttggggtttaaaaggaagg

SEQ ID NO: 8346 - DNA, 525 bp, Homo sapiens
  misc_feature (21)..(21): "n" may be a, t, c, g, other or unknown
  misc_feature (66)..(66): "n" may be a, t, c, g, other or unknown
  misc_feature (172)..(172): "n" may be a, t, c, g, other or unknown
  misc_feature (221)..(221): "n" may be a, t, c, g, other or unknown
  misc_feature (245)..(245): "n" may be a, t, c, g, other or unknown
  misc_feature (273)..(273): "n" may be a, t, c, g, other or unknown
  misc_feature (290)..(290): "n" may be a, t, c, g, other or unknown
  misc_feature (300)..(300): "n" may be a, t, c, g, other or unknown
  misc_feature (313)..(313): "n" may be a, t, c, g, other or unknown
  misc_feature (394)..(394): "n" may be a, t, c, g, other or unknown
  misc_feature (450)..(450): "n" may be a, t, c, g, other or unknown
  misc_feature (461)..(461): "n" may be a, t, c, g, other or unknown
  misc_feature (494)..(494): "n" may be a, t, c, g, other or unknown
  misc_feature (503)..(504): "n" may be a, t, c, g, other or unknown
  misc_feature (518)..(518): "n" may be a, t, c, g, other or unknown
  misc_feature (525)..(525): "n" may be a, t, c, g, other or unknown
atgttctgactgaagccttgngcataaaacgaccggctggaatatttactaaattctacccccctntaaaattataagcagtatttgaactacttatgctgagctttcttcatgatgaatttggcatggggtttggtgagagaacaaatgttggctttactataaaaaaggntgtgtgatggtaatttaaattttaaaagcttcttgagagagtaattacnttagtgaagttaaaatcagaaagngtacaatttttctttttactaatactgnaaagaaaaagggagacntataatgccnagagttaatttgntctgaaacaattatactctttttggaagcctattgcaatttaagaagaaaaaagaaaacttgcctaacaaaatatcccatnccaaacatatctagtaaattcaattctttcacacttaaaactttatgggaaaagtnttgcaaataanggcatatcatttcaatggacttttatttgccgnaaaaaaccnnctttttattttagnggggaan

SEQ ID NO: 8347 - DNA, 543 bp, Homo sapiens
  misc_feature (435)..(435): "n" may be a, t, c, g, other or unknown
  misc_feature (472)..(472): "n" may be a, t, c, g, other or unknown
  misc_feature (475)..(475): "n" may be a, t, c, g, other or unknown
  misc_feature (491)..(491): "n" may be a, t, c, g, other or unknown
  misc_feature (494)..(494): "n" may be a, t, c, g, other or unknown
  misc_feature (526)..(526): "n" may be a, t, c, g, other or unknown
  misc_feature (537)..(537): "n" may be a, t, c, g, other or unknown
gccaatcacaaaaaacagactttattgaagtatttagcactaaaccccacacaattccagctctgtagctgaggacacagccacttggcaatggcaccaggtgttatacaagaccaataagttaatgtaaaggacgcttaggtgtggagggccagtgctcagccgtctcctggctcagaacaaggcactctgggctccagttaggacactgagaggccagggaaaccaacatgccctggagaaaggggcttagagacaaaccggaaaagcacagcatccaagcagggtattcacgcatggggggcagagtaggcccaaaagttgggggttgctgatgcggtaagagcacagtgagagaaatgccaggtgcatcccttcagcctcctgcatcctcccccaggttcctttgatgggccatcctgggtcttccttggnacccttgtgcaatcgggtcatcggtttcttttcagtnganaaaactgggccttttntanggcaaacccccaaatttttggaaccctttggntttttcaaagntggtcc

SEQ ID NO: 8348 - DNA, 547 bp, Homo sapiens
  misc_feature (478)..(478): "n" may be a, t, c, g, other or unknown
  misc_feature (535)..(535): "n" may be a, t, c, g, other or unknown
  misc_feature (544)..(544): "n" may be a, t, c, g, other or unknown
agcttaaagacatgaaaaacccagtgagtttttattgaatagtctctcttgtgttaaaagtacatattcaggactatactatgttgtatttggaaatattctgatgtgtttaatacaaattcgtagtgtattcagagcattgtatgtgtctcaccaatggtacacatttggattaagcagtaataaggcctataaaagaagaaatgaaacaatagttttcaacaataaatgcaggaagaaaaactgctgatggacccaactgagaaaatgtccttttacactatcccttggtggtcagtctccctgaatctggtgtgcttataattgctgggaaggcagtgtaaacctgtggccattcctatgcatgtctgggaggaccacagccctggtgtggagcactgacaggtttgactttccaccagaattgcttgctcagcttaatcccataatattcctttcccttagatttggtttctgnctcggtaactttttctctctgcatataaaatttcatggcttaaatacttttaagtcngagattggnttt

SEQ ID NO: 8349 - DNA, 551 bp, Homo sapiens
  misc_feature (538)..(538): "n" may be a, t, c, g, other or unknown
  misc_feature (550)..(550): "n" may be a, t, c, g, other or unknown
cattttgaaaaagctatttactttttttccaaatattatcccaaataggtgttttacagataagggtcaatacgaagtcaaacattctacagaagaaaatcgtttttacagacattaagaataattttaacagaagaaaaagctcacatctatctagatgtggctatgttccatgggaaaaatttcagcatccaaagtgcaaagaaaaaatgactgtagcttttcttaccacaaaatattgacaatcttcccttatagcctactctttattgttagttgggatgccaaaggatgatatattgacctttagaagttgggctccactggacaaggttgggggtatgggggccaagcatcagaatgaattcaattttaaaagaaaaactggctttgaccccaaatgaacccaaagttcagccagcggcacatcagagataaatacgagttgtactttcacatttacaagggtgtgccctcaacactattaaagacctaatcattcaaatcaaagctcccatcttccattactaggtcttgncccaaagggatnc

SEQ ID NO: 8350 - DNA, 541 bp, Homo sapiens
  misc_feature (482)..(482): "n" may be a, t, c, g, other or unknown
  misc_feature (492)..(492): "n" may be a, t, c, g, other or unknown
  misc_feature (498)..(498): "n" may be a, t, c, g, other or unknown
  misc_feature (512)..(512): "n" may be a, t, c, g, other or unknown
  misc_feature (514)..(514): "n" may be a, t, c, g, other or unknown
  misc_feature (522)..(522): "n" may be a, t, c, g, other or unknown
  misc_feature (532)..(532): "n" may be a, t, c, g, other or unknown
ggggctatatttacaaattttatttttttatcccaaaaatacatataaatgaaaacctgctcttcaaatgcagggaggcctttgcctaacattgtcatatgaaaatcagtatcagctctttaacacacaatttacatatatacatacatacacactatatgtaagcagcaaatactttgctacttacacatattcctctggtggaaaactaggacactgggaaattcccctgctttccaaccttgggaaggtaaatacaacctctctcaacaactttttaaaggatgaaatgtgtagaaacatgtaaacaacacaacctgctttagatctatacatgttattagaataaagaaagaacgctgtcacatcagtgacagtttatttctcaaagaaaaaaagagataacatttgaataaaaatgcaaaactgaagtacagttaatatgatcaaaattgttgtgtcatgctccatggagaaatcangaattctttnccaagnacagattcccaagncnatttcaancactttggangctgaatta

SEQ ID NO: 8351 - DNA, 564 bp, Homo sapiens
  misc_feature (562)..(562): "n" may be a, t, c, g, other or unknown
gatgcacaaaggttttaataccttggctttaatgatttttcaaggttaagaaacaaattcaaattggttggagcttcaactcagtaattacaatcacaatgcatctctgaaaggccctgcatttggaggcagagtaatctgcaaagatgatagtttttacatatgtcctgttacctacaccaatataattactacattatcttataaagacaaacagttgcttcaaactctttaaaaaatatatatataatgagtttcccaaagactcgagtctatattcaaagatgagtaaaaaaaaatccattacttccctagggtcactttcttcctttactcctgcttaaatgcaaaagctgatagtttctgatttgtagaaaaatctaaaggtttctgctttttagacaaattcaggttcttttttgctttttcttcctggttttctgtttcatcactttcatcaaccacacgttttcgcttctttgcttcagttccttcacttggccggttctcctttggctttggtagcccacaccctttctttctttaagtgacaatacctctnaa

SEQ ID NO: 8352 - DNA, 552 bp, Homo sapiens
  misc_feature (484)..(484): "n" may be a, t, c, g, other or unknown
  misc_feature (514)..(514): "n" may be a, t, c, g, other or unknown
  misc_feature (520)..(520): "n" may be a, t, c, g, other or unknown
cagagctaaacacagtaatcatttattaattcctgagaaccattatgaatcatataatagtttaaaagagattcaggattaccactttcaaatatatccactgacgcttccaaagtagtttaatgaatgaataaacctatttgtttgtatataaatggtatacttggaagagctcaaaacttttgtattacttatatgtgcacatacattagacacttccctatcatcatttttactcccttttttcttagcaagccctttctttccaagtaaacttcagtcagactccctctggctgcccacaaatcctcaatcactgttggtccatgaaggtttactgcgttcatttaggtgctcactcctccctgaggctcattccctcctaaaacttctgagcaccccggaattactggccccatgtctctctctctcctttaccaagacagctgctgaggctgctgctatgcaggtctacctgcccctntctgggcctctgcttgctttacaccaatgngcctancccaggtggcagtatctgggcccctccatttt

SEQ ID NO: 8353 - DNA, 555 bp, Homo sapiens
  misc_feature (454)..(454): "n" may be a, t, c, g, other or unknown
  misc_feature (485)..(485): "n" may be a, t, c, g, other or unknown
  misc_feature (489)..(489): "n" may be a, t, c, g, other or unknown
  misc_feature (532)..(532): "n" may be a, t, c, g, other or unknown
  misc_feature (543)..(543): "n" may be a, t, c, g, other or unknown
  misc_feature (551)..(551): "n" may be a, t, c, g, other or unknown
ctttaaacctttttttatttagagatttttctggtaaggagatataccataggaaagcaatttcactggcagtgaggtatgtatatactctaccaaaatactccttattttaactgtttttaactttatttacatacgaagcaaagaatcaatgcatatccttggttcaactatagtattagccatactacatgaaataaaatggtgcttgcatacaaaaacttgttgtttgtaaaggaatctgatttcagattaaaatacctaattgtttttggaaaaaatttttaaaaagaatcacaatttatcatgaccaagacacctgcaccatattttccattcctcacagcacatttatttcagtaatcctgttatgtcggttcttagcatgagcatagtgttacacgattttcgtacatataatcacatccaaaacaagctctaaaatttaaattgnaaacattctcatatgtagaaatattttaatngggnattaaggtttgctaactggtcaaatttggaagatatttaatgngacgttatctnaactgggnaggg

SEQ ID NO: 8354 - DNA, 552 bp, Homo sapiens
  misc_feature (441)..(441): "n" may be a, t, c, g, other or unknown
  misc_feature (507)..(507): "n" may be a, t, c, g, other or unknown
  misc_feature (526)..(526): "n" may be a, t, c, g, other or unknown
caaagagtgaaatttatttatttggaattcagaaattccaggttgtatgacatcagttactcaataagtgtgaattctccaactcttcttttaatcccattttagaatttaatatagagatctctgattggcaggaacactagaaataaatgttccatggccagtagtgcaaatgggggattgtaggttttgaaaaaccaccctaagccatattaagggggttggaagaaccatcgaagcctaaggcatagaagaaaatttggggttaagaaagatgaagaacaaaaaacagctttattgcttatacatgaccaagaaaaggaaaacatggcaaaaaaaaaaaaaaaaaaaaggcaagatgtgtattccttgcaaaagaacaagcctgctaacttgggaggaagggaaggtcaggacccaaatagagccaatttcctgganatggcctgttctactggcacattttcctgagctgggcttaaaactttcagggcctttagggcccanaaccatgctgctaaaaatntttggccaagttctttcacaaaaaat

SEQ ID NO: 8355 - DNA, 244 bp, Homo sapiens
  misc_feature (238)..(244): "n" may be a, t, c, g, other or unknown
aaatttgactcattcaaatcttggcaattagcatgtatagtatgttatgagagagagagagagaaaattagcagaaatggaggaaaacatattacatcctaaataccaccaaattgccaaaatacacatttgggtagtaatctccagagaactctctggaggcacagcatctatcatgctgatttccctgaacaatattacagaatagccctgtgtactttctttgggggggggaggnnnnnnn

SEQ ID NO: 8356 - DNA, 535 bp, Homo sapiens
  misc_feature (145)..(145): "n" may be a, t, c, g, other or unknown
  misc_feature (219)..(219): "n" may be a, t, c, g, other or unknown
  misc_feature (257)..(257): "n" may be a, t, c, g, other or unknown
  misc_feature (300)..(300): "n" may be a, t, c, g, other or unknown
  misc_feature (302)..(302): "n" may be a, t, c, g, other or unknown
  misc_feature (408)..(408): "n" may be a, t, c, g, other or unknown
  misc_feature (489)..(489): "n" may be a, t, c, g, other or unknown
  misc_feature (494)..(494): "n" may be a, t, c, g, other or unknown
  misc_feature (509)..(509): "n" may be a, t, c, g, other or unknown
  misc_feature (516)..(516): "n" may be a, t, c, g, other or unknown
  misc_feature (525)..(525): "n" may be a, t, c, g, other or unknown
  misc_feature (530)..(530): "n" may be a, t, c, g, other or unknown
  misc_feature (534)..(534): "n" may be a, t, c, g, other or unknown
aaacaggaacttaggttaatttaatagaaaaaataaaatatggaataacattgattttggccagtatcagttacaaccgttctactatattttacaaaaaaacaactgaacattttacacttgtacagtatttttcagtaaaagnggatttggatttaacaatgggtcactaattgaaaataaaaagacaaaagaaaacagaaataggacttttgtctntagaaggttagagcatttgttgagtctccaaactttgnactatccattacatatatctcattatgaatatatatatttatncntaatatataacattaacttaaactttgaaagcattatgttctagttaataatgttatgtagataaatgaggcagtaacacactagtagttaaaccagtatttccgngacgtgcacctgcatggtcagtgggaaatggaatgcacgctggtagaccccagtgaaatttggtggcatggtgatgggtantccgntccaaaaccggcctnattttanctttctatnaatcncggna

SEQ ID NO: 8357 - DNA, 563 bp, Homo sapiens
  misc_feature (320)..(320): "n" may be a, t, c, g, other or unknown
  misc_feature (397)..(397): "n" may be a, t, c, g, other or unknown
  misc_feature (443)..(443): "n" may be a, t, c, g, other or unknown
  misc_feature (468)..(468): "n" may be a, t, c, g, other or unknown
  misc_feature (470)..(470): "n" may be a, t, c, g, other or unknown
  misc_feature (527)..(527): "n" may be a, t, c, g, other or unknown
  misc_feature (534)..(534): "n" may be a, t, c, g, other or unknown
  misc_feature (550)..(550): "n" may be a, t, c, g, other or unknown
gagacagagtctcgttctgttgcccaggctggagtgcagtggcacaatctcagctcactgcagcctccgcctcctggttcaagcaattctcctgtgtcagcctcctgagtagctgggattacaggcacatgccacaatgtctggttaatttttgtattttttgtagagacagggtttcaccatgttggccaggctggtcttgaactcctgtccctgcccgcctcggcctcccaaagtgccgggattacgggtgtgagtcactgcacccagcctaagttgctcttttgaatcacctaattgcttgtagaggagcaatggangggcacacaagaggggtaaagcacagagaacatttcagaaaatgcaggaacctttcttttgaggcacaacttttgtnacagggcaaccccacccaaggagaaaccagtcagaggccccaactngaagctgaatgaaggacgatccctntncctggcctggggagcctggggtcaccttgcagacaagatggtccaggaattttactntgacttntggttgaatgagcctnttttacggggggg

SEQ ID NO: 8358 - DNA, 558 bp, Homo sapiens
  misc_feature (467)..(467): "n" may be a, t, c, g, other or unknown
  misc_feature (488)..(488): "n" may be a, t, c, g, other or unknown
  misc_feature (511)..(511): "n" may be a, t, c, g, other or unknown
  misc_feature (518)..(518): "n" may be a, t, c, g, other or unknown
  misc_feature (545)..(545): "n" may be a, t, c, g, other or unknown
  misc_feature (553)..(553): "n" may be a, t, c, g, other or unknown
  misc_feature (557)..(557): "n" may be a, t, c, g, other or unknown
caagtgtagtcacagtttatttctgatgtggctgaatctagggacaggcgggctgggctgagtggggggcgtgtcggcgatggggctagaactccaccttgcaggccgggaaggcgtcatcctgcatggacaccatgctgttgctgcccaacaccgtgatgcccagcgcctggtgccgggcgtgcgtctctgcgtaccacgtatgcatggccaccgagtcgaaagtggggatcagggtcacctgcaggtcacggtcccaatgctgcttgctggccagtagcgcgtccaggacggcccgcatgccttcctccttgcgctggtcctggccactgatgacgtagcagagcgcgcgcacgcgctggaagaactcctcatccaccaggtgggcgctgctcccgctgggcaggtaggccaggtccaggtagaccggggacttgggtggggtggctgaaccccggcccggctgntggcttacccccgacggcctngaatggcaatcttggggggttangactttntggaaagggtgcccggcttccttttantgggttanttcng

SEQ ID NO: 8359 - DNA, 558 bp, Homo sapiens
  misc_feature (440)..(440): "n" may be a, t, c, g, other or unknown
  misc_feature (501)..(501): "n" may be a, t, c, g, other or unknown
  misc_feature (555)..(555): "n" may be a, t, c, g, other or unknown
  misc_feature (558)..(558): "n" may be a, t, c, g, other or unknown
agggaaaagtatatttactagacttccataatccatacttactttaaattcaatctagaaataacatgactcatattaggcaatatactttgaagatctgtacaacatagtaatcacagcagggtcttgctaactcacaaatttagcatacatgctgcaaaaacatctctcctggagtcccaagggctttcaaatgttccaccaggggcagtcaagactagattcacggtgctctcttcatcatgcgcacaaaatgtgttttcccataacaccatattatcacaagtctatgaacaattctggttagctaaggtaggcagtatagaactctttacaaataacagtatttcaattatgccatgtaagtaaacaatttgctgtgaactgtcctgtgtatctaatcatttaatacattgcttctataagaaaatactatttgntaaattttagtcataatttcattggttctcatcatagactgcagatgccaacattaatggngaaccaaatggttaatctcaattttctttgacattttatgctttggaaattcanaan

SEQ ID NO: 8360 - DNA, 561 bp, Homo sapiens
  misc_feature (15)..(15): "n" may be a, t, c, g, other or unknown
  misc_feature (39)..(39): "n" may be a, t, c, g, other or unknown
  misc_feature (389)..(389): "n" may be a, t, c, g, other or unknown
  misc_feature (493)..(493): "n" may be a, t, c, g, other or unknown
  misc_feature (512)..(512): "n" may be a, t, c, g, other or unknown
  misc_feature (522)..(522): "n" may be a, t, c, g, other or unknown
  misc_feature (552)..(552): "n" may be a, t, c, g, other or unknown
ggaaattctttacangaaattttatttgagatctcaagnccttataaaaagtgcattacatcaagattgcaaaagacactttttaaatgagagacttctatctactcatccattttaccctatgattcatttcctaccctaacagaaatgatgaaacagtttttctttcttccttttcttcctcctgctttgaaagggcaactgtcatgagggatatcttaacagaatgtgccaattaatccttgccaggagagcagtagcttcctactggctaaatttagagagcccttggcattccttttggtgtggctcaaagattattacaagctgaatctaaaagattgcaacctactacttgcaatctgtctccctgggctcctcttttactnacaaactccactctaaaacaaccttaaattttaagcactcaataattgctttagaaatgaagggatctaaaggtaattaccttacccttgcaactattttctgnataagaatcttcaaaggtnataaaaattntccggatgaagaatggcctaatcctaaaanggggtggat

SEQ ID NO: 8361 - DNA, 556 bp, Homo sapiens
  misc_feature (474)..(474): "n" may be a, t, c, g, other or unknown
  misc_feature (476)..(476): "n" may be a, t, c, g, other or unknown
  misc_feature (500)..(500): "n" may be a, t, c, g, other or unknown
  misc_feature (552)..(552): "n" may be a, t, c, g, other or unknown
agttagaaccagaactttattgtagcggatacactttctgacctatcatgagtatacacatctgcgaagggaaaccgcgcggcgacagcgtgaggacatcccctgggcgtgagcgtctgtccgctgtctaaacagagcagctacagggacgggacatggaggatggccacacatagcacagccaccagtgtcctcagaactagcagtcagggtcacagaacagtattcaaaatgattgcccacctgttttagaaatctaaaattttacatgtaactaagagcaaagtgctatgtgggttttagaccatgactgtttgtttgctctcctgccctaccaccaagcaaagcagcagggctcctgggggagagggatttcaacccccctgatggcagggggtgctctggggaggagagaggagagaacaggctgttttgggaaaattccagcactttgacttcgggccatgcgtcttntnctggacgttctgagtacggatcgntaaggcctctggccgtttccaaaaggagtggcaaccggcttgagggaacctnttaa

SEQ ID NO: 8362 - DNA, 547 bp, Homo sapiens
  misc_feature (478)..(478): "n" may be a, t, c, g, other or unknown
  misc_feature (496)..(496): "n" may be a, t, c, g, other or unknown
  misc_feature (508)..(508): "n" may be a, t, c, g, other or unknown
  misc_feature (512)..(512): "n" may be a, t, c, g, other or unknown
  misc_feature (529)..(529): "n" may be a, t, c, g, other or unknown
  misc_feature (534)..(535): "n" may be a, t, c, g, other or unknown
gtgattttgacatttattaaaaagtatttgtcatcagtaaccattttggatacttgcaaatattacagtaaaactctgccttaattcacagggcaggagtagaaaatcaattatgtaaaatacagtgttccatttttgcaacattaaccagaaacattgtttatcagtttgtactgatatttaaagtgcacacatgggtacatatacacacacacaaagctaaacttcagcagatggtataatgtatagagaccaaacgttaagaaatgcagcacatctctgctcaagatggaacaaagggtgggaactaaccccaatagggttacaatcaaattaatgttatttcagatcatcataatgcttattgttctacatttcaaatatttacttgaaatgattttattaagattacttgcaggatttctccttcaaatcattttaaggtttaaaaaatgccttaaaaatttcaaacctttanctttacatctttaggtanttagcaaaagtnctgngcccctacatgggttgnaaagnnccaatttggaga

SEQ ID NO: 8363 - DNA, 462 bp, Homo sapiens
  misc_feature (430)..(430): "n" may be a, t, c, g, other or unknown
  misc_feature (440)..(440): "n" may be a, t, c, g, other or unknown
  misc_feature (442)..(442): "n" may be a, t, c, g, other or unknown
  misc_feature (444)..(444): "n" may be a, t, c, g, other or unknown
  misc_feature (446)..(446): "n" may be a, t, c, g, other or unknown
  misc_feature (455)..(455): "n" may be a, t, c, g, other or unknown
  misc_feature (457)..(457): "n" may be a, t, c, g, other or unknown
cccaaattaccaagaacctttatttaacctaccaaactaaaagagcaataaaataaaaatattttccatccacaaaacggttttacatcaactacactgaccaatacagagaaaagggaaatccctgaggaactgccaacaataaataatatacttaaaatagaatgttctgagtgtaaaggaacatttcctgagcccgttcagtttggggaaatttggccctttgcaaaattcagtttctcaaaaggatatccaactgatgcaagtttcctgtcatgacaagaagctgtcatgttcagtagcaccttacacgaaaggtggggaaataggccgggcgcagtggctcacgcctgtaatcccagcactttgggaggccgaggcaggtggatcacctgaggtcaggagtttgagaccagcctgccaacatggnaaaaccctgntntntnctaaaaatncnaaaaa

SEQ ID NO: 8364 - DNA, 558 bp, Homo sapiens
  misc_feature (487)..(487): "n" may be a, t, c, g, other or unknown
  misc_feature (501)..(501): "n" may be a, t, c, g, other or unknown
  misc_feature (512)..(512): "n" may be a, t, c, g, other or unknown
  misc_feature (520)..(520): "n" may be a, t, c, g, other or unknown
  misc_feature (523)..(523): "n" may be a, t, c, g, other or unknown
  misc_feature (537)..(537): "n" may be a, t, c, g, other or unknown
agaacaaaatggttttaatcaattgcgtcaccctcactctcctgggagcggagcaacaaaaaggctcggctcctgcccccagaggacagtaaggcttatgtgtctctccacactgcagggcccaggctgggcaggcagggggtgggaagcaggacagggggcagggagggagggtgggaggcagggaggaaatggcaggtggctggaacacaagaaagcaaaggggacccagctggtccttgggccccagggcccagccccaatactcctgctctcccttctccctggctagagaaaggtcacggagaagagacaggggagcaggtcccagcagcaggagaagcagcagcagctgtttccttcaccaataaatatacttcattaccaagctagaagagaggggtgggaagagggactggggtgggaaggaagggggagaaactgccacctgtgttgctgggattaaagcaatgagatggtgccagancccccaccactatnctaaccttcanttggcttnttnaaactgtgaaaaanctttttaaattggcccccttt

SEQ ID NO: 8365 - DNA, 564 bp, Homo sapiens
  misc_feature (442)..(442): "n" may be a, t, c, g, other or unknown
  misc_feature (462)..(462): "n" may be a, t, c, g, other or unknown
  misc_feature (475)..(475): "n" may be a, t, c, g, other or unknown
  misc_feature (485)..(485): "n" may be a, t, c, g, other or unknown
  misc_feature (528)..(528): "n" may be a, t, c, g, other or unknown
  misc_feature (545)..(545): "n" may be a, t, c, g, other or unknown
  misc_feature (563)..(563): "n" may be a, t, c, g, other or unknown
aagggtgaagaggagttttatttagtgttagaagagctcagaggagtgggtagctcctctctggagacagattgtcccatgagctcaatcattcagctctcaacagagaggaggccctggagagagtggctcctctccgcaggcaagtcattccaatgtctctgcaggtctctgaagctcgcagcagagtgtagctcctctctgctggcaggtggtctctgtagctttcagcggagaaggtactcctctctgtagctggtcaccccaccgtctccagctatcagcagagagggtactgctctctgcagctggtcatcctgtcccctcgtctctaccatcttcatcctctggctattctctgcgctgctctggctgagcctagggtttttatggacctcagcggggaagaagtgtgtgctgattgggccattggcaggcccanaaaaggctccacgaagtttncactctggcaaanggactggcancccacccccagaattcaaggccctcctggcctgaaggtggggncttactggggaccccancccttcttcctgttgcant

SEQ ID NO: 8366 - DNA, 568 bp, Homo sapiens
  misc_feature (511)..(511): "n" may be a, t, c, g, other or unknown
  misc_feature (513)..(513): "n" may be a, t, c, g, other or unknown
  misc_feature (524)..(524): "n" may be a, t, c, g, other or unknown
  misc_feature (544)..(544): "n" may be a, t, c, g, other or unknown
cagactttaaagtttttattattttatattacgccatgacttgcatggaatgaccacaaagtggcataaccttcctggtcatgtaacttaactcatcaggcctggctagaaagtgagaactcccagatacacaatttagtccaccagaaacatgggagggagcaaaggaaagagaaagagacagaggaaggcacaatgataaataattatctgcctcttctctaataggttagtggctcgttctaaaaatgatgataatgtcattgaatacaatctctgattcatggtcaaggtctttttgttaaaggaaaggaggtttcttagaaggactggatctaatcaatacatatttgatgttcaaatgtttgactttcaaacaaaatttttacagccaaaataaaatgaaagaaatgatactgacaagctctcttgccatgcccttgtcaaagcacccacagaaagaataagtgcaaaaggtacaaaggcccttcccttcatccaaggaaacatntncatgggagttntgcagccgacttcccttccntacccaaccccacaccttaggtca

SEQ ID NO: 8367 - DNA, 566 bp, Homo sapiens
  misc_feature (265)..(265): "n" may be a, t, c, g, other or unknown
  misc_feature (480)..(480): "n" may be a, t, c, g, other or unknown
  misc_feature (534)..(534): "n" may be a, t, c, g, other or unknown
  misc_feature (540)..(540): "n" may be a, t, c, g, other or unknown
  misc_feature (546)..(546): "n" may be a, t, c, g, other or unknown
gaaataacattgtgacttaaaggatttctaggtcctaaaatctggaaaagggatctggaaaaatttggactccatgagtagtttggattcaatctctctgtgcttttttttttctttataacaggaatgggatggggggtggggggaataaaacttcttatgctatataggtcatgtactgtgagaaacaagaatacaaaactatgggtttaaaaacaacatatacagaaataatcgccaatctctgtctacctccacatcattntgtcatagaagttcattgtgattaaaaagtttaaaagtttttaagagaaaaggtagattgagaagtagaaaggaagtaggaaggaaattgtgcaaaaaaagaaacagtttattagatactctgaccctgggacacactgttcctttccccaaaatattttccgtgataggaactgaatttaaaattatcaccttggtagaattgcctggaagatncagcaactaaaacctggattaatgcccactttcttaaaaaatgcccattaactnttaacnctggcngaaaaatggtaattaatttt

SEQ ID NO: 8368 - DNA, 581 bp, Homo sapiens
  misc_feature (400)..(400): "n" may be a, t, c, g, other or unknown
  misc_feature (457)..(457): "n" may be a, t, c, g, other or unknown
  misc_feature (463)..(463): "n" may be a, t, c, g, other or unknown
  misc_feature (483)..(483): "n" may be a, t, c, g, other or unknown
  misc_feature (490)..(490): "n" may be a, t, c, g, other or unknown
  misc_feature (553)..(553): "n" may be a, t, c, g, other or unknown
  misc_feature (570)..(570): "n" may be a, t, c, g, other or unknown
  misc_feature (581)..(581): "n" may be a, t, c, g, other or unknown
aaattgccaatttatttttctacccaatccagtatcaacgatatacaaaaggatataaacagactatcatgaatatttacaggatgacacaccaaacaattaccaaggaacaaatcctgcaaagtaacaaattgttgcttatccatgtccactcaactgtacaaggtttatttctaggacaatttcccagttctctgggaaggaagttctgtggatttataccttccataagggtcaagcaaacatgctaagagctgataccatcatgtttttatactaacagccgagaaaggcttttaaagaacactctctttcaggccaatgttacagcattagtgggctcatagacaggatgtgacttcatcaaaggaaatgcttctctcctcttggtctccctaangtcctcctcctagtacacaggaggagttccccataataacaccctgggttccaacanaatggnggggtagattatcaaccccncaatggngaaaaagaaactggacccccttaccttaccaaatccattccagaatctgggggaggcagtttncaaaatttttaacaggncgacccttttn

SEQ ID NO: 8369 - DNA, 568 bp, Homo sapiens
  misc_feature (230)..(230): "n" may be a, t, c, g, other or unknown
  misc_feature (330)..(330): "n" may be a, t, c, g, other or unknown
  misc_feature (381)..(381): "n" may be a, t, c, g, other or unknown
  misc_feature (387)..(387): "n" may be a, t, c, g, other or unknown
  misc_feature (402)..(402): "n" may be a, t, c, g, other or unknown
  misc_feature (435)..(435): "n" may be a, t, c, g, other or unknown
  misc_feature (484)..(485): "n" may be a, t, c, g, other or unknown
  misc_feature (493)..(493): "n" may be a, t, c, g, other or unknown
  misc_feature (507)..(507): "n" may be a, t, c, g, other or unknown
  misc_feature (510)..(510): "n" may be a, t, c, g, other or unknown
  misc_feature (562)..(562): "n" may be a, t, c, g, other or unknown
  misc_feature (564)..(564): "n" may be a, t, c, g, other or unknown
gagattcgaccacaaacagttttaatggtctggttttctccctagttccccaactgtttgttagtattattattactacaagaataaaggattcctgagagcctgtcccctcctctcctgtggcccccttgacaggactcatccctaccaaccccccacccccccgccccggatttctggggaaaaaaagaagtgaaaggcactgcaggggtagggggcttgagtgccantgagttggggttgggcgggggcgggggcggtggtgggcactagggcagggcccggcctagaggaggaaagttccagtccatgcctgaaggaattgtgganaggtgtgtccatccatgacacccccatcagtccttccctgaacctgtctancaggcntacctaagtcccatnctcccacccccaggcccacactgggggttctgnagcaggagcataaaattaattagtgttggctcacaaaggaggaatgganngtccattntattggacttcaanggncaaaacccaaagggagggtgcaaaaaactaggataatcctcaaatgctcttntnttaa

SEQ ID NO: 8370 - DNA, 560 bp, Homo sapiens
  misc_feature (500)..(500): "n" may be a, t, c, g, other or unknown
  misc_feature (517)..(517): "n" may be a, t, c, g, other or unknown
  misc_feature (526)..(526): "n" may be a, t, c, g, other or unknown
  misc_feature (539)..(539): "n" may be a, t, c, g, other or unknown
  misc_feature (549)..(549): "n" may be a, t, c, g, other or unknown
ccttcatgagatacttttatttttatctctttctctactcatgtgcttaactggtgaaatgattctgtagaaatagatccttctgattctgcatctcatttccttatggcaactacaacaggaggaatccagctggaaatgccactaaccccacaatccagcacctgagagaggaagccagtcggagcgccgtgctgggctcactcactctggcctgcgcactggggttgtcacatccattttccactggctatggggaataatatttggttaaggctgttgaagcccttgcttttgaggttttacattatttggtaatgaaagccgttttttcttccttccccaggcttatgtgaagaagcccacgcccactctcaacaaaacagactcctccttgggaagcatctccagccctgggacagacacctcgctgcgacttagggagggacaggattagcccaggaataaaagcattttagaaatggtttctgcaccttcanagctcaacaattcttgnaccttttanatggaagggatcnaaagtgacanaacctgttttt

SEQ ID NO: 8371 - DNA, 450 bp, Homo sapiens
  misc_feature (189)..(189): "n" may be a, t, c, g, other or unknown
  misc_feature (374)..(374): "n" may be a, t, c, g, other or unknown
  misc_feature (380)..(380): "n" may be a, t, c, g, other or unknown
  misc_feature (397)..(398): "n" may be a, t, c, g, other or unknown
  misc_feature (403)..(403): "n" may be a, t, c, g, other or unknown
  misc_feature (410)..(410): "n" may be a, t, c, g, other or unknown
  misc_feature (418)..(418): "n" may be a, t, c, g, other or unknown
gaaatgatctgtctttattatgtcatcagaaaacaaaaaaatcccccgagtgtaaacaggagaaatgtgctggttaagttactcatcattatcttattattaacaaaataaagcactatctatgtttacagtcataaaaaaagaaacagcctggagagaagtgggggctttgaggatggagagaagacnggggcagacacagactccacatctggccctgtgggatttggggttcccatactgatccaagggctatttagatcttcagagttaggtgacaatgggatttgatttccttagggaacaaactttgtgaaactgatcagaggctgagatccagtccctagtattaagtgggggaggtgagggcaggnaatgtnaggggctgggctgggtnntagangctgaancccaggantcttttcacctcttccaagaatggggcccccc

SEQ ID NO: 8372 - DNA, 531 bp, Homo sapiens
  misc_feature (489)..(489): "n" may be a, t, c, g, other or unknown
  misc_feature (511)..(511): "n" may be a, t, c, g, other or unknown
  misc_feature (530)..(530): "n" may be a, t, c, g, other or unknown
acttagaatatttatttattctctgacatgacaagacacaaaaagttacaacttcttaaaactcttcaaaagaaaaaaatataattctgtaagcagcagcagcagcttccaaggttctgatgtgacgggtggggcagctcccaggagcaaccgtgaactgggggggtccaggcctgagccccaggtagtgtcgctgggaaggggcctctgtggagggccccggttttggggacacagcaccagcacatcagggtctgtcaccaacacgatcacatggccagggcggggcagggagagcttcggctcacagcagggatcgcccggtggcaggggggatggggcttctgaagtgtggtcaggggccttatgcccggaggcgggaaggatggggcttctgcagtgtacccaggggccttatgcagaggctgaaaaaggagggtgggccctgaaaaggacttgggggtgtggcaacttctggccttccttcanaacaaggcaagcacccttaagnttcacacttgtcccaatgnc

SEQ ID NO: 8373 - DNA, 525 bp, Homo sapiens
  misc_feature (357)..(357): "n" may be a, t, c, g, other or unknown
  misc_feature (395)..(395): "n" may be a, t, c, g, other or unknown
  misc_feature (464)..(464): "n" may be a, t, c, g, other or unknown
  misc_feature (477)..(477): "n" may be a, t, c, g, other or unknown
  misc_feature (490)..(490): "n" may be a, t, c, g, other or unknown
  misc_feature (520)..(520): "n" may be a, t, c, g, other or unknown
  misc_feature (522)..(523): "n" may be a, t, c, g, other or unknown
ctttaaagttctgttgtttattttacacaaaggagaccaccaacatttgccataaattcttctaaactctttaagaaggccatcttctgcttccgatccagcgtaggaggagtgctgcttgcagtgagcttgttgaaggcatctgctaatctctggtaaataactgggtcttgctgacttgatagtaatgtttcgaccagttcagaatattcagcctggtgcaaacacaccaacgtgtagaaagcttcgccagccgcagtggtcatctctgtgttgtgcttttgcaaaaccagcatatcaaaaaccagcttaagaaagtgccgtgttgctagaaaaagtggtgagtctgtttcttgngcttttgcacactgttcagctaacggtgtcaaggcctncaggcaaagctggcaaaccttcgaactcattgatgcattcctaattctagggagtacatcagacttttnaacagatcctcangaaacttggggantttttcagggaaaatttccccgattaatgngnnta

SEQ ID NO: 8374 - DNA, 521 bp, Homo sapiens
  misc_feature (440)..(440): "n" may be a, t, c, g, other or unknown
  misc_feature (460)..(460): "n" may be a, t, c, g, other or unknown
  misc_feature (489)..(489): "n" may be a, t, c, g, other or unknown
  misc_feature (496)..(496): "n" may be a, t, c, g, other or unknown
agacttttagaaaccttgtttagtcggtaacaacattcagtagataattaagggaacacactgcacaaattcatttcccacttagcctgaataagcagtttgactacttaatggtttcttattgtaagttttcctatggccagggaaaacagctttgtaagtagtccatctttctaaaactgaggtaactttctaaacattaaaagtctttagtaacataggggaaaaattaaggcttaattacttagaaaacaaaatatcacaattacagaagcacatttaattacaaaaattataaaattatattaactatatgtagtttttaatatctagtatcaaaataccttttctactttggtaactaaatttttgagattaagaacaaactagttcaatcattctcacatacaaaaatttcatggttatatttattaaaaacnaaataatgccaggtctggtnaaggtaccatttttccccagataatattnggaatgngggaaccgaattgtaaaattcaatt

SEQ ID NO: 8375 - DNA, 527 bp, Homo sapiens
  misc_feature (219)..(219): "n" may be a, t, c, g, other or unknown
  misc_feature (323)..(323): "n" may be a, t, c, g, other or unknown
  misc_feature (350)..(350): "n" may be a, t, c, g, other or unknown
  misc_feature (373)..(373): "n" may be a, t, c, g, other or unknown
  misc_feature (402)..(402): "n" may be a, t, c, g, other or unknown
  misc_feature (481)..(481): "n" may be a, t, c, g, other or unknown
  misc_feature (485)..(485): "n" may be a, t, c, g, other or unknown
  misc_feature (514)..(515): "n" may be a, t, c, g, other or unknown
  misc_feature (519)..(519): "n" may be a, t, c, g, other or unknown
  misc_feature (525)..(526): "n" may be a, t, c, g, other or unknown
gggatgggaaaactttattaggtttggtttccagcttcggccacgcgggctccgcccgccccgagctcgggtcacggggcgcccccgccgccctcctcgtcgtcctccacgtcgaggcccgggatgccgcggatctggcgttgcagcagcccctcccagcaagggcacggcgccctcctcctcctcctctgggggcggcggcggtggcggcaacacggncccgggggctggctctgggggcacgggaggctgcgccggcacgccctctgcaccctccgagatccctgccggttcgccctgcgccccctcgtccagggcaccgncctcagcctgctcctgctccttctctnctcggggctgtcggtgaaagggntctcgcccttcaggtaacgctccagcttnttgctgatgaagcttggtgttgagaatactggggggcaccatgaaggaggactttttggactggtccaatatgagcctnccgnttccggttgggaatccatgggctttaaanncttntggganna

SEQ ID NO: 8376 - DNA, 527 bp, Homo sapiens
  misc_feature (425)..(425): "n" may be a, t, c, g, other or unknown
  misc_feature (493)..(493): "n" may be a, t, c, g, other or unknown
  misc_feature (495)..(495): "n" may be a, t, c, g, other or unknown
  misc_feature (509)..(509): "n" may be a, t, c, g, other or unknown
aaagaaaaacaaaaagaactttactttcctatgttaatacaggtcaagagaccctttcttctcaaaagggttggtaacaccagttcttagcaataaacataaggcacttgtttagattacaacatcactccattttttccacttgtttttctaaccctgtttttcccccacagtatcatttgaaattaataggatgaatgaggcaaatatgagacgatccagttgatactactcagagcaagatagtacagtacagtgtttcaggggtgatgtctggacataaaatgaacccagtcaaggtcctctgacaccaatgtatccactatcaagtaaacctgaaagaaaataaaagatttattcaatagttccagtaaaattgggttggaatacaatacacattaggaatttagcttctcacgggtggnatctgcatcttaagaggtctgagtcctatgaatattcattcttagacaattcatcttttggaccattntnaggaccaattaaangaattcatttcaatatac

SEQ ID NO: 8377 - DNA, 526 bp, Homo sapiens
actgtgaaaagtttatttgcatcgattaattcctttttttcaccatcataagagatattgacatttgtttgctatttgtgatcagagaaaagacattttggaatggataatctgtttctaccattctttaaagaaaaaagctttaaaaacaaaattcaagtgcaaaaatttccagtagtcttcctacctccagtgtaccccagcaaaatattcatagctgtgctgttaggaaattaatcaaccataagcttcaattacccactttttttcttccctaaggtgtctgtacttatgaaaacatatatagcatattcctgaaagtataccatattcctacaaagtaagggagcctagaagcaacagtgatcactgcctttcagtgtctccaaccccatgtaaccactgataggataattcagtctctaagtcatttgatctacccatttcctaaatacagcgatcaacttctatttaacaaagctagtctggggttactaacacgttcccccaaaatcaatagggcctg

SEQ ID NO: 8378 - DNA, 531 bp, Homo sapiens
  misc_feature (474)..(474): "n" may be a, t, c, g, other or unknown
  misc_feature (489)..(489): "n" may be a, t, c, g, other or unknown
  misc_feature (501)..(501): "n" may be a, t, c, g, other or unknown
  misc_feature (515)..(515): "n" may be a, t, c, g, other or unknown
attttaatcagatatcaatttattatggaaccattcattttctgctcattagcactaaacattttttttgggtcaagtatccatgtcatattatgtagaaaatggtccttcatgccaacagacttacatgtataaaacatgaacacccccaaactctggggagtattccagaatggggcaaaagagaggctgggaagtaccatttactacacaaatgtaataagatggacagaaacctttattagagttggaaaatcaagttggaaacaaacacatgagttcactacttaatgcatttaattccaacccctcattggaatcatcttggtaacatttaagattctacaacagttataatgcgacgattcagaggtggtctcaaagttgttacagtgttaaaaaaattatagtaagcagtataaaattcaatttattatggggccaggggggattcacaaccattctttaaaaccnttagagccaaccccnggcaagccttgnggcttacaccctgnaatcccagacttttgg

SEQ ID NO: 8379 - DNA, 401 bp, Homo sapiens
  misc_feature (335)..(335): "n" may be a, t, c, g, other or unknown
  misc_feature (372)..(372): "n" may be a, t, c, g, other or unknown
  misc_feature (374)..(374): "n" may be a, t, c, g, other or unknown
  misc_feature (377)..(377): "n" may be a, t, c, g, other or unknown
  misc_feature (386)..(386): "n" may be a, t, c, g, other or unknown
  misc_feature (392)..(392): "n" may be a, t, c, g, other or unknown
  misc_feature (400)..(400): "n" may be a, t, c, g, other or unknown
catggcacagagtttaatgtgaatcatgagatgagacaaaagcctcctccagggcgatgggaagacccagccccaaaccagactcttgagcacgcagccctaaaccagactccgggaaggggctgcgtggtcatgcaccgcctaagactcagaggtgaagatgggaagacccagccctaaaccagactcctggaaggggctgcgtggtcacccatcgcctaagactcagaggtgaagatgggaagacccagccctaaaccagactcttggaataggctctgtggccacccatggccgtaaggctccgggatggagacagcatggacagggacctngcacaaaggcatgtcgggagggcctcctttccaaggnanagncccacctgntccttntaagcccnc

SEQ ID NO: 8380 - DNA, 493 bp, Homo sapiens
  misc_feature (372)..(372): "n" may be a, t, c, g, other or unknown
  misc_feature (399)..(399): "n" may be a, t, c, g, other or unknown
  misc_feature (468)..(468): "n" may be a, t, c, g, other or unknown
  misc_feature (477)..(477): "n" may be a, t, c, g, other or unknown
  misc_feature (481)..(481): "n" may be a, t, c, g, other or unknown
  misc_feature (483)..(483): "n" may be a, t, c, g, other or unknown
  misc_feature (488)..(488): "n" may be a, t, c, g, other or unknown
  misc_feature (490)..(490): "n" may be a, t, c, g, other or unknown
gaaagttttatcaaagctaaaatttatttggtgcatactcctcttgatatcaggtatgttcgcatatacctttttctttcatgtgtaaaaacaaccatgtgaggtattttacaggtcaaaagaaaacaaaaactacttccttattcagtgtaaaggaggcttataagcattccaaaataaaaacaaacaaaaaccagacaagtacatagtctatttccatttccttttatacatcctctctatatatcacacatttagcaataggagaatagagaactaattcaaatgcaagggaatcttttttgtagattctgttgacagatgctctttaacctaaacattttctactctaaacataacggacttaattgncttcagtacgtgaaataattttaaggngatctagtactttgaaaatttcattcacttaagaacacttaagctggaaaatagcactatttttcagangcaattctnaacngnaaaangncat

SEQ ID NO: 8381 - DNA, 546 bp, Homo sapiens
  misc_feature (208)..(208): "n" may be a, t, c, g, other or unknown
  misc_feature (380)..(380): "n" may be a, t, c, g, other or unknown
  misc_feature (472)..(472): "n" may be a, t, c, g, other or unknown
  misc_feature (496)..(496): "n" may be a, t, c, g, other or unknown
  misc_feature (498)..(498): "n" may be a, t, c, g, other or unknown
  misc_feature (522)..(522): "n" may be a, t, c, g, other or unknown
ccagacaaaatgtatttatttatttttttgagacggagtctcgctctgtcgcccaggctggagcacagtctcggctcactgcaagctccgcctcccaggttcacaccattctcctgcctcagcctcccaagtagctgggactacaggcgcctgccaccatgcttggctaatttttttgtattttttagtggagacggggtttcactgngttagccaggatggtcttgatctcctcgtgagccgcccacctcagcctcccaaagtgctgggattacaggcgtgagcaaccacgcccagctgtcagacaaaatttttaagaaaacaaaattttttccagaatattacattacaaaaatcaatgaataaatgaactacactgnaactttaatacttattccatatgaaaaaccaaactggttctggcaatttgattgatctcttgagaagttgcagtgcattcattccatgggtnaaacccggtggtaggcattggcgntnctgctgctggtggaatggcttctnggcttggttgttgttggaaaccaa

SEQ ID NO: 8382 - DNA, 550 bp, Homo sapiens
  misc_feature (358)..(358): "n" may be a, t, c, g, other or unknown
  misc_feature (386)..(386): "n" may be a, t, c, g, other or unknown
  misc_feature (425)..(425): "n" may be a, t, c, g, other or unknown
  misc_feature (477)..(477): "n" may be a, t, c, g, other or unknown
  misc_feature (508)..(508): "n" may be a, t, c, g, other or unknown
  misc_feature (511)..(511): "n" may be a, t, c, g, other or unknown
  misc_feature (533)..(533): "n" may be a, t, c, g, other or unknown
  misc_feature (540)..(540): "n" may be a, t, c, g, other or unknown
  misc_feature (547)..(547): "n" may be a, t, c, g, other or unknown
gctttcaggaaaggtttattgtggtgagtgccttctgtacagtcgactgcaaatgaaacgcagaggatgggtgcccagaagcacctgcggcagaggcgcacgggaagcccggggcccaggctcatgcaacacgacgctcaccgcggctcgggccgtggggccgtcagagaaacctttttaaaaaatggagatgaatgttacagaattggacaacccgaactgcttttcaaaaccagaggaaggaggttcttagccgttactcagataccaatgctggggagggaggcctgacttcagcaacagctgtgggtgggctggaggccggcgcagcttggggccccccacgccagcttgtctnaaccaccacctgtgcggggcttgcttcnaagggtcaacaagagcaactgatggcttgccactttcangccccgagagacaaggcttacgtactttacttgcagcccaggtccaagcccntggaaggggtcctagctccgttgaattctgnatnccaagtgggcaccttgaggaanggtcttnaaggaangct

SEQ ID NO: 8383 - DNA, 544 bp, Homo sapiens
  misc_feature (543)..(543): "n" may be a, t, c, g, other or unknown
gttgcttacaagtagttttattattaattttagagtaaacatcaccaacttgggcacaattccaaaatagagctcttgttggattctggtcataaaattcttttttaagcttgttaagatcttataaaataagaaagttttcccaatactttagaaaaattactaatcattaataagtcgattttatactcaaagtaatggcctaacattttgaaagatgaaacaacgctcctcttttgaacatctaatgtattaagtaagctcagtgtcccaggcttcagaggagacagagaagtcctcatattgcaacctgaccagatgactctgggagtgaattaaatgcttaaaagaggtcagtcttgcaaattcgatgaagcacagaatacaggggaactgatctgattctgataaaagatacattactctcagaaaggggtgaagcttaaaatcttgcagttcttgggcaaggaaggagtgccaccaggcaggcaccaaccggcttgaaaggaaaagcttgagtgaattcaaggtctattgggagang

SEQ ID NO: 8384 - DNA, 534 bp, Homo sapiens
  misc_feature (1)..(534): "n" may be a, t, c, g, other or unknown
nnnnnnnnnnnnnnnnnnnnnnnnnnnnnnnnnnnnnnnnnnnnnnnnnnnnnnnnnnnnnnnnnnnnnnnnnnnnnnnnnnnnnnnnnnnnnnnnnnnnnnnnnnnnnnnnnnnnnnnnnnnnnnnnnnnnnnnnnnnnnnnnnnnnnnnnnnnnnnnnnnnnnnnnnnnnnnnnnnnnnnnnnnnnnnnnnnnnnnnnnnnnnnnnnnnnnnnnnnnnnnnnnnnnnnnnnnnnnnnnnnnnnnnnnnnnnnnnnnnnnnnnnnnnnnnnnnnnnnnnnnnnnnnnnnnnnnnnnnnnnnnnnnnnnnnnnnnnnnnnnnnnnnnnnnnnnnnnnnnnnnnnnnnnnnnnnnnnnnnnnnnnnnnnnnnnnnnnnnnnnnnnnnnnnnnnnnnnnnnnnnnnnnnnnnnnnnnnnnnnnnnnnnnnnnnnnnnnnnnnnnnnnnnnnnnnnnnnnnnnnnnnnnnnnnnnnnnnnnnnnnnnnnnnnnnnnnnnnnnnnnnnnnnnnnnnnnnnnnnnnnnnnnnnnnnnnn

SEQ ID NO: 8385 - DNA, 541 bp, Homo sapiens
  misc_feature (413)..(413): "n" may be a, t, c, g, other or unknown
  misc_feature (456)..(456): "n" may be a, t, c, g, other or unknown
  misc_feature (470)..(470): "n" may be a, t, c, g, other or unknown
  misc_feature (489)..(489): "n" may be a, t, c, g, other or unknown
  misc_feature (495)..(495): "n" may be a, t, c, g, other or unknown
  misc_feature (497)..(497): "n" may be a, t, c, g, other or unknown
  misc_feature (502)..(502): "n" may be a, t, c, g, other or unknown
  misc_feature (523)..(523): "n" may be a, t, c, g, other or unknown
gaaatgttatgcagtcattttttaaatgaggtaaatttccatgtattaatgcaagaggaggtccagaatacaatgcaaagtgaaaaaagttgcaaaacagtacatataatatcccatttcatttaaaaaaaacctatatacaaatgtgtgggtattcatatatgtatatatgtgtatattaatatataaacacaaacagaacaacatctgggaagacacacaccaaattaagttattcttggagaatgggagtggtgagagggactaaggaaaaatctttcactttttactttacacatttatgttttgcttgaattttgttggctaacattaataatttttgaatttttatcacaataaaacattttaacaaaataggcacttttgtaatcagatcaatagagttataatgnatgtgttttaaataaaaatagctccatgggggctgggccgtantggctcacacctgnaatcaatcccaacactttnggaagncnaaggnggccaaatatccggcaagganttgagaacagctggccaa

SEQ ID NO: 8386 - DNA, 537 bp, Homo sapiens
  misc_feature (514)..(514): "n" may be a, t, c, g, other or unknown
  misc_feature (517)..(518): "n" may be a, t, c, g, other or unknown
  misc_feature (527)..(527): "n" may be a, t, c, g, other or unknown
  misc_feature (537)..(537): "n" may be a, t, c, g, other or unknown
gtatcacgcagatttataatagccgaagaagcaacatagatggccgtcaatggacacatggataaacggggaatatttggccatggaaaaaaatgaaatataggttgagcattcctaatccccaaatccaaaatactacaaaatccaaactttttgagtataatgatgccacaagtgaaaaattcaacatacaaatacttaatacaaactttgtctcatgcacaaaattgttaaaaatattgtataaaattaccttcaggctatgtgtataagatgtatatgaaacaagtgaattttgtggttagactctgggtcccatctggaagacatctcattatgtaaatgcaaatattccaaaatttgaaaacatctgaaatccaaaacacttctggtctcaagcattttgggtaagggaatacttaacgtaaacggacacaagctacaatatggatggacttttggtggtaatggtttttgagacagggcttgtctgtcccccaggttgaaatgcaanggnncaacatggntaccgtgccn

SEQ ID NO: 8387 - DNA, 501 bp, Homo sapiens
  misc_feature (291)..(291): "n" may be a, t, c, g, other or unknown
  misc_feature (426)..(426): "n" may be a, t, c, g, other or unknown
  misc_feature (445)..(445): "n" may be a, t, c, g, other or unknown
  misc_feature (454)..(454): "n" may be a, t, c, g, other or unknown
  misc_feature (460)..(460): "n" may be a, t, c, g, other or unknown
  misc_feature (466)..(466): "n" may be a, t, c, g, other or unknown
  misc_feature (484)..(484): "n" may be a, t, c, g, other or unknown
  misc_feature (499)..(499): "n" may be a, t, c, g, other or unknown
ctacaagtcttgtttattgaaaggatctgaaaagcgtaataaggctttcaatgacatttaatacattttcaagaaattaatatgaaacattaaaatttacttcaaaaatccaaagttttctagatcattcccatctcacgctgctttagaggtcagttcacaccttctgtgttcagatgagcggctggaattctgaacactgccgtcttccagccctaacgctgggcgctggtccctctctcctaagcccacggctgggcttcccctgtgcccagggtcatggcggacttnaagccaggccggctgcccagaatcacactcagggtttttggacgctcaagtccacagatgctgaggtgcccagacgagggtgagcagggagacacatgcctcggagaacgtgcccaggctggccaggcggctgcnggaagcttcttacgggcanaggaaaacntcttgngccttncctatcgatctccagccntgaagggcaacttcngg

SEQ ID NO: 8388 - DNA, 538 bp, Homo sapiens
  misc_feature (402)..(402): "n" may be a, t, c, g, other or unknown
  misc_feature (465)..(465): "n" may be a, t, c, g, other or unknown
  misc_feature (477)..(477): "n" may be a, t, c, g, other or unknown
  misc_feature (499)..(499): "n" may be a, t, c, g, other or unknown
  misc_feature (530)..(530): "n" may be a, t, c, g, other or unknown
gttttgtctgtttgtttgagccagatggagtctggctctgtcgcccaggctggagtgcagtggcacaatctcggctgactgcaacctccacttcccaggttcaagcaattctcctgcctcagcctcccaagtagctgggattataggcatgtgctaccacacctggctagtttttgtatttctagtagagatggggtttcaccatgttggccaggctggtctgcaactcctgacctcaggtgatccacctgcttcggcctcccaaagtgctgggattacaggtgtaagccaccactcatgacccaggtctccccattctgatgccttctcttgccccacaccatacagctctgcctggagcctggaggctgggtccagagtggctcctggctccccactctnaacaccaggaattcaccagcccaggaggctgataagtctgggaaaacttctggggcccggctntttttaagattncatctgctgggccaatgggggntttggccactggagcccgttcttgcccccgnattgccac

SEQ ID NO: 8389 - DNA, 467 bp, Homo sapiens
  misc_feature (350)..(350): "n" may be a, t, c, g, other or unknown
  misc_feature (373)..(374): "n" may be a, t, c, g, other or unknown
  misc_feature (412)..(412): "n" may be a, t, c, g, other or unknown
  misc_feature (444)..(444): "n" may be a, t, c, g, other or unknown
  misc_feature (446)..(446): "n" may be a, t, c, g, other or unknown
  misc_feature (450)..(450): "n" may be a, t, c, g, other or unknown
  misc_feature (453)..(453): "n" may be a, t, c, g, other or unknown
atttttgtgggcatcagatatattctgaagtcaatactaaagctgttagagtatgacatttactaagaatcctgccattttaggcccttcttcttaaaggacaacaattccattggtatttagtaaaaaacaacatggcttggtaaatttagctctttttcttgacattggcaatgataatacaatgcctgtggtgtataattgtcatggctgacttataaatccctacagatatgtggttacttctctactttccctttctttggcttgggcaactgccacgttgatgcactggagccattctgctgcattcttctcatccttggccttaaagacataggttttattgnctgtgaagatttcgaaagccccnnggagaaaacggccctgcgtttcttgggcacaagccttnacactctggcttttgctgagtctattgggcancntcanggncatctttagacttt

SEQ ID NO: 8390 - DNA, 540 bp, Homo sapiens
  misc_feature (458)..(458): "n" may be a, t, c, g, other or unknown
  misc_feature (460)..(460): "n" may be a, t, c, g, other or unknown
  misc_feature (511)..(511): "n" may be a, t, c, g, other or unknown
  misc_feature (529)..(529): "n" may be a, t, c, g, other or unknown
  misc_feature (540)..(540): "n" may be a, t, c, g, other or unknown
aacacgcacatattgtttaataattcatgatgcaaagaatgctacagagtgaaatcaggatttggaaagaggtaatcaaaaaccaaaggttaaaagtggctcatataacttgaaaatttttagatcaaaggaatgccactttgaaaaagttttacggtcagctgttaatgaaatgacttacatttttggaaggactcctattcggtatgtagtctgacctcgcctactcgagtagttccctctagtatccttgccagtctttggcttctaagatctgagaatttctggggatggggagttcgagtcacaatattaagaactagtttgaagccagctccagggtagtctgtctttaagtctccactactccgctccaaggtgactcataaggtcggtccgtcaactctgcattatatggcctcaacaacgaaattaaaacacatactttaaccctccananccttctttggcaggccaatatgtcactttcggactgactactacctttccngctggatcttaagcaccnttcaccaaatn

SEQ ID NO: 8391 - DNA, 541 bp, Homo sapiens
  misc_feature (415)..(415): "n" may be a, t, c, g, other or unknown
  misc_feature (471)..(471): "n" may be a, t, c, g, other or unknown
  misc_feature (519)..(519): "n" may be a, t, c, g, other or unknown
caacgtagaaaagttttaatgagacaaatgtcaaacaagcacatcaacttcttaaaaaacaaagaaaatctgaaagtttaattacaaaaacacttatacagaaaacttggcatttcaacagttccaaacacatgtacacaagttttttctaaaatcagtcagaaataaaataccttgtctccctttcctcagctgcttcttgtattttaattaaaaagaaacaaagaaatctgtaacactgaataggcaacaacttatttcttgagaacataaaagtacagtaatatctacaggtgtactgggaaacatgagttaggtattgtgctagcctgtaacttcatttactgcctcctcactgagcacagaggagagaggaggtggcacagacctggtctatagatactgacagttttgnggcatctgaatcccagccaccagaagcaggtgagtagctactggggaaagacagcntttcagaagccagctggctaatttggggaaaatggattcttcctgganggcttttttgaaaatttatgcc

SEQ ID NO: 8392 - DNA, 556 bp, Homo sapiens
  misc_feature (39)..(39): "n" may be a, t, c, g, other or unknown
  misc_feature (71)..(71): "n" may be a, t, c, g, other or unknown
  misc_feature (272)..(272): "n" may be a, t, c, g, other or unknown
  misc_feature (442)..(442): "n" may be a, t, c, g, other or unknown
  misc_feature (490)..(490): "n" may be a, t, c, g, other or unknown
  misc_feature (503)..(503): "n" may be a, t, c, g, other or unknown
gtttttttttttttttttttttttttaaaccattactgngactttattataatagttaacaatattttagnggtatacaatcatatcacaattactcaagctatatacaaacaggtatttatataagtctacatttaaaaaagaaaaagcaattaatgacctccccaaaatcacattatcatcaacaagatttttttctaaaagttacggccaatccaataacaaaaaaattcacagttattctgcagacattttaaagatgcaggaattgnattgcacattatataattataaaccataacaagcagttatatattttaatctagtttttcacaaaatttacattatcatgcaatacttcactgtcacagaatgatggaactagaacaggttaacttacaaacttttaattatagccacaaatttagaattattttaaagntatatttcaaattattatactaaaaaaacacttcagggtaataaaacnggcccccatcatnatttgggtcacagatcaaaatacttttttagggggcctccttgggctttgcct

SEQ ID NO: 8393 - DNA, 541 bp, Homo sapiens
  misc_feature (84)..(84): "n" may be a, t, c, g, other or unknown
  misc_feature (485)..(485): "n" may be a, t, c, g, other or unknown
  misc_feature (504)..(504): "n" may be a, t, c, g, other or unknown
  misc_feature (516)..(516): "n" may be a, t, c, g, other or unknown
gttttttttttttttttgatattcaagcatgttcttttattaagcataggatgcgaggcacagcaggaggtttaagtacaatgngaaagcaagagaactgagactgtgattgacagacaaagggattaactaacgttttattctctgccccccaaaatatcctgtgtattcttaagtatatacgcttcccttcctgcctttcaaggtatctaaggaatgatttgaaaaatttgttataatctctaaagaattttttgcatagcattagcaaaggagtctatgacaagtactttgccacctggtagttctgcgtattctactccctctgggtgtcactgtcatcctcactggctgggacaaggttctgagatttgtctccccagcagttgctaagctggctcagtcttggtcaggatgaatgaaacaattatctcctggatcaatgcaacaaggagcatgaacctttgctttttctttcctaagtnggaaaaaggcaccccccgnttcaatggtggncctggtggaactggattggaacaag

SEQ ID NO: 8394 - DNA, 548 bp, Homo sapiens
  misc_feature (481)..(481): "n" may be a, t, c, g, other or unknown
  misc_feature (527)..(527): "n" may be a, t, c, g, other or unknown
  misc_feature (545)..(545): "n" may be a, t, c, g, other or unknown
gtcataaaaatgtgaaaacattttattctatgtacaataatgtacacaaatttaaacaggtcaccaaagagaccagaagtaattaaagaggtatatttacagtagcacatcacagtaaacggaaaaccattcacagattcaacattgatactgtttttgtgcttggttacacactgaaggtgaaggatattactccattttggatgaactgaattttaaacaaatacctcaatcattaataaatgctattttcatcagtcagtatcatcattaaattcttcagctgctgcgcctgtgtgctgaatcactccatttctttctctttgaacatcatcatcacaatctgtactgtcatcttcgttcaattccctgtcagattcagcagcagcttctcttacagcttcctctggagtttcattgggtggaataaatccattggtggtagatcatttgaattatccctggatatcatcttcgatgnatactttctgatggcccatgggcaagtatctttgaatggtcaggcnttttcgaaggcaagtgcnttg

SEQ ID NO: 8395 - DNA, 535 bp, Homo sapiens
  misc_feature (430)..(430): "n" may be a, t, c, g, other or unknown
  misc_feature (433)..(433): "n" may be a, t, c, g, other or unknown
  misc_feature (467)..(467): "n" may be a, t, c, g, other or unknown
  misc_feature (479)..(479): "n" may be a, t, c, g, other or unknown
  misc_feature (494)..(494): "n" may be a, t, c, g, other or unknown
  misc_feature (517)..(517): "n" may be a, t, c, g, other or unknown
  misc_feature (528)..(528): "n" may be a, t, c, g, other or unknown
gacaggaggaaaaaaaatttaataatatatgtttgcacaggagttccacgaaatatgagactccaagaagggtcagatgattgacactcatacaccatcgtgagctatcgaaaagaacggcagtttgggagttctgcagggagttgaccacagaagtgggagagtgaagggaagaagtgtgtcgtgaataaagcttggctggttttcagataaaaggtcttgcgagtggccaggtgtggtggctcactcctgtcacgtcccagcactttgggaggccaaggcgggcggctcatgaggtcaggagttcgagaccagcctggccaacatagtgaaaccccgtctctactaaaaatgcaaaaaattagctgggcatggtggcaggcactgtaatcccagctacttgggaggctgagacaggggaatcacttgnatncggaagcaaaggttcatgagcttaaaaccgcccntgcatttccatncccggtgactgtgtnagactcctttaaaaaaaaacggnggaaaaaggtntttgagt

SEQ ID NO: 8396 - DNA, 544 bp, Homo sapiens
  misc_feature (434)..(434): "n" may be a, t, c, g, other or unknown
  misc_feature (458)..(458): "n" may be a, t, c, g, other or unknown
  misc_feature (521)..(521): "n" may be a, t, c, g, other or unknown
  misc_feature (533)..(533): "n" may be a, t, c, g, other or unknown
gagatggagtcttgctctgtcgctcaggctggagtgcagtggtgtgatctcggctcactgcaagctccgcctcccaggttcacgccattctcctgcttcagcctcccgagtagctgggactacaggtgaccgccaccacgcctggctaatttttttgtatttttagtagagacggggtttcactgtgttagccaggatggtctcaatctcctgaccttgtgatccaccagcctcggcctcccaaagtgctgggactacaggcatgagccaccgtgcccagaatgttctgtttttgtttgtttgtttgtttgttttttgagacagggtctcgctctgtcactcaggctggagtgcagtggtgcaatcacggctcactgcagccttgacctcccaggctcacatgatcctccacgacagcctctggagtgtccctncactttctttcttaagggcccctnaaggacatgtcaaaaggcctgagactacttggggggaagtctatgggcaagcaggcttgccanaactgaacttgnccttgccctgg

SEQ ID NO: 8397 - DNA, 539 bp, Homo sapiens
  misc_feature (369)..(369): "n" may be a, t, c, g, other or unknown
  misc_feature (377)..(377): "n" may be a, t, c, g, other or unknown
  misc_feature (402)..(402): "n" may be a, t, c, g, other or unknown
  misc_feature (410)..(410): "n" may be a, t, c, g, other or unknown
  misc_feature (421)..(421): "n" may be a, t, c, g, other or unknown
  misc_feature (452)..(452): "n" may be a, t, c, g, other or unknown
  misc_feature (503)..(503): "n" may be a, t, c, g, other or unknown
  misc_feature (535)..(535): "n" may be a, t, c, g, other or unknown
ctgttacaaacaggtctttgttaaagatgagaagccaggtctttattaaagatgaggagggggcaggaaaggggggcagtgcctcctctacccactgcctttgcctgcccggggtgagggagcccctctgctccacccatgccccccatgatggcacatctgtatgaggctgaggcatggggggcagtgtgaagaacaggggcaggttccaagaaaaagaagaaaaacccttcccacagccctaataaataacagaagggtttgggatgacctgggcacaggcaaggggagacacagcaccctgaaccccaaaacctctgaagtggggcaagccctacttaagtaggggattaggagaaagtgggtganaggtgganaggcccgacacagggaggggcttanaggaaaangggtccccaanggcccttgccatgggggaaccttgcccccanctacagcttggctccttgattcttagagaagactcaatgacaaacaatgancctatcttccttcctttcctttgacatcttanaaac

SEQ ID NO: 8398 - DNA, 550 bp, Homo sapiens
  misc_feature (6)..(6): "n" may be a, t, c, g, other or unknown
  misc_feature (74)..(74): "n" may be a, t, c, g, other or unknown
  misc_feature (136)..(136): "n" may be a, t, c, g, other or unknown
  misc_feature (169)..(169): "n" may be a, t, c, g, other or unknown
  misc_feature (242)..(242): "n" may be a, t, c, g, other or unknown
  misc_feature (284)..(284): "n" may be a, t, c, g, other or unknown
  misc_feature (310)..(310): "n" may be a, t, c, g, other or unknown
  misc_feature (320)..(320): "n" may be a, t, c, g, other or unknown
  misc_feature (340)..(340): "n" may be a, t, c, g, other or unknown
  misc_feature (346)..(346): "n" may be a, t, c, g, other or unknown
  misc_feature (379)..(379): "n" may be a, t, c, g, other or unknown
  misc_feature (430)..(430): "n" may be a, t, c, g, other or unknown
  misc_feature (438)..(438): "n" may be a, t, c, g, other or unknown
  misc_feature (458)..(458): "n" may be a, t, c, g, other or unknown
  misc_feature (494)..(494): "n" may be a, t, c, g, other or unknown
  misc_feature (524)..(524): "n" may be a, t, c, g, other or unknown
  misc_feature (548)..(548): "n" may be a, t, c, g, other or unknown
gtagtnacagtttatttctgatgtggctgaatctagggacaggcgggctgggctgagtggggggcgtgtcggcnatggggctagaactccaccttgcaagccgggaaggcgtcatcctgcatggacaccatgctgntgctgcccaacaccgtgatgcccagcgcctggngccgggcgtgcgtctctgcgtaccacgtatgcatggccaccgagtcgaaagtggggatcagggtcacctgcangtcacggtcccaatgctgcttgctggccagtagcgcgtccangacggcccgcatgccttcctccttgngctggtcctngccactgatgacgtaagcanagcgcngcgcacgcgctggaagaactcctcatccaccangtgggcgctgctcccgctgggcaagtaggccaaggttccaattagaccggngacttggntggggttggctgaaaacccngggccggctgctggcttaccccctacgggccttgantggcaagtctttgggggttaaggacttttntggaaaaggggttccccggctttnct

SEQ ID NO: 8399 - DNA, 541 bp, Homo sapiens
  misc_feature (445)..(445): "n" may be a, t, c, g, other or unknown
  misc_feature (475)..(475): "n" may be a, t, c, g, other or unknown
  misc_feature (493)..(493): "n" may be a, t, c, g, other or unknown
  misc_feature (510)..(510): "n" may be a, t, c, g, other or unknown
  misc_feature (515)..(515): "n" may be a, t, c, g, other or unknown
aagttttaaaaaaagtttatcagcttagtctccaaaaccaggaagaaaatatttaatgattaaaaacaagtatgacctggaaagatattagactaaaaggaggaatcacaatgagcaggtgaaaatgttaaaggaaagctttcaatacaccaactgaaaaaggcatttctaattggccaaccaaattattcttttagattattttagccaaataaaaagaaatttacagatggataactgaggtccactaacataaggtagaaacaaagtttaagctaaaaattaaatctatattttgttgcagataaatgtgagatttacctacagcaattttctattgatgctaaattaaaagcatgaattgacatcgtctaacagaaatggtttgacagatattttcttggctttaaaatgttcttacgcatatgcatagaaatgccatganggataagaataatcttctggattggctgtncagtcataaggcctttgncattggtagtaccttcnatggngaatatcagtagggccattaaattaa

SEQ ID NO: 8400 - DNA, 532 bp, Homo sapiens
  misc_feature (421)..(421): "n" may be a, t, c, g, other or unknown
aacaagaatgcagatgccatttatttggtccataagtatagtcgttatttgagttttacaaaacatcgaatataaataacctgaaactgtaacaatacacaaaaattggcttcttacacagacataccaggcggtacaaactgaaaacttgagtaaattaacattgttttacattaatatacatagtgccatctaacatttaaaaacaagtttcaatgcatagcactcgatacttctttgaatctgtttcaatcagttaagagtatgaaaatggttagatctaggctaaaaataattcttcttctagccaaaaataaaggcataatatttataaccaggtatcaactttactaaaccacaatattttgaaactattaatgatacctaagggtatttacattaaaaaggcaacatgcattgngttggtttatctcatgactgggtatgcacacacttggtcaaagggtttttaaaactatattctactttcaatccgcatcctgcatggggctaacagtctagcaaaatgaag

SEQ ID NO: 8401 - DNA, 536 bp, Homo sapiens
  misc_feature (504)..(504): "n" may be a, t, c, g, other or unknown
  misc_feature (508)..(508): "n" may be a, t, c, g, other or unknown
  misc_feature (513)..(513): "n" may be a, t, c, g, other or unknown
  misc_feature (515)..(515): "n" may be a, t, c, g, other or unknown
  misc_feature (530)..(530): "n" may be a, t, c, g, other or unknown
agagaagaagtgtatttatttaacattttaaatttcaaatgatggcaacatgtttaagtagaaagtcctgaaaacaactgactaggtctaaaaaagagaaaaagatcttcaatcttgggatgcgttgccaacacaacatgacagtagatgtcacacttaggtttgcaaaaaatataagcatttggggttcatttcagtattggtctaatttaaataaatgtgaaacgagccttaaaaatgtactttccagtacttttggtatttttcataaatatttagataaaaaagaaagacaattcatctcctttagacagacagttcagggtaagactgtccataattttaactatccctttcctcccaagtcacatttttgttaggactaaatatatcatactcttggcagttcccttgcttggctttctccccattctgagttttgaattttctgcatgactggattcaccctccaacttttggaaaaataaaagtttctcactattnaaanaaggngnattgaaatgggatcnctcaaa

SEQ ID NO: 8402 - DNA, 543 bp, Homo sapiens
  misc_feature (455)..(455): "n" may be a, t, c, g, other or unknown
  misc_feature (468)..(468): "n" may be a, t, c, g, other or unknown
  misc_feature (492)..(492): "n" may be a, t, c, g, other or unknown
  misc_feature (505)..(505): "n" may be a, t, c, g, other or unknown
  misc_feature (527)..(527): "n" may be a, t, c, g, other or unknown
  misc_feature (539)..(539): "n" may be a, t, c, g, other or unknown
atatcaaaacgtcagatttactgtataacatatacagttattatttgtcaattaaaagtgaaaacaaacaaagaagtagtcacagtactaacatttaaaacccagaggaggaactcacatgttggtgtttcagttttgacagacctactaggatgaactatcctgagagggctgttgcagagggtgttgatttcagcaaggcatttgaaatcgttagatttttttttaaaggataaagcagaaataaatttaaattcatgggcacctaaggaagatgtatttggacctctgtgctgttctttggtgtgccagaagcagttctatcacttcctcactgtagttgaagagtggattcagtgttatcccacagaactcacgtgaaactgggcagtacacaagagcaggtgttttggacgtgtctcatcatagctgctttaagaggaaaaatgataatnaatgcctgtattncctgcccatgtatttttggtgctnaaaatggtttttnaaaatggcttttcctggggaanctagtgaagttntccc

SEQ ID NO: 8403 - DNA, 525 bp, Homo sapiens
  misc_feature (434)..(435): "n" may be a, t, c, g, other or unknown
  misc_feature (452)..(452): "n" may be a, t, c, g, other or unknown
  misc_feature (465)..(465): "n" may be a, t, c, g, other or unknown
  misc_feature (503)..(504): "n" may be a, t, c, g, other or unknown
  misc_feature (524)..(524): "n" may be a, t, c, g, other or unknown
gtgttttcctttttcttctttctcttcgtttttaaaacaatatagtgcagactgcacttctcacagtagaatataatggtcaattttagtataaaaaaaacattctcagagatttgtaaatgcacttagtgcttgaccaggccttggagagagatacagtaccgcttccagagcgccagaggggccaggacttgaggacttcgtgaggggactcctgcctatctttccctgccttgatcgtgtgggacaggccttggagggtggtttgcaggaaaggagttggtctgggcctcccagttaaaaccaggagggtcccaagagatccctcgaagaaggcaaggatgggatctaagattgcaggcccactgttagcccctgtggtgcctttgtgcgaacaggaaaatgacgccccttctcaagatgcagaaaattgnnataaatataccaggttnggtgaaaagtggnggcttccttggacaaaggggcccttgtgcaatgcacannctggacaactggtccccagna

SEQ ID NO: 8404 - DNA, 538 bp, Homo sapiens
  misc_feature (505)..(505): "n" may be a, t, c, g, other or unknown
  misc_feature (537)..(537): "n" may be a, t, c, g, other or unknown
agaacaaacattttattattaaaataaacttttgtataaaagcattacagatcaaaagctgtatttacacttatcgattcaaggtccaattatgcatcaaacattgaatagcacagcaatggtttacatatgcaagtaaattggacatacaaacacttagattccacctctaccaaataccttgattaatgcaaagaggagggggaatactgacacaggaaacctgcccagaaactagactggcagagatgtcaggttaacaaactgctaaaagttacatctccaaaaaggcacttatcattgttataaaagtgcttaaaatctaaacttgaaccttgtgcctggtttataaatttacaagaaactgcaaagaaccacagactagtttttaatatcaagtttccatacaaaattgtccaagaatttatttgcaataccttacatgtgaactgaaataaactttgcaaactcaattatactaaagtttatctggaaattcaatcancttactcataactcagatgcttttcttcattnt

SEQ ID NO: 8405 - DNA, 547 bp, Homo sapiens
  misc_feature (366)..(366): "n" may be a, t, c, g, other or unknown
  misc_feature (415)..(415): "n" may be a, t, c, g, other or unknown
  misc_feature (441)..(441): "n" may be a, t, c, g, other or unknown
  misc_feature (464)..(464): "n" may be a, t, c, g, other or unknown
  misc_feature (498)..(498): "n" may be a, t, c, g, other or unknown
  misc_feature (510)..(510): "n" may be a, t, c, g, other or unknown
  misc_feature (517)..(517): "n" may be a, t, c, g, other or unknown
  misc_feature (541)..(541): "n" may be a, t, c, g, other or unknown
  misc_feature (546)..(546): "n" may be a, t, c, g, other or unknown
aatggagggttctttcgttggcattccttttcatccttccccaagaggaatcaacttagggagcagatatgcagcgtgtgtgtgcacccagcatgtgttttcttgttcccaccctacattgtttgttgaaataaatatggaaataaggctgagcaagacagccaagccagccaaactgaaataaattcatcactcatgggctctcaagggatggaaaccgtgcatttttttctaaatgattatttctgaagcactgaaggaatggctatatcactaatgaggcctgtacgccatgactgctgattataaatgacctgcagagagacaaggagatagtggatatgaaggggagatggtggcatggangcgaggggaagcagctgctgtggaggctgcagctgctggtggccagcantggggattactatccaaaagcaactnttcctgcttttctgaccccacantaagccctcagaagaacctataattattctgggngaattcaatgantggaaangggtcaaaagccccccaaagattnaaaant

SEQ ID NO: 8406 - DNA, 541 bp, Homo sapiens
  misc_feature (450)..(450): "n" may be a, t, c, g, other or unknown
  misc_feature (470)..(470): "n" may be a, t, c, g, other or unknown
  misc_feature (481)..(481): "n" may be a, t, c, g, other or unknown
  misc_feature (488)..(488): "n" may be a, t, c, g, other or unknown
  misc_feature (495)..(495): "n" may be a, t, c, g, other or unknown
gtataattgtacaacctttgaaagttacataagttgtaatgatctaatactattaatagccattcagaaaacactttccctccctcccaacaaccatccagggggaaataaaagtcctgaaaagaggccagttcaacatggcctctaccctggtagaaacaaaaagtgaaaagagaagaaaacagaaatcaactaagaggtgttgccagtgtctctcaggagtggggccctggctgttgcctggggtcatgaaaggcagagcctgcagcatgcagtatggcagccgggagaccttgcagccacatcttcctcaccccggcacatccacatcccaacttaggtgtcatggaaatctttcagcagggttctcctccgctgctccgctatatgcatctggttctccaagtcccctctgtcataactgtctgcacgctccacttttcatgaganggtttcgatcttagcctccnctgacctgctnggatttnaacaagntttttcttgggtccggactcctggaatatgcctatggggagggggt

SEQ ID NO: 8407 - DNA, 531 bp, Homo sapiens
  misc_feature (399)..(399): "n" may be a, t, c, g, other or unknown
  misc_feature (418)..(418): "n" may be a, t, c, g, other or unknown
  misc_feature (425)..(425): "n" may be a, t, c, g, other or unknown
  misc_feature (491)..(491): "n" may be a, t, c, g, other or unknown
  misc_feature (493)..(493): "n" may be a, t, c, g, other or unknown
  misc_feature (495)..(495): "n" may be a, t, c, g, other or unknown
  misc_feature (508)..(508): "n" may be a, t, c, g, other or unknown
  misc_feature (523)..(523): "n" may be a, t, c, g, other or unknown
  misc_feature (526)..(527): "n" may be a, t, c, g, other or unknown
gcaaagaacacatgatttattcaagacaactcgtcatcaacagcactgactcaaggaacaaaacagatgaaaaaactaaagcaaacgttctgaccctctggagtgagacccgctgaattcatacagctcaatctgtaagtgtccaagatccagggggcaggttctcaagcaggaagcctcaggcactctggctctgtggggacctcccttgggcatctgcttgagaatctggggaagggacattatcagggcaggtcctttctgcaggcggtgtcctgctgggagctcagcctaaccaaggcctggtccctgtgctcttgaccttcatctcaaggtcaaggagagggcacttgacccaactctgccagcgaggcaaagtaatggtgattcaagtagtgnggttcaggagggaaggtanggggcanaccagaatgagtgcccttaaaaagtcctgggcaatgtctgctggggcccaagcaatgggcccagcntntnaaaggggttgganaaagggcttgaaccnccnnttga

SEQ ID NO: 8408 - DNA, 547 bp, Homo sapiens
  misc_feature (451)..(451): "n" may be a, t, c, g, other or unknown
  misc_feature (453)..(453): "n" may be a, t, c, g, other or unknown
  misc_feature (528)..(528): "n" may be a, t, c, g, other or unknown
  misc_feature (545)..(545): "n" may be a, t, c, g, other or unknown
actttgtttcatgtacaaaattatttaaaatactgtatagagttaccttcaggctacatgtataaggtatatataaaacatgaatgaatttcatgtttagacatgagacctaccaagatacctcattatgtatatatgcaaatattccaaagtctgaaaaaatccaaaatctgtaacactcctgtcccaagcatttcagataagaaacgcttagcctgtcttgggaaacagcagccactggatggaaaggggcagccagtagcagaggcctcagcccctgccttcatcctgagaatcttctgtaacaaaagctgccagctttcagggaagaaaaagaattctgtggccttgacttaagcccagagaaacaggaactgccaaaccttgttacccagcagaacagacagagagctgacctggcttcatggcaaagcaacaggagaacctggananggtcaattcgggggccagcagaaccaggctgggttggaaggcttgtcactggaagcaaagtggcccacattctanaaagagacatcaggggncc

SEQ ID NO: 8409 - DNA, 543 bp, Homo sapiens
  misc_feature (439)..(439): "n" may be a, t, c, g, other or unknown
  misc_feature (459)..(460): "n" may be a, t, c, g, other or unknown
  misc_feature (472)..(472): "n" may be a, t, c, g, other or unknown
  misc_feature (490)..(490): "n" may be a, t, c, g, other or unknown
  misc_feature (518)..(518): "n" may be a, t, c, g, other or unknown
  misc_feature (542)..(542): "n" may be a, t, c, g, other or unknown
catcccaaccaatatttatccatatgaacagataaactgaacaaaaacatagttctgataaaacctgcattcacaacctaatgtagtttaaagtaaattttttcacaattgagggctgctatttaggactgttttgttaataataaaaacaggaattatatagaagataaaacaccattttttactgctatataatgtcttgctatataaaacataccctcaacaagtcaaaatatttaaaaccagtgtttcaaataccaaaaatcacagctatgttactgttcagtaactccactcaaataaatgttagtactgcattcttgaaggaaaaaaactgcagccaaggcaagaactctgaagtttgcactcagagtttaaaagacagacccctactctgcaaactgaagactgccactctgcttcaataactccagcctgncacattttacttcaattggnnaaagcactctgntgagaattttaaaaggtnttaaaagggcatccttaaaggattaatnttggaggctgtaacttcctttaana

SEQ ID NO: 8410 - DNA, 502 bp, Homo sapiens
  misc_feature (404)..(404): "n" may be a, t, c, g, other or unknown
  misc_feature (449)..(449): "n" may be a, t, c, g, other or unknown
  misc_feature (469)..(469): "n" may be a, t, c, g, other or unknown
  misc_feature (477)..(477): "n" may be a, t, c, g, other or unknown
  misc_feature (483)..(483): "n" may be a, t, c, g, other or unknown
  misc_feature (487)..(487): "n" may be a, t, c, g, other or unknown
  misc_feature (491)..(491): "n" may be a, t, c, g, other or unknown
ctatattggtttttatttataaacagattgacataaaataagtccagatggcagcgtgagtagctgtgctgctgacttgcttacaaagaagcctgtggacaggcgagtgggtggaaccgactccagcctggaaaacctgccctcccatcccccttagcgccttcttggccttccggcctgattttcttcgacagcagttctggccagggcaaggagctgtggtgggggcagtataagccagggactcccttcccacagatgaggcctagggctgcaaaagggccccgtgaagaaaggagaaggtgacagggatccttctcctccccatatggagtgatgtggtcaaggctttatgggtctctccacctcaaagagaaagtgccctagggtagtgtcctctgaanaggggccacgcctatctgcaaagggcctctctgggaccaaagcanggcaatcttccttcttctgnaacccaanggctantgtnggangagttttactc

SEQ ID NO: 8411 - DNA, 546 bp, Homo sapiens
  misc_feature (459)..(459): "n" may be a, t, c, g, other or unknown
  misc_feature (468)..(468): "n" may be a, t, c, g, other or unknown
  misc_feature (516)..(516): "n" may be a, t, c, g, other or unknown
  misc_feature (522)..(522): "n" may be a, t, c, g, other or unknown
  misc_feature (539)..(539): "n" may be a, t, c, g, other or unknown
cagtttagaaagtttattttcccagggttaaggtgtgcccatgacacagcctcaggaggtcctcaccacatgtgcccaaggtggttggggcacagcttggttttacacattttagagagacatgagacatcaatcagtatgtgtaaggtgtacattggtcttgaaaggcaggacaacttgaagaggggcaggggcttcaagcataggcaggtaagagagaaagggttgcatttttttgagtttctgattagcctttcactgaatatacaatttacatgtgagaggagagtagaggaatagtcagttataccttaatctggcttagtgaaacatgaaacagagaaagcaatcatttatgcatttgtttcatgtgaagactttgagttctttgtccataaggaattcccttgtgagcaaattttatctttgtggctggcttatttaggaataaaatgggangcaggttgnctcaatcaagttcccacttggcttcctttggcttaaagggtttgaaanttttcnttcatattaacctaggntaaaaat

SEQ ID NO: 8412 - DNA, 550 bp, Homo sapiens
  misc_feature (334)..(334): "n" may be a, t, c, g, other or unknown
  misc_feature (398)..(398): "n" may be a, t, c, g, other or unknown
  misc_feature (410)..(410): "n" may be a, t, c, g, other or unknown
  misc_feature (427)..(427): "n" may be a, t, c, g, other or unknown
  misc_feature (514)..(514): "n" may be a, t, c, g, other or unknown
  misc_feature (518)..(518): "n" may be a, t, c, g, other or unknown
atccaactccaaattgtttaatctcaattccagaggtctaggccaggccaggcacctggggctctgggctgttctgcttctccgggccctacacccagaacctggccttggcttctcgctcccgggtctttagatcgtcatcttggagtccggttccatgttctcaccgctcctccatgatgactccttctgctcagcctcctcccttgccagtctcagggaggatccttcacagccaattcatccttgggtccccttcccaggggacgtcaacagtctaggcagggacccttgcccccaactcaatccccatcaccacagccagcaaagcctncgtcaggggccctgcctcttcacctgctgccttcacaagccccaccagggccagaccccgcttnctcgggcactgntctgaccccagtgtcancgggcacagtgggcaaccagcccggggccggccaagcggaacaccttaaccactgacttccgggcaaccctggggtccaagtggatncggnccaacggctttttcaagttcttcttcaagcca

SEQ ID NO: 8413 - DNA, 545 bp, Homo sapiens
  misc_feature (93)..(93): "n" may be a, t, c, g, other or unknown
  misc_feature (387)..(387): "n" may be a, t, c, g, other or unknown
  misc_feature (492)..(492): "n" may be a, t, c, g, other or unknown
  misc_feature (498)..(498): "n" may be a, t, c, g, other or unknown
  misc_feature (512)..(512): "n" may be a, t, c, g, other or unknown
  misc_feature (530)..(530): "n" may be a, t, c, g, other or unknown
gcagtttcaaccactttattagggtatattaggagtgaattcatggatatgaacttcattgaatgcatcatgattatattcagatgcaactgntctttaatatatctttgaaataacaatcctcttccctacataatagcaaataactaacgtatatgaagcattggtacactatttttaatgcaaaatttcttaaatcttgattcctatatagtaaaatctataaaagcaagaaaaatcaaaattatcagtttaatggacaataaggacagttgaagtatgtgtcttcaagttcgagttaagccattaaattttttaaagtaaatacttaaaggtaaattttatataaatatgtcaaaatgtagatctatttatttagcactttgntcactcagataaatttatattgcatatctaatgagatatgccatcatcttccaaggattatacctctattaatcaaaccaaaccaaacaacccttttaaaggtantcactntttgaaacccgaangggaccatttcaccatgnaattggtttaccttt

SEQ ID NO: 8414 - DNA, 516 bp, Homo sapiens
  misc_feature (432)..(432): "n" may be a, t, c, g, other or unknown
  misc_feature (466)..(466): "n" may be a, t, c, g, other or unknown
  misc_feature (468)..(468): "n" may be a, t, c, g, other or unknown
  misc_feature (483)..(483): "n" may be a, t, c, g, other or unknown
  misc_feature (501)..(501): "n" may be a, t, c, g, other or unknown
  misc_feature (513)..(513): "n" may be a, t, c, g, other or unknown
  misc_feature (515)..(515): "n" may be a, t, c, g, other or unknown
gagatggagtctcgctcttgttgcccaggctggagtgcagtggtgcgatcttggctcactgcaacctctgccttcccaggttcaagcgattctcctgccttggcctcctgaatagctgggattacaggctcccgccaccacacccggctaatttttttttcgtatttttagtagatacggggtttcaccatgttggccaggctggtctcaaactcctgacctcgtgatccacccgcctcggcctcccaaagtgctgggattgcaggcgtgagccaccacgcccggctagcacttccctttttaagctagtgctggcatgccaccttcccctcaaagcagagtcaacttccttttgtttgagagttttgtactggcctctgtaggcccttttcaggatacaaaataaagtgcccttcagcatccacatgccantgggttgccttccagtgtcaaaactggggtccanantttgggcaatgcatntttccaagaattaaaccncatggctacacncnc

SEQ ID NO: 8415 - DNA, 544 bp, Homo sapiens
  misc_feature (428)..(428): "n" may be a, t, c, g, other or unknown
  misc_feature (475)..(475): "n" may be a, t, c, g, other or unknown
  misc_feature (503)..(503): "n" may be a, t, c, g, other or unknown
  misc_feature (511)..(511): "n" may be a, t, c, g, other or unknown
  misc_feature (515)..(516): "n" may be a, t, c, g, other or unknown
  misc_feature (520)..(520): "n" may be a, t, c, g, other or unknown
  misc_feature (544)..(544): "n" may be a, t, c, g, other or unknown
aagaaaagataagcagtaacatttgtgtttaagctgacaggagtgtggcagtaactgctgacattgcaatctgaccgagaaagaattatagcagaaaacaggacatacttcacttagcaataaaatggcacattttaaatacatatatataaaatttttacaaatcaagtgtgaaacaaaagcactgcagtagctaaaatgggaagaaaaaaagaaaacaagcttcaatggaaataataactaactttagaaaatgaaaagcaaaaaaatatatatataaattcacctagacttaagaaacatcgaaatctggaaatcagcaactaagtaagctctggaaatagactgcacattaaaaagcacctttacttatgtgctctgaaatcatagcagcaagctggtgtcagaataataaccttgagattacnaagtgtacatatgggccattaaagctgtttttggaataaacattttncagaagtgataaaatgatgctctgtganccaaagcnttcnnactntggaatttcatagatttaaatttn

SEQ ID NO: 8416 - DNA, 536 bp, Homo sapiens
  misc_feature (379)..(379): "n" may be a, t, c, g, other or unknown
  misc_feature (473)..(473): "n" may be a, t, c, g, other or unknown
  misc_feature (486)..(486): "n" may be a, t, c, g, other or unknown
  misc_feature (517)..(517): "n" may be a, t, c, g, other or unknown
  misc_feature (529)..(529): "n" may be a, t, c, g, other or unknown
actatgaagggcacatagtatctttattgaaagaaacatttattgaaacattatataaaatgttgactaaattctgtagtgtatttggagtgaacatcatcttgaatagagattttaaaatttcataatcttaacctccgacgatatgattatacttgtttaaaaagaacattatatccagatataaacttaacaaatgaaatattacaaaatatgaacatagatagttttgtttcccattataattcccagcattttcaccctgtcctgttcatacgagtcaattctcttcttcaattcctgtcccatcagccgtctgctgaaaaacactgctttgtcttggctaaggctgcacaagttcagtctcgcactggctcancctcccctttcagcgacaccatttccctaccagggtacaagctgtttcctgggctctaagtggagtctgatttggcattcggtcccatcctagngctctttaagctnggaccctgaatcacagaacccctttgcttgnctaatattaccnccgccgg

SEQ ID NO: 8417 - DNA, 548 bp, Homo sapiens
aaaatttcatgtttattcatatttttcaaaatatatgtacattaaaaaaggaagatttacaacaggaaagattgccttacatgcaacacaaattccaatgaattcatgatgggatcacacatgattatgatctaattcaagccaatcttctcaagtccatttcccagccatactttaggctacagaagggatcccaggagacaaaagtggaatgaataagaaacaaacatcttttgcctctggcagtactcaaggggccagaagatgtacttcaaaaactttaagacaattagaatgtcaagtgccacagggaagagaaatgataaccagaaatttgtatttctagctagtactatttaacacaacttcacaatactaaaacaaatacaaataagaaagggttaggtagttgggcttcatttacttttttccttttctttttttttttaatatctcaaaaaggaagccactttgcttgatatcaaaatgctgtggaaagaaaggaggggaaaaaacccccaatttaatgtggaatctagttattttcc

SEQ ID NO: 8418 - DNA, 550 bp, Homo sapiens
  misc_feature (52)..(52): "n" may be a, t, c, g, other or unknown
  misc_feature (95)..(95): "n" may be a, t, c, g, other or unknown
  misc_feature (128)..(128): "n" may be a, t, c, g, other or unknown
  misc_feature (136)..(136): "n" may be a, t, c, g, other or unknown
  misc_feature (176)..(176): "n" may be a, t, c, g, other or unknown
  misc_feature (192)..(192): "n" may be a, t, c, g, other or unknown
  misc_feature (300)..(300): "n" may be a, t, c, g, other or unknown
  misc_feature (343)..(343): "n" may be a, t, c, g, other or unknown
  misc_feature (356)..(356): "n" may be a, t, c, g, other or unknown
  misc_feature (368)..(368): "n" may be a, t, c, g, other or unknown
  misc_feature (440)..(440): "n" may be a, t, c, g, other or unknown
  misc_feature (476)..(476): "n" may be a, t, c, g, other or unknown
  misc_feature (523)..(524): "n" may be a, t, c, g, other or unknown
  misc_feature (527)..(527): "n" may be a, t, c, g, other or unknown
  misc_feature (537)..(537): "n" may be a, t, c, g, other or unknown
  misc_feature (540)..(540): "n" may be a, t, c, g, other or unknown
ctgaggcagtatatgtgtattaaatttaaggtcacaattttcactaatctgngaaaacacatatatgtaatatttaaaagttaatgaaatccagngaaacttcaacttatttcattgagaatttactnacaaaatntagaaaacaagaatttacctcttttaaatggcatgtctgnattacttacaatttgntaaatgagttcctttccatacataccttaagatccacaaccttggtggcataaataacatgattaaagggtcaggtacaatgtatattttaatatgggatttgtgtantgatttagagcataaatatcacacagtgaaaaatttatcacancctaaatacagtncacaaggggaangaaagagcttatgtccacatttccaaggtctttacaataacgttatagcgtccaggtccaacacagcatatntgcatacaaaagcccactgatgtgaacacttgaaanggaatctggcctggaagggccttcatcttggggcaataaagtttgtnncgngtcaaattanttncaaaagacta

SEQ ID NO: 8419 - DNA, 549 bp, Homo sapiens
  misc_feature (509)..(509): "n" may be a, t, c, g, other or unknown
  misc_feature (533)..(533): "n" may be a, t, c, g, other or unknown
  misc_feature (542)..(542): "n" may be a, t, c, g, other or unknown
  misc_feature (549)..(549): "n" may be a, t, c, g, other or unknown
aggaacagaaaatttattattatgcaactagcaagctggggtcaaagggctttcccaaaaaaagttgtgtttccctatattacaggtatcaaaacagagcaaaacatccaggagaaccaaactgaaactcagaaaagagacaatttctgaggcccaccagatcctgattccattttgaaatactctattgcagtacctctgggtaaatattagctggttgctaaagacaggatctgaggctgggccaattcttaaggcaccagctgtcttgaggaggaagatgaagactgtgaatgaaggacagcagacttgcttctaggaaaataatatatgtaagttgggatgcctcttgcagccagatgtttccgaataagtcgctcagtaccataccagttaaaacctttcgtggcatgtccaataccgtggaagatgaacacttgctttcttcttttttgctgcttaaaatatcttcttcaaggcctcttctaaggcttgcattcttaatggcngaccaggacattgggaccatcccnaagcttgancccaaan

SEQ ID NO: 8420 - DNA, 524 bp, Homo sapiens
  misc_feature (58)..(58): "n" may be a, t, c, g, other or unknown
  misc_feature (153)..(153): "n" may be a, t, c, g, other or unknown
  misc_feature (164)..(164): "n" may be a, t, c, g, other or unknown
  misc_feature (337)..(337): "n" may be a, t, c, g, other or unknown
  misc_feature (343)..(343): "n" may be a, t, c, g, other or unknown
  misc_feature (360)..(360): "n" may be a, t, c, g, other or unknown
  misc_feature (398)..(398): "n" may be a, t, c, g, other or unknown
  misc_feature (400)..(400): "n" may be a, t, c, g, other or unknown
  misc_feature (449)..(449): "n" may be a, t, c, g, other or unknown
  misc_feature (454)..(454): "n" may be a, t, c, g, other or unknown
  misc_feature (461)..(461): "n" may be a, t, c, g, other or unknown
  misc_feature (494)..(494): "n" may be a, t, c, g, other or unknown
  misc_feature (509)..(509): "n" may be a, t, c, g, other or unknown
  misc_feature (519)..(519): "n" may be a, t, c, g, other or unknown
  misc_feature (521)..(521): "n" may be a, t, c, g, other or unknown
ggagagtctcacttcatcacccaggttggaatgcagtggtgcaatcttggctcactgnaacctccatctcccaagttcaagcaattctcctgacttagcctcccaagtagctgggactacaggcacgtgccaccacgcctggctaatttttgnattttttgtanagacggggtttcaccgtgttcgccaaggtggtcttgaactccaggcctcaagtgatctgcccacctcggcctctcaaagtgctgggattacaggcatgagccaccacacctggcctggattagtaatttcggatttccaaattcaggtcaagaagtggaatttattatgtggntcttgngaaaaaaatataaatgnggccttttaaatatatttaggtttttttttaaacaaangntactcaaaccattacctttctggcccccttgaaaagaaaaaaaaattgnccatnccattgncttctctaatttggaaagtccgaaagactcaanggtttttacttccgnccttcctgcnanggg

SEQ ID NO: 8421 - DNA, 549 bp, Homo sapiens
  misc_feature (469)..(469): "n" may be a, t, c, g, other or unknown
  misc_feature (476)..(476): "n" may be a, t, c, g, other or unknown
  misc_feature (505)..(505): "n" may be a, t, c, g, other or unknown
  misc_feature (513)..(513): "n" may be a, t, c, g, other or unknown
  misc_feature (517)..(517): "n" may be a, t, c, g, other or unknown
  misc_feature (538)..(538): "n" may be a, t, c, g, other or unknown
agatcaggatttctttttattcctcgttggtttaaaatggctaatcagaataaaaaataaaagggcctctttgtggaggctgggatctcccctatttagaggttagaacccaggtatcccctctacccagcaccatagtgaggtgggctgaggggtaacccccaagggacaatcggaggggcctaggcctgccactccttctctctatcccccgtttttggcatgtgatgaaaaatattgctttttggattcttctctcctggccttggattttaaaatcaagttaactgtgtaagctaggggaggctccaaggggccagtaggagcacactctaatccctctcccccaaggaggggattatccaatattgtttgagctaggccaagttattttcctgatctcccaccaccaccagtgtcttgaagttttgacccctttcctagggaaactaaatgccaatgagcctangaaactnaatcttcttttcaaggcctttccttttgngaccaaanttcngacttaacttttcccagcttnttctaatacac

SEQ ID NO: 8422 - DNA, 551 bp, Homo sapiens
  misc_feature (10)..(10): "n" may be a, t, c, g, other or unknown
  misc_feature (24)..(24): "n" may be a, t, c, g, other or unknown
  misc_feature (32)..(32): "n" may be a, t, c, g, other or unknown
  misc_feature (40)..(40): "n" may be a, t, c, g, other or unknown
  misc_feature (60)..(60): "n" may be a, t, c, g, other or unknown
  misc_feature (71)..(71): "n" may be a, t, c, g, other or unknown
  misc_feature (106)..(106): "n" may be a, t, c, g, other or unknown
  misc_feature (116)..(116): "n" may be a, t, c, g, other or unknown
  misc_feature (155)..(155): "n" may be a, t, c, g, other or unknown
  misc_feature (415)..(415): "n" may be a, t, c, g, other or unknown
  misc_feature (441)..(442): "n" may be a, t, c, g, other or unknown
  misc_feature (460)..(460): "n" may be a, t, c, g, other or unknown
  misc_feature (484)..(484): "n" may be a, t, c, g, other or unknown
  misc_feature (530)..(530): "n" may be a, t, c, g, other or unknown
  misc_feature (540)..(540): "n" may be a, t, c, g, other or unknown
  misc_feature (548)..(548): "n" may be a, t, c, g, other or unknown
  misc_feature (550)..(550): "n" may be a, t, c, g, other or unknown
aatgaaaaanggacagagtttagngaccaatnacttattntctttaaaaacacataaccncattaactttntgctttatacaaccatctagaaactataaaacagnaccacattgngcatttaacctacttatcaagaagggaacttcataagtnataagaattctacccatataggaaggaaaaaggagacagctaatagcatagtcacagatacaacatgagtccaagcaagcatcaattcttcgacatcaccttttccatttaccagagtggagactgagaaagagagtgagggagaaaaaagagggaaggaagcacccacagaggactaatcacaatccatagttacttttgacaactatagctcagggtttcatagaatagtatcatttgaccaacacagtgtggtgganggagaggggtgaaggaaacacaaatnnaaggatagagtttggacnagaaaaatccaatttcccctattnccttctaaatactcttcatttggtccaagcttttgggctattcagnaaatggcaanaaattatntnt

SEQ ID NO: 8423 - DNA, 545 bp, Homo sapiens
  misc_feature (476)..(476): "n" may be a, t, c, g, other or unknown
  misc_feature (488)..(488): "n" may be a, t, c, g, other or unknown
  misc_feature (495)..(495): "n" may be a, t, c, g, other or unknown
  misc_feature (499)..(499): "n" may be a, t, c, g, other or unknown
  misc_feature (510)..(510): "n" may be a, t, c, g, other or unknown
  misc_feature (532)..(532): "n" may be a, t, c, g, other or unknown
  misc_feature (540)..(540): "n" may be a, t, c, g, other or unknown
agtgctttagatttattcctataaaacacacaccctttaaactagggtccatgaggattaactttcgacatcgggggctgtcagaggtcgtggacacccccaaccccagccgggcgctgaacaatgtaaaaagaatttgctctgcaaccctgtgggggggggaaataaaagtaacccagcgtccatttaatgcagccaagtgcaattcctttccccaccttagaaagcaccaccagataatacagcagaactgatcctgcagaaaggttgctggagggtcaggccgtggtcgtaactaacaccacattcccattttgtttgctggataatttttaataaagtgaggtttacatcactgatatttaagaatggctatatgcacaaaagaaaacacacctttttggttaaggggtgaggaagttagagaaagcatgagaaacagggagcatgtggggtgaaggccgggcaagaattgnaaggttgaggcnccccagnttanttccttgctgnggaagaccatgcctccgatcanggggtttnatgct

SEQ ID NO: 8424 - DNA, 515 bp, Homo sapiens
  misc_feature (440)..(440): "n" may be a, t, c, g, other or unknown
  misc_feature (458)..(458): "n" may be a, t, c, g, other or unknown
  misc_feature (486)..(486): "n" may be a, t, c, g, other or unknown
  misc_feature (489)..(489): "n" may be a, t, c, g, other or unknown
  misc_feature (492)..(492): "n" may be a, t, c, g, other or unknown
  misc_feature (500)..(500): "n" may be a, t, c, g, other or unknown
  misc_feature (504)..(504): "n" may be a, t, c, g, other or unknown
gaaaccaagttcatctttatttaaaggattgacaatcccattttaaacaattctttgatttacaaagagggaggtagactcgttagcctcccaaccttagcttaaatcgtgatgttgccaggttcctggtggttcagctgaatcctagacagtttcccttctcttcataaagctgagaagaaaaaaaaattatctccatctaggcccacgggaattttgtgcatagacagtttgaattggtctgaaaagtgtgactagctacctacctattcacaatgcctagaaaatgggctaccagatatggtagtggtcaaagccccgactttcctgtctgaggtactgggtttgctctaaggtagaccttggcaaggcccctaatgggtcccgtccagcaaaagtgatgctcgtgtccctcggctgtcaagtgaacctgggtttgngaatcaacttttggatanggatcattctcttggattacccctaggnttntgnccctacangggntacctacctgg

SEQ ID NO: 8425 - DNA, 474 bp, Homo sapiens
  misc_feature (420)..(420): "n" may be a, t, c, g, other or unknown
  misc_feature (429)..(429): "n" may be a, t, c, g, other or unknown
  misc_feature (435)..(435): "n" may be a, t, c, g, other or unknown
  misc_feature (438)..(438): "n" may be a, t, c, g, other or unknown
  misc_feature (451)..(451): "n" may be a, t, c, g, other or unknown
  misc_feature (463)..(463): "n" may be a, t, c, g, other or unknown
  misc_feature (470)..(470): "n" may be a, t, c, g, other or unknown
acaacagtaatctttattttaggccaacatccagacatacaagacggagatcaccatgcggaaccagcctggcccttagatgtgtgtgctcgagccaggatcagccggagtctgacagcgcctgcaccccaacacggtcggattccaggacgccagtgacaaaaccagtgcatggacaagcagcttccatgcgtgtgcatttgatttttaaaaacaatacatatttcagtgttaacttcccccctcacctggcttgaaacattttccccattttccagggaaacaaactctaccaaaaggtgccgcctgcaggaccccgggcccagccccttctggaggtggtgctgtgtggactcctctggggcggacccggggccagcacagggcccctttccaggccgccttcaaatgcagctttgncactgccgnatctgntgnttaaaaaatcagntttatgtttaanggcgggnaagg

SEQ ID NO: 8426 - DNA, 550 bp, Homo sapiens
  misc_feature (431)..(431): "n" may be a, t, c, g, other or unknown
  misc_feature (475)..(475): "n" may be a, t, c, g, other or unknown
  misc_feature (519)..(519): "n" may be a, t, c, g, other or unknown
  misc_feature (537)..(537): "n" may be a, t, c, g, other or unknown
  misc_feature (544)..(544): "n" may be a, t, c, g, other or unknown
  misc_feature (547)..(547): "n" may be a, t, c, g, other or unknown
  misc_feature (550)..(550): "n" may be a, t, c, g, other or unknown
aaactagaatttattggtatacaaaactccatttcatagataaagtggcacatctttgcagcttctattgcaccaagtatcgaagattaaaaacacaaaaaaagaaacatttggttttgaaaacactgcaaatagccaagtacagtactttggtaaataaaaaataaaatggttcagatgaacacaatccgtggaaagaaacaatctagggggaaggaactatggacatcagacaatggtcacaattctcaccatcgagctccatagataaggcaagacttgctaagtctatggatcacgaccccatggaggtcttaagtatctccagactgaagctagaacaagtatagtgcaattagaaagagagaaggcccctcctccacggatacatccacccctctgtaaaggagactgacgcatgccaacacttntacatgggaaaggggagcccccggtgtgacgtctggctcctggncctttcttctttcctctgagcttaatgctggtggaggctttggnaaaagcactggggaaggnccaaggnccnttn

SEQ ID NO: 8427 - DNA, 547 bp, Homo sapiens
  misc_feature (396)..(396): "n" may be a, t, c, g, other or unknown
  misc_feature (465)..(465): "n" may be a, t, c, g, other or unknown
  misc_feature (478)..(478): "n" may be a, t, c, g, other or unknown
  misc_feature (493)..(493): "n" may be a, t, c, g, other or unknown
  misc_feature (495)..(495): "n" may be a, t, c, g, other or unknown
  misc_feature (514)..(514): "n" may be a, t, c, g, other or unknown
  misc_feature (540)..(540): "n" may be a, t, c, g, other or unknown
  misc_feature (546)..(546): "n" may be a, t, c, g, other or unknown
agcagttcacttcaatggctggaaactagacagaaagttgggaatagtctgactattatcatacttggggcttgctacattatcagttctatatgaacttggaattattggaaataataaaataaggggctgtggaggttgatattattaatagtgttatgcagaaaatatgaatggcagggaggggcagagagaaaaatccatttcttcatttaaatcaaattttaaaaatcttgaaccttagaatctaaaacttacagtaatttaaaaccaaccaaaatcacatcctaatttttctgagccctttcttttcatgaaaaattacatattataaaacagaagtttggggggaaaaaatctatgttttaccatacaataagttgacaaaaactgganaaactagaacaaacaaatccaactatgtagtctgaaaacaacaaggaaaatggcttattcattaaaacngtttaaccattcntttaacctggatgancngacttgctggctttaaaancccaacttggggattaccaaaaattnccgttnt

SEQ ID NO: 8428 - DNA, 561 bp, Homo sapiens
  misc_feature (505)..(505): "n" may be a, t, c, g, other or unknown
  misc_feature (523)..(523): "n" may be a, t, c, g, other or unknown
acaatagaaactgtttttttatcttgactgccagagacgctcctttgcaatgccttccggtaaccaaatttttgggcacaacacacagctggccttcatttcttcaggggctggtaaacagaggcattggggtcaagtccagaggggctggtctccacaaatttggaagagtagtggggggaaacagggctcagggggctggtggcggcactgtatgttatgctgggcatgacggccatgacttcggctatcttctgttttaggtccttgatttcctgatctttctgaaggatttgtccttgggcaatctcgagctgccgctttgcatcgcccagtgcggagaacaggtccagcttgattatcgtctctgcacttaagctgttctccaggtgctgtgttttgtcttgcatggctgaaagggctgacattaacacctcagtgtccttctcattttccttatatttccgaacttctggacttttaagtctaagttctctgatttggncttctttcaccttcatgntccatcgggagctttttggcctttgggttctaagtctt

SEQ ID NO: 8429 - DNA, 559 bp, Homo sapiens
  misc_feature (405)..(405): "n" may be a, t, c, g, other or unknown
  misc_feature (407)..(407): "n" may be a, t, c, g, other or unknown
  misc_feature (491)..(491): "n" may be a, t, c, g, other or unknown
  misc_feature (507)..(507): "n" may be a, t, c, g, other or unknown
  misc_feature (513)..(513): "n" may be a, t, c, g, other or unknown
  misc_feature (532)..(532): "n" may be a, t, c, g, other or unknown
  misc_feature (537)..(537): "n" may be a, t, c, g, other or unknown
  misc_feature (556)..(556): "n" may be a, t, c, g, other or unknown
aggaatatagattttaatcattgtgctgctgctattaaccagagtgcaattaatccatcttttgtggattttgatgccacagtgtaaatgagagggtttcacacagaaacactctgggggccttcggtgacaaaagggctaggcctctggtggggagggggtggcaaaaggtgaagtggaattaggagagatgtggggagcagacccagggctgggagactgctccttccccatcacacatgcccatcaaggaccccaagaggaagggattcttcctgccatggcctgggctgtccaagtgagcctgacttcccttccaaggcagctgcctctagcttcatgtccaattctcgctgagtagatgaggtccagggtaggcccacagttgaccaccaaatggtgaananatataagccaagggagaaagaaagtgggtttggaacccccaatcattctccattttcatcctaagctccttaaaactagttcanaacttggggaaagacngcaccncagtctatcctttcggcanactgnttttcctgcctctgggganggg

SEQ ID NO: 8430 - DNA, 388 bp, Homo sapiens
  misc_feature (315)..(315): "n" may be a, t, c, g, other or unknown
  misc_feature (338)..(338): "n" may be a, t, c, g, other or unknown
  misc_feature (356)..(356): "n" may be a, t, c, g, other or unknown
  misc_feature (359)..(359): "n" may be a, t, c, g, other or unknown
  misc_feature (369)..(369): "n" may be a, t, c, g, other or unknown
  misc_feature (371)..(371): "n" may be a, t, c, g, other or unknown
  misc_feature (384)..(384): "n" may be a, t, c, g, other or unknown
ctgtgaaaacagtgaaattttattgatgatacactgcggaagacatccataccacaactaagcatgagcgattttagaagcatagagacaaaggcactttcaccttgcattttagatatttgaccaaaacttgaaatcagacatattcatagcagtacagaaaaccaatgactaattgttcacataatcagcatcctatatcctacaaaatgttagcttcagatattagaacatttgaatgtctgaaaaaagaaacagatctaagcatgcagttgtcctccctgcattttcacgagtgcacaggaaacacattgncactagctattatcatttgctgngctgtatgaaagagactnggngcacctgggngnaaacagcaggcanctgg

SEQ ID NO: 8431 - DNA, 485 bp, Homo sapiens
  misc_feature (56)..(56): "n" may be a, t, c, g, other or unknown
  misc_feature (192)..(192): "n" may be a, t, c, g, other or unknown
  misc_feature (198)..(198): "n" may be a, t, c, g, other or unknown
  misc_feature (211)..(211): "n" may be a, t, c, g, other or unknown
  misc_feature (275)..(275): "n" may be a, t, c, g, other or unknown
  misc_feature (353)..(353): "n" may be a, t, c, g, other or unknown
  misc_feature (408)..(408): "n" may be a, t, c, g, other or unknown
  misc_feature (413)..(413): "n" may be a, t, c, g, other or unknown
  misc_feature (419)..(419): "n" may be a, t, c, g, other or unknown
  misc_feature (427)..(427): "n" may be a, t, c, g, other or unknown
  misc_feature (447)..(447): "n" may be a, t, c, g, other or unknown
  misc_feature (449)..(449): "n" may be a, t, c, g, other or unknown
  misc_feature (479)..(479): "n" may be a, t, c, g, other or unknown
gcaaaatgaaacaagtttattttctccaataacttctgtaaattacaaagacaaantactaaaaactacagcatataacttttcaatatttaaccagagtactcgtaataaatatgcatccggaaacaagataaaaggctacacctcgtcaggcatcctacaaaaatgtctcaagttttatatactctgcancatttntgtgcgggggcanaaggggctgttgtgtattttctgaagtgctgtgacaaaaggtcctttcacatttctttggagcntttttgaaattgcttaactataattaaacaacttaagaaaagtaacaccaagctttaaagccatttttgctttgctgncattggtccttatccaatacagatcaacatatcatccagcacagccaagcacccnctgangccaancagccttntgggacatgggccctgtcanancatgccctacttttagttaaatacttttgnaagagt

SEQ ID NO: 8432 - DNA, 505 bp, Homo sapiens
  misc_feature (419)..(419): "n" may be a, t, c, g, other or unknown
  misc_feature (461)..(461): "n" may be a, t, c, g, other or unknown
  misc_feature (474)..(474): "n" may be a, t, c, g, other or unknown
  misc_feature (489)..(489): "n" may be a, t, c, g, other or unknown
  misc_feature (497)..(497): "n" may be a, t, c, g, other or unknown
  misc_feature (500)..(500): "n" may be a, t, c, g, other or unknown
  misc_feature (503)..(503): "n" may be a, t, c, g, other or unknown
aaaggaaatgcattttatcccactgcacattgcaaaagtctcacgccaaaaaagctagactttcctctatgtatggcatcaaaagggagtaaaaaatgattggatcacccagattataaataaggttatttgtttctcaaaaatccttattaaaacattaaatatcagctcttttgggggagaaatacattcatttcagggagacctcggaagagtgaccatccttttgctctaccccaaccaggtgggggaggggaagccccagagggcccaaggggtcccctccagttgagccaggtagccactcacatcctgccactgaaggaggtggctaatgcacaatttacaaatgaaactgcacgtccattaaattaaacccaatggaaaacacacgtgtgacctgtcctgtcattcacagncatggggtgagagggaacccgaggaaaagggtgcccacccanggggtcttggaangtgggtgggaaggtntgtgttanggnggnca

SEQ ID NO: 8433 - DNA, 548 bp, Homo sapiens
  misc_feature (521)..(521): "n" may be a, t, c, g, other or unknown
  misc_feature (527)..(527): "n" may be a, t, c, g, other or unknown
  misc_feature (532)..(532): "n" may be a, t, c, g, other or unknown
  misc_feature (539)..(539): "n" may be a, t, c, g, other or unknown
aacatctttacattttaatgaaaaagtagataatctatttgaaaagtacaaactcaattgcaatttcaagaaaaaaatatgtatttatataccataaataagcaaaattggactctgaagccctaatacttcaaaagcattcatcctattccataaaaacctagtattattcagcaacagtactactactgatttaaaaatagaaagcaagtctatcttcacatgtagttctttgtctttaatttgtacaactcaccaaggttattttcattcttagcacccggggttcaccagggtgtgatccaaagcaaaccagcataggtttttaacagaaaatctttgccaggaacttcatgacctgtattttcctcacctaggaagaagctgtccccactcgcatgattttgaacagtgtgttgatgttattgcttcgaattgcatcccgacaagcagtgatcacctggttcttttggttttccaacccgcagacgaactgctctttgaattgcttggattactgntttganggttnccaacangttttgggg

SEQ ID NO: 8434 - DNA, 550 bp, Homo sapiens
  misc_feature (528)..(528): "n" may be a, t, c, g, other or unknown
cttcattaaccctttattacaagtcacgctcttatagaagtatatgtggacttacgtgaaaaaatcaaatgtatccaagaataaaaaacacagcacataaagtagtatatgcattccagtgttcgcgccagagacggcgggcgcccaagtaaaagctcttctaaaacggcctgactggggcaggccgggtgcgaacggttccgggcctcaggcacagtgtggggccgcctgcctcctccgcggcccggcgggcgggggcagcaccagctcctagggcctccgggccagcggcggaccccaggccggcccaagcccgacgccaggcagaaccctttgggcggggccgtatctggccctccggggacggcagtgacgacacccccagaaatgtgggcttagggctggccacagggtaccctcagaagcccgcaagcttaatcgggcttttttaaggaagatctcgctcagaatcacccacacaggggaagtccgtctggatcgaaaaggccaatgctttccaaagggccnaaggctggggtccaccttttcc

SEQ ID NO: 8435 - DNA, 179 bp, Homo sapiens
  misc_feature (150)..(151): "n" may be a, t, c, g, other or unknown
  misc_feature (153)..(153): "n" may be a, t, c, g, other or unknown
  misc_feature (167)..(168): "n" may be a, t, c, g, other or unknown
  misc_feature (173)..(173): "n" may be a, t, c, g, other or unknown
  misc_feature (178)..(178): "n" may be a, t, c, g, other or unknown
aattatacagatattttaattgtatatatatcaggtacacggaataaaagtcctactctctagaacatgagaagtcaataaatagaaaagatatacaaagtggaatgaacataaaaatgactaagcatgtgatcttcacattcatacagnntntcaactaatctttnncaatnaaaang

SEQ ID NO: 8436 - DNA, 559 bp, Homo sapiens
  misc_feature (509)..(509): "n" may be a, t, c, g, other or unknown
  misc_feature (524)..(524): "n" may be a, t, c, g, other or unknown
  misc_feature (534)..(534): "n" may be a, t, c, g, other or unknown
  misc_feature (557)..(557): "n" may be a, t, c, g, other or unknown
ctagtgagggtttattttaatcatcagtaaaataaacagcagacgaaaaaaagattagtaattaaaacggagtgtttccattctttactctttaagcattatccatgcacttctcactgagctcacccatttgttgaaaaaggagacaaagccatatcccttagactttcctgttgccatgtcttttaccactcgggcatctctgaaatcagaaacaatcagaagtttaggtttgcaaactatcctctggatatcaaataagaatttcacacacaactcattctcatgtttcaccttcattaaagtgaacctttaatgcaaattcaccttttattctacaaaatttatcatgtattaggaaatgaggcttaattttatagacatgcaaatcaataacttaagtatatatgtatatttatattgtacagaaattgcctctctcttcaaaaaactttttaaacttttaaatattaagcatggtgaaagcagctactccatgaactacttancccttattaaggtcncaggccattngatgaaagggtttctttaacccngc

SEQ ID NO: 8437 - DNA, 523 bp, Homo sapiens
  misc_feature (467)..(467): "n" may be a, t, c, g, other or unknown
  misc_feature (473)..(473): "n" may be a, t, c, g, other or unknown
  misc_feature (475)..(475): "n" may be a, t, c, g, other or unknown
  misc_feature (484)..(484): "n" may be a, t, c, g, other or unknown
  misc_feature (496)..(496): "n" may be a, t, c, g, other or unknown
  misc_feature (503)..(503): "n" may be a, t, c, g, other or unknown
  misc_feature (506)..(506): "n" may be a, t, c, g, other or unknown
atagttgtgtgcaatttaatgaacacaattaattttaccaccattttacataaaaggaaactgaagtgcatttcttagggtcccactgtaagttgagggcttgagattccaagaaaagtcttatttcagagctcagtgtcttgcccaaaacgcagcctcactgctcaatcacattcttgaggtttgattggctgaacgcacgtggaacatcaggttcatgtttccaagcaagaatcatgggttggggaaggcaagtgtttactgtggtccagctgaggactgtggtgtctgaaactttgtcacatgggaggctacaggcccggggctggcttggctcccgtgaaaacactgcagcgggcagccagtccggaaggcagcatctggcagggccttcaggccttctgagtaaggaagaccccagctttgcaaaagacatagaggcagcactgtgactggactgaatagcncacctntntaacccttnttcaaggcaaangggccanaanccaggtggaaatggggc

SEQ ID NO: 8438 - DNA, 559 bp, Homo sapiens
  misc_feature (394)..(394): "n" may be a, t, c, g, other or unknown
  misc_feature (474)..(474): "n" may be a, t, c, g, other or unknown
  misc_feature (511)..(511): "n" may be a, t, c, g, other or unknown
  misc_feature (522)..(522): "n" may be a, t, c, g, other or unknown
  misc_feature (532)..(532): "n" may be a, t, c, g, other or unknown
  misc_feature (544)..(544): "n" may be a, t, c, g, other or unknown
  misc_feature (551)..(551): "n" may be a, t, c, g, other or unknown
  misc_feature (554)..(554): "n" may be a, t, c, g, other or unknown
gggggaagcacaagctttattggctgaaagttcttctcaggagcctggtctgctgggactgcatgttcctggatgggctcccccaggcctaagctccaggtttcctctggccttccgaaggattttgtgggttacgaccaattgatcaaagatgactttttcctggcgcttgctcagctgcaaaagcttcatggtgttttgcaacttcttttcttgttcaaacaattttttatgtagtttggtgacctctgccttcatttctccaatctgctcacagtgaagggggcactggccatcctcggggagtgagactctccagagaagcttcagccgcctgtaggcctcttccagggtcaagcttggccgtgctcacactgctcacaaacttgctcantggtgctgggtgtggaccctttgttcccagctcttgacttgtggaactgggagcctcttgggtttgaatggccatttcancaaggagccctctgtccttgctgaactggttgagcanggcctataagncctaataggnccaggacatggnggcattnttntggcc

SEQ ID NO: 8439 - DNA, 541 bp, Homo sapiens
  misc_feature (50)..(50): "n" may be a, t, c, g, other or unknown
  misc_feature (209)..(209): "n" may be a, t, c, g, other or unknown
  misc_feature (451)..(451): "n" may be a, t, c, g, other or unknown
  misc_feature (477)..(477): "n" may be a, t, c, g, other or unknown
  misc_feature (493)..(493): "n" may be a, t, c, g, other or unknown
  misc_feature (505)..(505): "n" may be a, t, c, g, other or unknown
ctgtatatatttcaagtgaatcatttaatgtgagtgaggctcagttaggngttaccataagtattaacagaagaaaaagggaaagcacaaacattttccctctaccagaaaagggtctgatgtaagataaactagcctgttggtttaacaatagctcattaaaaaggccagagaatctgggagaagatgtacttggaagcactgtcctntgagggcccattcccaagggacagcaaaatactgaaaaaaattaactggctcaaaaattatattgagagataaaaagagttagtcacagcttagaaaaaaattccagaataaatgacactagctagattagtaattctgatgtttccttgtcatagtactctgtgcgaaacagagggactacaaactggtgcccctttgaacagagtggttttaaataatagattctccagtgcccaactgnatttcaagtataattctgggatttgnacctagaaatcccganaaaaagccccanggggaaagggcaagtttttggccttaaaggattggc

SEQ ID NO: 8440 - DNA, 559 bp, Homo sapiens
  misc_feature (384)..(384): "n" may be a, t, c, g, other or unknown
  misc_feature (436)..(436): "n" may be a, t, c, g, other or unknown
  misc_feature (468)..(468): "n" may be a, t, c, g, other or unknown
  misc_feature (484)..(484): "n" may be a, t, c, g, other or unknown
  misc_feature (509)..(509): "n" may be a, t, c, g, other or unknown
  misc_feature (520)..(520): "n" may be a, t, c, g, other or unknown
  misc_feature (538)..(538): "n" may be a, t, c, g, other or unknown
  misc_feature (556)..(556): "n" may be a, t, c, g, other or unknown
  misc_feature (559)..(559): "n" may be a, t, c, g, other or unknown
aactctgaattcttttaattctgaaaccagagacatgtacaacacttacagcattcacacaacactattttcaaaataggtttttgacccctaaaaatgaaaattcttagtgacaagctttagatatgaaacttagcccagtgggtattcactttgtcacaaaaagcaactacagacaaatagtttttccctctccccgacacaaaaactgaaattacagacttttaaagcagaaaaaattttctccaaaatgcaaatgattaaggtccaaggaacaaatgaacagaagatctcaattattcaattgagcgagtgatttagtttgcatattaactccttttcttactacttcctgatatctgattctggcaatatttatcttgnatctactgggcaagacactgggaacacaaaggaaattttagacaaggtccantggtatgctggtaaaggttaacaactagcttnttaagggaaaggaggnctttacttatagcattctatggggnaatcctccaantgccgcagatttcagctngcaacaatttggcactgngtn

SEQ ID NO: 8441 - DNA, 562 bp, Homo sapiens
  misc_feature (195)..(195): "n" may be a, t, c, g, other or unknown
  misc_feature (199)..(199): "n" may be a, t, c, g, other or unknown
  misc_feature (406)..(406): "n" may be a, t, c, g, other or unknown
  misc_feature (433)..(433): "n" may be a, t, c, g, other or unknown
  misc_feature (442)..(442): "n" may be a, t, c, g, other or unknown
  misc_feature (454)..(454): "n" may be a, t, c, g, other or unknown
  misc_feature (506)..(506): "n" may be a, t, c, g, other or unknown
  misc_feature (509)..(509): "n" may be a, t, c, g, other or unknown
  misc_feature (513)..(513): "n" may be a, t, c, g, other or unknown
  misc_feature (529)..(529): "n" may be a, t, c, g, other or unknown
cagctttccaacccagctcatggagctttattcagacgggagtgacaacatcctgcttcgttcttgctgcccttgaaggggcaggccctactgagccatattccctagaaacccaatgccgaaggcccatgtttgacctcccactttattcaagtcgcctaggactagggctggggccttcctagaagccccctntcanaacctgttctcacccacccaccactcccgttgtcaggcccagggaggacccatgaatgacaaaaatcatgtagggatattccctggactgggaatcccctgccagcttcaaggacatatcatctgacacagggagaagctgacatctgtcatattcttctgcctcacgtacacacacacacacacacacacgcatacgcactcttangctttcaagaaggaagtgatgtggcanaatgaccgntggcacgtggtnaccacttcactggaaggatcccttgaaaaatgaccttgcccaaggggccctnaancatnggttgccacaaattgncccatgggccaactttttgacccttttttttgg

SEQ ID NO: 8442 - DNA, 550 bp, Homo sapiens
  misc_feature (491)..(491): "n" may be a, t, c, g, other or unknown
  misc_feature (522)..(522): "n" may be a, t, c, g, other or unknown
  misc_feature (543)..(543): "n" may be a, t, c, g, other or unknown
gagtgaaatattttattgaaaatagttaatttaaaatatatacatcatttttcaaaagccatgtgactgataaaaatatcaaactttccatacaagcatcatctcagcttcatcccctcggcaaagtgtctcccgaatctttccagatggacatttcgtttgagtctctagcgccctctggtgaaacaccatgaaattgcccaaaaacgtaattcaggctctgctcaggacggaaggtgaaatagcagaatgagcgcctatttcaatgtgacaggttgtgatgtgctgccttctccccgagctcaggagaaaggcagcctctgtgagtgcttctctctctttagggaaagtattcttcccatggacactcagccaagcttattgcaaaataccttcttcctaagttttcagcatcactgccttctgaaaaaacaaaaaccggcaatcagacaggataaataatgaaagcctccaatcattcaggaccaggnccctactcctggcaaaggttaaagggccgcnaaaatggttaaaccaggctgngtttcct

SEQ ID NO: 8443 - DNA, 560 bp, Homo sapiens
  misc_feature (427)..(427): "n" may be a, t, c, g, other or unknown
  misc_feature (483)..(483): "n" may be a, t, c, g, other or unknown
  misc_feature (486)..(486): "n" may be a, t, c, g, other or unknown
  misc_feature (516)..(516): "n" may be a, t, c, g, other or unknown
  misc_feature (525)..(525): "n" may be a, t, c, g, other or unknown
gcaaaatacatgtgttttgtaaaagaaatctgcactgtgcttggtttatactacataattataagtaagcaaaatagtatgacttcttttgactaatctactcctaaagccttgagttgccgttcaatctcttcatctgagattgtagcctttgaagtagaggcagatggtaagcttcgagcagctgatggagctttggccatctttccagaaatttcaattccaatttcatcaagaacttgattcacaatatcctggctttcttcttcgtcatcagaaccgtcaaagatgtcatcaagtgtatcattgactaggggatatgggagaaggagcaaagcagttactttcaaacaaacttcaggttagacttacatatttacagctagcccaactattttggatattaccagaaggcaaactcagtgancaaactaaaaaatccttcaaaagtcagtgaagtaaatggttaatcctattgagccnttnaatctggaataatggtcatttcaccccaantatcttatngcaacaggctactcttttttaaaaattaatctaat

SEQ ID NO: 8444 - DNA, 555 bp, Homo sapiens
  misc_feature (154)..(154): "n" may be a, t, c, g, other or unknown
  misc_feature (403)..(403): "n" may be a, t, c, g, other or unknown
  misc_feature (422)..(422): "n" may be a, t, c, g, other or unknown
  misc_feature (449)..(449): "n" may be a, t, c, g, other or unknown
  misc_feature (493)..(493): "n" may be a, t, c, g, other or unknown
  misc_feature (507)..(507): "n" may be a, t, c, g, other or unknown
  misc_feature (515)..(515): "n" may be a, t, c, g, other or unknown
  misc_feature (536)..(536): "n" may be a, t, c, g, other or unknown
  misc_feature (549)..(549): "n" may be a, t, c, g, other or unknown
  misc_feature (555)..(555): "n" may be a, t, c, g, other or unknown
caaataaaatataaaatgatttattccaaagccatacccaaaacatacaatgaaatacatccctgttaaagacttaataaaaagagcaatctttacattttacaatttgaagaccttctgttcccacaaaaagtctcataaaattccataaagngtcaaatgtattttcctgtttatataaaatgtattctctcttcaaatatagccgttttattatgaaattgttctcaatttctgaaattctcagtagtctatagtatcccattttcacatgcttcttaaaatgaggtaagaagacaaacggtgaaacttttttcagatcattttttcagaagtcaatgccttgctgatgcaaagcgcaacatgcttttgtcatccctttcatctgaaatattttcccagnggttactcagtattttgcncccaaaaacagttccaatacctggccncttaaaaatccataccaggtggaaatcttcttatgggatttaanggctggaatcaagnccttggtncagggatcactatttcttacnggtttttaataanatcccn

SEQ ID NO: 8445 - DNA, 554 bp, Homo sapiens
  misc_feature (415)..(415): "n" may be a, t, c, g, other or unknown
  misc_feature (437)..(437): "n" may be a, t, c, g, other or unknown
  misc_feature (443)..(443): "n" may be a, t, c, g, other or unknown
  misc_feature (457)..(457): "n" may be a, t, c, g, other or unknown
  misc_feature (471)..(471): "n" may be a, t, c, g, other or unknown
  misc_feature (479)..(479): "n" may be a, t, c, g, other or unknown
  misc_feature (501)..(501): "n" may be a, t, c, g, other or unknown
gaaggaaaggaactttaatgagaaatcaaaacacagggaaccaaagtgcaaatcatccaccccccatgggggggccatcctgaaccccacatcaacccctcagcccccttcaggcccccagcgcaggcccagggcctggagcttctgcctcaggtagctcttgagctggggcaggcctctctgggactccagttcctcgaagggtagctgtggggagaggagagggcggcaggttacccgcaggctgggagtgaggatgcgccacgggccaggccagggccactcaccggcaggagctggtagcccatcaggcctaggtgccgctccctcagggccctcgagcccagcagcacccggccgtcccggcagaaatgccagcgttcccgcaacaccagcaccacccttgcaggggganggacgtggctcaaggcattgcnggcaangtgggcaagggttncccaaccttgctcntttacctntggcaaggtctcagtatgcctngaggaactggcctttggcaagacttgtggtttgcaggaagggtctggtcctac

SEQ ID NO: 8446 - DNA, 540 bp, Homo sapiens
  misc_feature (376)..(376): "n" may be a, t, c, g, other or unknown
  misc_feature (404)..(404): "n" may be a, t, c, g, other or unknown
  misc_feature (415)..(415): "n" may be a, t, c, g, other or unknown
  misc_feature (463)..(463): "n" may be a, t, c, g, other or unknown
  misc_feature (469)..(469): "n" may be a, t, c, g, other or unknown
  misc_feature (476)..(476): "n" may be a, t, c, g, other or unknown
  misc_feature (498)..(498): "n" may be a, t, c, g, other or unknown
  misc_feature (511)..(511): "n" may be a, t, c, g, other or unknown
  misc_feature (514)..(514): "n" may be a, t, c, g, other or unknown
  misc_feature (538)..(538): "n" may be a, t, c, g, other or unknown
cagatgtaaaatctgtgctattatttgaagtacagaatttagaatatattcttaaaaatacaattaacacatccccaactttctatgctaaaaaataaagaagactgtaatacagagatgccttgattccaagtatcccacttactttccacaaccaaaagttttgttccagttttcataaagctctaaatcttttggagaaacactaggtcgcacagttctaaaagcattttcaaaatcaatgtaagctatgggtcgaacttgatccggtgttatggtagcaatgtcagcagtttgtaaactgcgaataggaccaagagaagcccccctgcaaagctgtgtcatgtctgctcctgaaaacgcatcagactgctgnacaatctggtcaatttcttcttcactgnggcaacactgntcttttggacattagattaattactatctggttcctggctgaagcttntgggangggaatntaaagcccttttaccaatcttnttcggcaggcctnatnaattcttggggccgattggtggtncc

SEQ ID NO: 8447 - DNA, 553 bp, Homo sapiens
  misc_feature (422)..(422): "n" may be a, t, c, g, other or unknown
  misc_feature (436)..(436): "n" may be a, t, c, g, other or unknown
  misc_feature (462)..(462): "n" may be a, t, c, g, other or unknown
  misc_feature (471)..(471): "n" may be a, t, c, g, other or unknown
  misc_feature (473)..(473): "n" may be a, t, c, g, other or unknown
  misc_feature (477)..(477): "n" may be a, t, c, g, other or unknown
  misc_feature (534)..(534): "n" may be a, t, c, g, other or unknown
  misc_feature (538)..(539): "n" may be a, t, c, g, other or unknown
gagattgagtctggctctgtcgcccaggctggagtgcagtggcgccatctcagctcactgcaagctctgcctcccgggttcacgccattgccattctcccgcctcagcctcccaagtagctggggctacaggcgcccgccaccacgcccagctaattttctgtatttttttagtagagacagggtttcaccatgttggccaggctggtctcgaactcctgacctcaagtgatccgcccacctaggcctcccaaagtgctgggattacaggcgtgagtcactgcgcccggccccagtgactattcatgagaacaaaagacaaggcatggctgactctccaggttacagctggagaagaggggaaaggtgtttggttgtacaagcagctcagggcaactggtgcttgcggcgtgcatgtgcggncccaaaagcgtggntttgggttaccaaatgccttcaaggnaaaggccananctgnacttgacgggacaatcactgtgtgtggggggacccatgtcggttgggaggcctggangggnnttgcctccttggag

SEQ ID NO: 8448 - DNA, 550 bp, Homo sapiens
  misc_feature (421)..(421): "n" may be a, t, c, g, other or unknown
  misc_feature (457)..(457): "n" may be a, t, c, g, other or unknown
  misc_feature (466)..(466): "n" may be a, t, c, g, other or unknown
  misc_feature (498)..(498): "n" may be a, t, c, g, other or unknown
  misc_feature (502)..(502): "n" may be a, t, c, g, other or unknown
  misc_feature (519)..(519): "n" may be a, t, c, g, other or unknown
  misc_feature (523)..(523): "n" may be a, t, c, g, other or unknown
  misc_feature (550)..(550): "n" may be a, t, c, g, other or unknown
gaaaaatcattttaagaaggcaaagttccaaacagggttacacaggagtctactcagtttcctggccatacaggattaacgctgtgccttacgttagagcaacaaacttgactgtccgtgtatatataggtgagggacaaagggtttctgcagccaagcactgcactctattccgctgcctgggcgggccttgagcaggaaggtccctcttgcaccacctcctccacttcagttcagctctctcatgtcttccaccaagaggacatggtctttttccacacagatcacatgggatggtgaatcttcttactcatgaaaaacagcccaaggtactgctaatttgggacgttttatttattggaaaggttctttcaagggaacttttctgcaagaccaagcaatgtatgtatttttctttggnaaattacaagttacattgggaccaaaaacacatggngactaatgnactttgcttctaggccaatttaaagaaaagtntttnatcctcacaaatccagngaancttatttattctaaaaagttaaggagn

SEQ ID NO: 8449 - DNA, 566 bp, Homo sapiens
  misc_feature (407)..(407): "n" may be a, t, c, g, other or unknown
  misc_feature (443)..(443): "n" may be a, t, c, g, other or unknown
  misc_feature (450)..(450): "n" may be a, t, c, g, other or unknown
  misc_feature (482)..(482): "n" may be a, t, c, g, other or unknown
  misc_feature (488)..(488): "n" may be a, t, c, g, other or unknown
  misc_feature (501)..(501): "n" may be a, t, c, g, other or unknown
  misc_feature (513)..(513): "n" may be a, t, c, g, other or unknown
  misc_feature (541)..(541): "n" may be a, t, c, g, other or unknown
  misc_feature (543)..(543): "n" may be a, t, c, g, other or unknown
  misc_feature (566)..(566): "n" may be a, t, c, g, other or unknown
gcagttctagcctttatttttctttgacgaggagtgccacactgagggcccctctgcagcgccgcacagggaagcggtgcctcggggagcagcctttcctctgatggcgggaggggtcaagggatgcaggagatccacggcagcacacgcagcctgcaggcgcagcacacaggcagagcactgcccagcagctggaacatgagaatgagggccacaccacccagctgcagcacaagcccagcacggcgtgtcacggcacctggcaccaccagacccagaatggcctgtgcgagaggcgcacgccactgacgtggctatgctgtgatcaaagcccgacacgccggaagaagagccgcagacattgtggggtgcacacacttgcaggggaactgtggaaaaccctgatngggtccctgagcccttgaagttgcccaagggaccgnacaagangcaactgaaggccaaggtgaaaacccttagcncatgtnggcacccaacttncttgcttcacangatgttaggaagcccaaactttcttggngngttaggacaaaaaaggccccctn

SEQ ID NO: 8450 - DNA, 483 bp, Homo sapiens
  misc_feature (28)..(28): "n" may be a, t, c, g, other or unknown
  misc_feature (61)..(61): "n" may be a, t, c, g, other or unknown
  misc_feature (83)..(83): "n" may be a, t, c, g, other or unknown
  misc_feature (87)..(87): "n" may be a, t, c, g, other or unknown
  misc_feature (101)..(101): "n" may be a, t, c, g, other or unknown
  misc_feature (135)..(135): "n" may be a, t, c, g, other or unknown
  misc_feature (139)..(139): "n" may be a, t, c, g, other or unknown
  misc_feature (170)..(170): "n" may be a, t, c, g, other or unknown
  misc_feature (310)..(310): "n" may be a, t, c, g, other or unknown
  misc_feature (321)..(321): "n" may be a, t, c, g, other or unknown
  misc_feature (369)..(369): "n" may be a, t, c, g, other or unknown
  misc_feature (389)..(389): "n" may be a, t, c, g, other or unknown
  misc_feature (405)..(405): "n" may be a, t, c, g, other or unknown
  misc_feature (460)..(460): "n" may be a, t, c, g, other or unknown
  misc_feature (467)..(467): "n" may be a, t, c, g, other or unknown
  misc_feature (475)..(477): "n" may be a, t, c, g, other or unknown
aataataaaatacaatttattaaaggantcatgtttacatagatacagaacatcttggatntttcaacaccatagcaacacanaatnaatttcttcatgtntaaaagatgtgctgaaagctgcatgcctcatcantttntattttattggttatggctatagttgacatntttccatataaaaacaaactgcacagcatcacatatagagtacagacatcttaagttcattcacaaagttaatttttctaaactgcccttcaaaaatttacatctttgctcaattctaaacattcaacaaaattagcttnccaagaaacanaaatgatacccaatttctttgcttttctagaagtaactttccatttgntcatgtattttgatatggtnatattccccacccganttaaaccctttggttaaaagagcaacctactttagggtcaggctaaaaattaagngtactanattttggnnngttttt

SEQ ID NO: 8451 - DNA, 497 bp, Homo sapiens
  misc_feature (45)..(45): "n" may be a, t, c, g, other or unknown
  misc_feature (358)..(358): "n" may be a, t, c, g, other or unknown
  misc_feature (425)..(425): "n" may be a, t, c, g, other or unknown
  misc_feature (445)..(445): "n" may be a, t, c, g, other or unknown
  misc_feature (464)..(464): "n" may be a, t, c, g, other or unknown
  misc_feature (471)..(471): "n" may be a, t, c, g, other or unknown
  misc_feature (480)..(480): "n" may be a, t, c, g, other or unknown
  misc_feature (489)..(490): "n" may be a, t, c, g, other or unknown
cacaaactatggcattttatttcagagcctttgcttacatttgtncaatatattacataattcttcattgtttgcagatcctaatatatactttatagcttttattctataagcttttttcttcaacattttgctgtcaacaaatctttacagtcctgtacaaatttgaataacttgaaaccattttcaacaaaattagttactgtaagcacacactacaagactgaaaatgcttttcttagaaaagttgaatgtaaaggattctgacacgttagcatctacaacaaaacgcattgaaattcccacgtcgtattgccaggaaacaaagaaaacatgccagccccatccaaaaaaagtncacagaactacaattaaaacagtaaaacagtctgtcaataaagtctggggattaacagggcccgatnttaaatagcttggatggacncatccccatttccaaaggnttccaanggggaaaanttaatccanngccaacc

SEQ ID NO: 8452 - DNA, 417 bp, Homo sapiens
  misc_feature (385)..(385): "n" may be a, t, c, g, other or unknown
  misc_feature (388)..(388): "n" may be a, t, c, g, other or unknown
  misc_feature (394)..(394): "n" may be a, t, c, g, other or unknown
  misc_feature (398)..(398): "n" may be a, t, c, g, other or unknown
  misc_feature (403)..(403): "n" may be a, t, c, g, other or unknown
  misc_feature (410)..(410): "n" may be a, t, c, g, other or unknown
  misc_feature (412)..(412): "n" may be a, t, c, g, other or unknown
caataagtggtaacttttattatcaccatatgtaattattgatttttcacagttttaaatacagaaacagaatgatacaatcttcttgattccttccccagcacccctccaatcctggtgtctgtagagtatagggtgttaagaggtttcagaaaccaccccagcccagacctggaggagaagctgtgatgacttctcttcattagctgaacctcactttattcttgtggctggccctccactgaggtctgtcttggaactcctgatgagattcctgccttgcccactgcctgcaggtcctagccagcaacccagtccttgtgtggcatgggcttcctgctgctggatccccggctccactgcatcaccaccacacctccccagngtntacctncctnttccnggactgntnactat

SEQ ID NO: 8453 - DNA, 557 bp, Homo sapiens
  misc_feature (457)..(457): "n" may be a, t, c, g, other or unknown
  misc_feature (468)..(468): "n" may be a, t, c, g, other or unknown
  misc_feature (521)..(521): "n" may be a, t, c, g, other or unknown
  misc_feature (534)..(534): "n" may be a, t, c, g, other or unknown
  misc_feature (554)..(554): "n" may be a, t, c, g, other or unknown
ggggagtaggttttacttgcagtacagattcttttcattacagatcacaaaaatacaatacaatgtgacaagcccagtttaagaattacgtgcagtagctcatattaacacaaacagctccccacgaaggccgacaagagctaaatccggtgtcaacagggttcattgcaggagtagaataatccggtacaaggaacgagaacagattgaaaccagaaacaaagccatgcctgacagtcaatcaaggtcaatctgatcatttccatgaccaattacccatgtgaacaattcaaaatgacggtggaagagctgagcaccctgtactcacacacgatgcccacagcttggcaaaaggtacacaaacacttgtttgaaaagaatgactgaaacgtctactttcaaagaacaatggacacttttaaagggaatgctgacattaacttttccaaaatggaantttaaaatgtnagtagtactcttggggaagaatttgcctggaaccgtaaccttgatttcccagnggtttaattaacnggggttttaatttaaaactnttc

SEQ ID NO: 8454 - DNA, 555 bp, Homo sapiens; identical to SEQ ID NO: 7435
  misc_feature (1)..(555): "n" may be a, t, c, g, other or unknown

SEQ ID NO: 8455 - DNA, 544 bp, Homo sapiens
  misc_feature (445)..(445): "n" may be a, t, c, g, other or unknown
  misc_feature (482)..(482): "n" may be a, t, c, g, other or unknown
  misc_feature (515)..(515): "n" may be a, t, c, g, other or unknown
  misc_feature (530)..(530): "n" may be a, t, c, g, other or unknown
  misc_feature (533)..(533): "n" may be a, t, c, g, other or unknown
gttctgattttgacaagggtaacttcttctttattaaagcaaataactggacataatcttaaaggattccacctccatcgtctttcctaacttagatcttcattgagaaattgggcaaggttaagtttacttttttctagtgctgcggttttggctcgtcttggtagtctcatcttcatttctgattctggttctggaacttcatgatcactttcagagtcggcttcagcagtctgacacctcctgttcgtcctagctgaaactgtcacttttctctgtcctctgttagtctttagctgagtagactttgatgcttgggttgcttttacacccctgagtggagtcatatatacttctttattcttttcatcttcattttggaaagtaagttgtagtcaaggtggcatcctgtgctgcttcagcttggtcaccaaattctttattnccttttctaactgaatcttgaatttcttccaaagctnttaagacatgtcctaacttttacttgcttccanaatctcattcaattnganccggaggatct

SEQ ID NO: 8456 - DNA, 537 bp, Homo sapiens
  misc_feature (465)..(465): "n" may be a, t, c, g, other or unknown
  misc_feature (492)..(492): "n" may be a, t, c, g, other or unknown
  misc_feature (525)..(525): "n" may be a, t, c, g, other or unknown
  misc_feature (531)..(531): "n" may be a, t, c, g, other or unknown
ggaattacagggtcacattttaattcctgaattttacagtttagcattaatatcaccacatgtatacaaatggtgtaaaacaagtacagtggtattttttaatacaaaataaacatctgttttatggaaaaaactatacttcatatctacacagacagctcatcttttccaaacaatagccaaaattaaaattaactacaaaatctccagaacaggggaaactgctttagattaaacgattccaggaaaaatggacccgtaacacattacaagggtgatctaaagattgtggctggaattactgttaaagtttttttttcccaatgcattaaattgtattttggggagatttttctcacttcggcatgatctcagatcatagatgagcaaactaacattaaaatatttacagttaacttgttgctctaaaaataaaacttaactggttgcctcaatttatttttnaaattcacttaccgtatattggaatgngcctttactctttttaaaaaaaccggttttatntttccncccttg

SEQ ID NO: 8457 - DNA, 550 bp, Homo sapiens
  misc_feature (503)..(503): "n" may be a, t, c, g, other or unknown
  misc_feature (506)..(506): "n" may be a, t, c, g, other or unknown
  misc_feature (509)..(509): "n" may be a, t, c, g, other or unknown
  misc_feature (526)..(526): "n" may be a, t, c, g, other or unknown
  misc_feature (533)..(533): "n" may be a, t, c, g, other or unknown
  misc_feature (542)..(542): "n" may be a, t, c, g, other or unknown
acttttcaattttattgtataacttttcattaaagtgagaaagccattatattcataagacaaacacagtatcaaagaagttaaagtcattaggtaatgaaataacaatcatctcaaatttggatgcacatgctcaataactttttctctcagcctaaatgccttattgacagggaaaagttatatgagaggaaaacaaagtggcaagaaaactgcactggcccctcaggacaaaaactcatcagggaaagattcaaatgttttaaagttctgcaaaagcaatatgaaaaaccaaagtccagcattgggggcgggtaaaggtgggtttgtgaataggaagaaaggctggaagtttcagctcccttacagagtacctggaaaaaagacactgattagtaattacatgagctaaattctcctttagcatctcttaagtattaattctctgcaaatatttggattacaatatttccaattgcttccttgggaaaaaaatttggggnganccntttcaattttccaaacnggggaanttcccaaanccccttgg

SEQ ID NO: 8458 - DNA, 511 bp, Homo sapiens
  misc_feature (441)..(441): "n" may be a, t, c, g, other or unknown
  misc_feature (450)..(450): "n" may be a, t, c, g, other or unknown
  misc_feature (455)..(455): "n" may be a, t, c, g, other or unknown
  misc_feature (475)..(475): "n" may be a, t, c, g, other or unknown
  misc_feature (486)..(486): "n" may be a, t, c, g, other or unknown
  misc_feature (492)..(492): "n" may be a, t, c, g, other or unknown
  misc_feature (504)..(504): "n" may be a, t, c, g, other or unknown
ccttcatgcattttatgaggaagttctggattaaaatcatggtcaaccagatgttgcttttgcctgggaagatggtgtcatattctgttgcagagtcatcagtgcccatgatagatacttccttaaatttttagtttctttgtggtctcaagtctttttttcagcagctcccccatttccagaagtgagtgcagataactgctctgcaccttcccttgcacagtctttgaaaattttctctcttccggtgagagagaagtgtcttctaaaataagttcttcaagtttaagtgcaattagatgtgtttcaagccctttaatatgatccacaacattggaaattaaagtctgaagcccagtaacatagtcttggaaactggtaaagacaggtggcatgatgatgctggttcctttttctccttttctttttctggaaatttantttgggatnggccnagggaacttttacagtaccnggatccccaangggtanccggaattggtntaaccaa

SEQ ID NO: 8459 - DNA, 548 bp, Homo sapiens
  misc_feature (419)..(419): "n" may be a, t, c, g, other or unknown
attgtcaatctttacaattttattgtaaatcatagtgtgagatacagctgcaaatatagggaagtaagttcacaaactgttattttctaaagctaaagctaacattaggccttgctatggtagaactcttcactgggttgtttcttaaaaaaaattcacgcaactgacaggaggaattgtctttattcttgcattaatgataaatgtaatctacaagatggccttcatggattagaaaaaggaatcagaccacaaggaaaaagaaattgctggttttcactcaagatttatctagaaaagtgtactgactactggaataatagtttacccctgggttgtaccacagaatgagaaattctacaagattatacaactctttttctacaagattcactactcatattggttttattccattncggaattaggaaattaactttctaaatatcattttttttctccaaaaaaatccttttaccagctacctggatatggccaaaaatatcttgatgctgtaaaggtctatctccctagtaaaaatgaataaa

SEQ ID NO: 8460 - DNA, 551 bp, Homo sapiens
  misc_feature (427)..(427): "n" may be a, t, c, g, other or unknown
  misc_feature (443)..(443): "n" may be a, t, c, g, other or unknown
  misc_feature (471)..(471): "n" may be a, t, c, g, other or unknown
  misc_feature (477)..(477): "n" may be a, t, c, g, other or unknown
  misc_feature (512)..(512): "n" may be a, t, c, g, other or unknown
  misc_feature (523)..(523): "n" may be a, t, c, g, other or unknown
  misc_feature (533)..(533): "n" may be a, t, c, g, other or unknown
aaagctctgagcacgtgattgctagtttaattcaactgttacaccccattctgccttgtaaaaataacaaaacgctcctatcaaaatgacattgtgatgtgagtacaggctttttgttttggtacagctctaaaaaatgttggcaccgaatgcacttaagaaaagtgttaaggcttaatacaaatacagagacgagtcatttctcaatgcagcttagagggtgagaacaggatgctaggtttttaaatcttccaaatacaggcagtccccaacgtacagacatacaggacacctcccaaatgtaaacgacagccacacagcagggcttgcatgcgcaggaactcttcttctcccagtgagcagactaagcactcttgaatcccaccccactggctcgcagagggaaagaaggcaggacagatgccangaagaagtaatgtcangggcttcatacaagttgccaagggcttntgctgnagtcatattttcctcattcccatctctgggttctnccataacccanaagtccctgncaggggcggaagtaaaaa

SEQ ID NO: 8461 - DNA, 561 bp, Homo sapiens
  misc_feature (429)..(429): "n" may be a, t, c, g, other or unknown
  misc_feature (531)..(531): "n" may be a, t, c, g, other or unknown
  misc_feature (552)..(552): "n" may be a, t, c, g, other or unknown
gagtttcaaatggagtattttattcacatgttagttatcattttaacacacacacaaacactgacacactctggtttgcgtggaacaagggtggtctaaatatcctaaaagaaaatgaaaaattaaagtacattaatttttcattactgtaggcaattacgtccacatcacttacaaagctattactgatattgtccaaggaagcagagtggtacagaggaaggaaacttgagggtaaattcatcagtgacataacagatctcaacatgagaaagctgacaaaacatgaatttttgctgtgaaatttctctttgcaaaatatgaagaaaagtcaatcaatgggcagtaaataagaagtaggtggtgaacttttgctgtcaattctcctcacagtatcttgcagaaggcatcaaggaaaaattgcttagncctttttttgggaccaatttcagaacttttccaattgcaatgggcttaccctcatctctttaaagtaaaaccgaccattttggggaaaatcttttgaacgtntcgagggcaaatgggtcctgntggccttaa

SEQ ID NO: 8462 - DNA, 547 bp, Homo sapiens
  misc_feature (444)..(444): "n" may be a, t, c, g, other or unknown
  misc_feature (475)..(475): "n" may be a, t, c, g, other or unknown
  misc_feature (507)..(507): "n" may be a, t, c, g, other or unknown
  misc_feature (520)..(520): "n" may be a, t, c, g, other or unknown
  misc_feature (536)..(536): "n" may be a, t, c, g, other or unknown
catgattcaacactgatcagtgtttaccactggataaatctgagttcacactttccttctctgacctaaatgtgaagtcaggaaacacatgtgccctacttccatcctgagctcagtccccaatctcccaccagcctcaggcccctccacttctcagatcaggtcccagacctgcccatgaaaatggggagcaggctgtaacagatttgtccacatgttcctaccacctgtcccaacccagggtacccacccagagacatctggtatcatttaacaaacacattgaaggacaactggtcttcagagctgaagagagctcctagggggagaagctgggacaacagtgaaataagtagcagcagcaacgacagaagtgaatggtgacaaagactgctgtgatgagcaggtagcctatcagggtgagcttcacaagccgagcgagtntcaggatctgagaaccaaggttgggtaatgnccatgagatgtcacacccagccggaagccagnacttgcacacccngcttcagcaatagtanatgccccggca

SEQ ID NO: 8463 - DNA, 533 bp, Homo sapiens
  misc_feature (435)..(435): "n" may be a, t, c, g, other or unknown
  misc_feature (444)..(444): "n" may be a, t, c, g, other or unknown
  misc_feature (446)..(446): "n" may be a, t, c, g, other or unknown
  misc_feature (452)..(452): "n" may be a, t, c, g, other or unknown
  misc_feature (459)..(459): "n" may be a, t, c, g, other or unknown
  misc_feature (465)..(465): "n" may be a, t, c, g, other or unknown
  misc_feature (495)..(495): "n" may be a, t, c, g, other or unknown
ggttcttcccaaccatcttacgacgctttattactgtgatttcagagaagaaacaggcttacagaggttaagggcttgagaccactcaactggttttaagtggaatccagaccagaggtgccggctccacgtctactgccctttccacggtgccatgctgcctcccacaaaacatccacagtgcccttggccaatgaggggccgccatcggaggtcacaggaagccttttcacagtccctctggggcatgagtggggagcagctcttctccccagagctttaaagccccatcgaggaaggggtgagaactgacctcctgaagtgcccgagtgtgtgtgtaccgggagagtggactcaatttttatttttgaaacctcatgcacagagttccttatattccccaggtcccacaagaagtaccaggtgccatttaanaaccccttntnaacctntggccanccctgnaagcaacacgggcctttacaggctggcttncttctttggcacacaagcctttcgttccatggagaatc

SEQ ID NO: 8464 - DNA, 396 bp, Homo sapiens
  misc_feature (360)..(360): "n" may be a, t, c, g, other or unknown
  misc_feature (376)..(376): "n" may be a, t, c, g, other or unknown
  misc_feature (386)..(386): "n" may be a, t, c, g, other or unknown
  misc_feature (389)..(390): "n" may be a, t, c, g, other or unknown
  misc_feature (393)..(393): "n" may be a, t, c, g, other or unknown
  misc_feature (395)..(395): "n" may be a, t, c, g, other or unknown
acttgggttgcctttatttaacattctaaagaatgattattaaaagtcaaggaccatatttagatctttcctaacaaagaagaaataatgcttgttccataagtaagccaaaaattttctctggttaatcaggtaactcccaagctagtaagaacttcttctgggactctttatccacttttctacaggaaacagaactactgcaggcaagggtacctttatcttattgcataagtatgcaaatattgcctaaacaagatcagaaaactcactaaatgagtagaatggtgagatgagaacatccttagatacattaagagctaaacaggatgcaaatcagaaaacaatttcacttaaggnttgcttggcatctttnacattagccnttnntgnanc

SEQ ID NO: 8465 - DNA, 548 bp, Homo sapiens
  misc_feature (427)..(427): "n" may be a, t, c, g, other or unknown
  misc_feature (490)..(490): "n" may be a, t, c, g, other or unknown
  misc_feature (499)..(499): "n" may be a, t, c, g, other or unknown
  misc_feature (503)..(503): "n" may be a, t, c, g, other or unknown
caggatatgaatacagtttattacagttttcagactcccattacgacacatatctaaagctgaacattgcaaactgaccttactagcagcaattctccctagacaggaagggtttcagttaatttagcaattaggagtaaagacaaacttacaagtcatggtttttcttgtagcagctggtatatgagcagtgaaactatagatacgtagagtcattcaggtttagccttgtctaaaaaaacattaataagttatggtgcagaggagtatccccagggttgccaaagagaaggctgatgtctttagatgtcagtatgaaacaagcaaatcactttcaagacatggcttactatttgctttactgtcaggacaacagaaaaagaagtgggcagctaccctagattctagctcacacataattcagccngataatcatcatttaaataataccccttggaaattttcagacttttcacagggtcttaaaacnccaccatcngacntaacatccacattgttccaaaggactaaaatcaaaagcatttgca

SEQ ID NO: 8466 - DNA, 541 bp, Homo sapiens
  misc_feature (393)..(393): "n" may be a, t, c, g, other or unknown
  misc_feature (428)..(428): "n" may be a, t, c, g, other or unknown
  misc_feature (435)..(435): "n" may be a, t, c, g, other or unknown
  misc_feature (460)..(460): "n" may be a, t, c, g, other or unknown
  misc_feature (529)..(529): "n" may be a, t, c, g, other or unknown
agaaaaggtggaaatggccttttatttaaatatgaggaaaaaattagaattaagtacagtaagattatttttaaaaaagcagacaagttagaacaaacattttattattaaaataaacttttgtataaaagcattacagatcaaaagctgtatttacacttatcgattcaaggtccaattatgcatcaaacattgaatggcacagcaatggtttacatatgcaagtaaattggacatacaaacacttagattccacctctaccaaataccttgattaatgcaaagaggagggggaatactgacacaggaaacctgcccagaaactagactggcagagatgtcaggttaacaaactgctaaaagttacatcttcaaaaaggcacttatcattgntataaaagtgcttaaaatctaaacttgaaccttgngcctggnttataaattaccagaaactgcaagnacccagactagttttaatatcaagttccatccaaaatggccagaatttattgcataccttcatgtgacnggaataacttgg

SEQ ID NO: 8467 - DNA, 531 bp, Homo sapiens
  misc_feature (471)..(471): "n" may be a, t, c, g, other or unknown
  misc_feature (476)..(476): "n" may be a, t, c, g, other or unknown
  misc_feature (509)..(509): "n" may be a, t, c, g, other or unknown
gctagtttagtgtttgcatttattttaaaaatacacaaaatagaaatttttacatcaaagtgtgataacctcacttacacattgttccatacttacctggttttgtttgcatctttctgcaaacattaaaaggagatggatttgattctgatttttttgctatggttcatgtaaacagttgagactgctacataaagtaggttgttgtcaaaggtgaagtggccacagaatcccaagaatagaataattcaatttggtttaatgaaattggtggaggtcttagcagatagataatccaagactaaatattgtcttctaggcattttaaaaattaagaactttgaggttttcttcatgttgtaaacataacttagaccttggtggcattaagtttaccaaagaaaatattaaaccatgattttatcatcctggcccatgtcagtatcacactctttattatgagaatgaaanccaantaataagccaaatccatcaggaattcaaatggnctggcaaagaaggtcccactgg

SEQ ID NO: 8468 - DNA, 459 bp, Homo sapiens
  misc_feature (373)..(373): "n" may be a, t, c, g, other or unknown
  misc_feature (395)..(395): "n" may be a, t, c, g, other or unknown
  misc_feature (412)..(412): "n" may be a, t, c, g, other or unknown
  misc_feature (417)..(417): "n" may be a, t, c, g, other or unknown
  misc_feature (419)..(419): "n" may be a, t, c, g, other or unknown
  misc_feature (429)..(429): "n" may be a, t, c, g, other or unknown
  misc_feature (444)..(444): "n" may be a, t, c, g, other or unknown
gctcataaacaattttattttttttctcagtatgtgcccttgaagattccaaaatgttggagtttctgattctcctgggatcaaaggtaaaagcattgtatggaaacactcaaccttggctcattaccctcctgaggagctaagtctggaggcctcagagagagggagctgacattcacaacttattccaagatgggtaacacagtgaacaaagaattagtaaaacatagactcagtctgtagagggcttcaaatatacatattctatatatataaacctgttatataggatttcaacttattggtttccttgtgatttgtaattaacgtacaaattataaagatgttgcacactgctgatttccccttcttnagccccccttccttcccaaccntaaataccattccaaanggcangnggatcctaanaatttttggtggtgnaaatattttggtttt

SEQ ID NO: 8469 - DNA, 545 bp, Homo sapiens
  misc_feature (87)..(87): "n" may be a, t, c, g, other or unknown
  misc_feature (179)..(179): "n" may be a, t, c, g, other or unknown
  misc_feature (186)..(186): "n" may be a, t, c, g, other or unknown
  misc_feature (232)..(232): "n" may be a, t, c, g, other or unknown
  misc_feature (269)..(269): "n" may be a, t, c, g, other or unknown
  misc_feature (371)..(371): "n" may be a, t, c, g, other or unknown
  misc_feature (377)..(378): "n" may be a, t, c, g, other or unknown
  misc_feature (469)..(469): "n" may be a, t, c, g, other or unknown
  misc_feature (472)..(473): "n" may be a, t, c, g, other or unknown
  misc_feature (477)..(477): "n" may be a, t, c, g, other or unknown
  misc_feature (512)..(512): "n" may be a, t, c, g, other or unknown
  misc_feature (517)..(517): "n" may be a, t, c, g, other or unknown
  misc_feature (537)..(537): "n" may be a, t, c, g, other or unknown
cacattaaaaaaataggtttaatgcaggtgggtcatggcatgacgaatttcacaggcaccggggacagcaggcggccaggtgctcanagggcaccaaggtgccacaactccctgcagcgttgacaccgcacgagcggcaccaccagccccctcccgcctcccgtcccaccttcaccctnagccaanaggcttgggtgactctgagtaatacgttaacaaaaaacaaagcttntttgaggaaacagcatgacttagtgcaaaagattctntgcagcaagaaatgaggcccacgcagggaagctcccgcctacctgcccagggcgtggacgcagcccgggctcatcagaggtcatccacagaagctgccgatnaattannagagccccggttacggccagaaaatttttgctttctctacctgatttaagggttttcaaaaagtttctcttccattgggacacaaatggtnctnntggnttctggggccacttgttccgcctgacaggggtaangtccncaggtccaaccattgcccanaagtgtgg

SEQ ID NO: 8470 - DNA, 517 bp, Homo sapiens
  misc_feature (443)..(443): "n" may be a, t, c, g, other or unknown
  misc_feature (478)..(478): "n" may be a, t, c, g, other or unknown
  misc_feature (502)..(502): "n" may be a, t, c, g, other or unknown
gaactttgacgagcattttttattgaacagttttattctgttttagaataaaaactttgctttaatattgtaaggggtactgcaggtatgccatgctgccagttattgctggggcacaaaacgccccagtcagtgattcggagggctgggaaaacgcataaactcataatttcagagcaagtagaactagtatttacagttttctttcttgaaattggcccgggacatctccaacagtctacacatgtattgccatggtacttgctctgatgctctgaatgcctcggaactgtgttcaatatcatgatttgtgggtcctctaaaaggttttgttgttaacatgcaagcaaacagcactgaacaatattgtctaaactatggctgccaagtactggatcttcataatgaaaccaaattaccaaacactggcttgtagagctatncaaagatttaaatgaaaataaaaaatgtcaacagncttaaatattcaattctctacagngcagttctatttttt

SEQ ID NO: 8471 - DNA, 562 bp, Homo sapiens
  misc_feature (506)..(506): "n" may be a, t, c, g, other or unknown
  misc_feature (511)..(511): "n" may be a, t, c, g, other or unknown
  misc_feature (518)..(518): "n" may be a, t, c, g, other or unknown
  misc_feature (524)..(524): "n" may be a, t, c, g, other or unknown
  misc_feature (553)..(553): "n" may be a, t, c, g, other or unknown
gggcccgtacattatgaagacattcgggaaaatgaggcccggcaacttggtgttgggtattttgcctttgcccgagacaaagagttgagaaacaagcagatgaaaaccttagagatgctgcgtgaacagacaacagatcagagaacaaaacgagaaaacataaaggaaaagcgaaaggctatcttaggggcaagacttgccaaacttcgacaaaaaaagatgaaaaaatcaaaagaaggtggaacagaagaagaaaatagagatggagatgttattgggcctttgccaccggagccagaggctgtgccaaccccacgtcctgctgcccagagtagcaaagtagaagtcattgtccaggagaggaaggacaccaagcctggagtgccacacatccgggagtgggacccgcgggaaaagaattttccttttggatactggtcgaaaaagcagtcagatctccgggcttaaaagaaaatccttgagttttgccccgccgtcagaatacnttggngggtcanaagaanactgggttttccaaccagccaggcttggnccaaacctg

SEQ ID NO: 8472 - DNA, 513 bp, Homo sapiens
  misc_feature (422)..(422): "n" may be a, t, c, g, other or unknown
  misc_feature (457)..(457): "n" may be a, t, c, g, other or unknown
  misc_feature (461)..(461): "n" may be a, t, c, g, other or unknown
  misc_feature (483)..(483): "n" may be a, t, c, g, other or unknown
  misc_feature (492)..(493): "n" may be a, t, c, g, other or unknown
  misc_feature (507)..(507): "n" may be a, t, c, g, other or unknown
gaatctttaaaaattctatttgagacccagcacacaagaatacgatagatgtcctcaaatgggggcttggctcacaggtggaaggacactaaattggtcccatctgatttcttgaggcaagggttgaacctggcttgcacaaatcacacctgtccaaagcaaccacgagttctactattttgcagcccttgctgctgggcgacgacgacgacctctctgcctcttctttccaccactacatcgcctcctggggcagcttctccctactccaccctgtatacctttcccagaatacagaacctcaggccaaagagagatgccagccccattaatcacctctactgtaccccaatcatattacggaaagtcagacccaggaaaacaaggacttaaaaagccacgcttatagggcaaaattccgnttgctggcttcaagcccttatttcccgcttaaatngaanggctctggattatagcccgcantaaatttanngcctcctaaatatnggttgt

SEQ ID NO: 8473 - DNA, 538 bp, Homo sapiens
  misc_feature (410)..(410): "n" may be a, t, c, g, other or unknown
  misc_feature (441)..(441): "n" may be a, t, c, g, other or unknown
  misc_feature (518)..(518): "n" may be a, t, c, g, other or unknown
  misc_feature (534)..(534): "n" may be a, t, c, g, other or unknown
  misc_feature (537)..(537): "n" may be a, t, c, g, other or unknown
ggttttaagaagtaccaatttaataatgaatacttagaaatatggtacacagataccatagtaatataaaatgcatacaattttaaattattttcttataaactctctacatgaatggctggcggcttccaacagataaacttttggacaaaggtacaagatatttttgggcattcattttaaataccatctagttatccaattaggaggtttctaaaaaaataaatatgacaaatatatggatttctgaagtataaactgacatacaaatctatatattttcttaatacttttcattaaagcatctttaaagcattctgtaacatgaagttgagagttcaaattagatgtaatgaaaaggcatgaggttttattagaactgtgtaattcacatatcaaaatttttaccntaaaagttaaccaaccccaaattggaaagcnaaatacggtattttactcttccaggtaccaatttcagaaaaactactcctgggaaaaattaatattcccaattctgnaaggtaataggaaacnttnt

SEQ ID NO: 8474 - DNA, 530 bp, Homo sapiens
  misc_feature (317)..(317): "n" may be a, t, c, g, other or unknown
  misc_feature (487)..(487): "n" may be a, t, c, g, other or unknown
  misc_feature (489)..(489): "n" may be a, t, c, g, other or unknown
  misc_feature (491)..(491): "n" may be a, t, c, g, other or unknown
  misc_feature (499)..(499): "n" may be a, t, c, g, other or unknown
  misc_feature (506)..(506): "n" may be a, t, c, g, other or unknown
  misc_feature (516)..(516): "n" may be a, t, c, g, other or unknown
gtattatgctcaaactaaggcattttattagctggctttacaacttaaataatatcttggctttcaaaggaacagcttccactaattccaaattaaactttcacaagtttacttgtttggggagggacattcttatggtcaccacaaaatacttttattataaccttccccaaatcttttcttagcattaactggaaaaaaaaaaaaaaaaaaagcttaggtcaaatatcaactgcctgaaaaacccaattaagttacttttccttaaaacatgtgcagtataattgaatcaaaagagaaaactgcaaatacattgngctttggccagaagtagagttcatttcatgatgattcagtatcttcagatactatttttgacacttgccataaatcttagcaaagtaaatccatttattaacgtttcaaaggcaaagttggttttaacattagactttctttggcaactggcaacttaaaaattttgcanangngattattnaaacctntttggagctnaatttagcttttaa

SEQ ID NO: 8475 - DNA, 537 bp, Homo sapiens
  misc_feature (524)..(524): "n" may be a, t, c, g, other or unknown
aacaaatccaaagtttaattattaaggattacaaatatttttagcagtgtagttaggcaatccaagcctggacttccacttcattcctactaaactacttgcagagctgaggaggcaggagactagagtacagagagcattttagttttatcacaaaggtctagaactgtctctacagtcacaggaagaaacaggtatggcaccgtggccagaagggggtaggtattcacagagagtgggtatcaaggtgtcaaactttgtcttctgatagttttccagagattcctgtagagaagggagcagggagagcctactatccgaaaccattccctgaaccctctgaattctgaagcatgtggatttctcagtcttgttctacccatcccctttcccagctttctgctcctttccactcacctttccttccccctggccattttcttccccatcagagtctaaaaccaaagtcccctatggtaatgacggactgacagagaccggaggaccactgtaggagggaaccngaatcaaacttct

SEQ ID NO: 8476 - DNA, 538 bp, Homo sapiens
  misc_feature (81)..(81): "n" may be a, t, c, g, other or unknown
  misc_feature (479)..(479): "n" may be a, t, c, g, other or unknown
  misc_feature (498)..(498): "n" may be a, t, c, g, other or unknown
  misc_feature (502)..(502): "n" may be a, t, c, g, other or unknown
  misc_feature (522)..(522): "n" may be a, t, c, g, other or unknown
cttcaaattgcttttattatacagttgtaatggtattaattataaacatcaagtctattttcacacaaatcgtcacgagtncacactgataaagacatgcgctgggtaagagtcattattggtacataaacatactgggatttgggcataaaaacacagtatcaattaatagctttagcagtctcaaaatagacttcaacgacattcatatatatttcctaatttaaattgtgttagaaacattgcatctactttgaggaacaaattctgtaacagaagagggaagacaggtaggcaagaaggcaggagatttttagttgtatactaaggtttagttttggcacattgaaagtatcatttttcctattagatttctgaatttgtgaacaaacattaacagttgctgttctttaatatgacctcattcatactatatttgtgggaaaatacaactttagttttttctggttacttatttntttaattttccactattgntcantggaaggacttacccaatantttttagaagaaagaa

SEQ ID NO: 8477 - DNA, 538 bp, Homo sapiens
  misc_feature (432)..(432): "n" may be a, t, c, g, other or unknown
  misc_feature (460)..(460): "n" may be a, t, c, g, other or unknown
  misc_feature (483)..(483): "n" may be a, t, c, g, other or unknown
  misc_feature (485)..(485): "n" may be a, t, c, g, other or unknown
  misc_feature (500)..(500): "n" may be a, t, c, g, other or unknown
  misc_feature (526)..(527): "n" may be a, t, c, g, other or unknown
gttcttcaatttgtttctgatctacacattcaaaagatgattcaaactcctcattatccttaaaagctagcttgtccacatctgaaaattcacttttgtcttgaagttcagtttgtcttcgataaagacccactttctgctccggagggctggagacaggagggatggagaggctgtgcctagactcagtgggtgatggtaggggcattctgtcaggacaaggactgggggaagcaatgtgtgatctgcccagaccttccagatacatttcactttcgaggcttctttttgcttttggaaggggtgtggaagagaggcgtctggaggaagtgcccccgcggagcctcgaggctgcactgcctgtcagtgcttccacgacgtcattcctttcttcaagtgtgcccacttgaggctgctcaaagacaactctgncctcttcaaaaatatggcttttccgggnactggaaataatggtttttgaangntttccaccagggccnaaaatgggggggctctttgctgctanngggcctttggg

SEQ ID NO: 8478 - DNA, 542 bp, Homo sapiens
  misc_feature (407)..(407): "n" may be a, t, c, g, other or unknown
  misc_feature (490)..(490): "n" may be a, t, c, g, other or unknown
  misc_feature (494)..(494): "n" may be a, t, c, g, other or unknown
  misc_feature (502)..(502): "n" may be a, t, c, g, other or unknown
  misc_feature (513)..(513): "n" may be a, t, c, g, other or unknown
  misc_feature (526)..(526): "n" may be a, t, c, g, other or unknown
  misc_feature (538)..(538): "n" may be a, t, c, g, other or unknown
cttttttttttctcattaacaaagcagtcaattccctttatttttaaaattttatgtacacatatgaatgatctgtataatgtacattcaatatagaaagctttatatatttgatagtgtatagaacatttcacaattacactcatcttttacataacatcttgacatccatttttaaatttttttgcacaagctccttttcattcaatttggtaaagccagttatacatactaatgtgtactgtgagctttcagaaggttaatgattgaggatgccagtgaagggtgcagggacaaaacctaatagtcttggatggtggggggaggatggccacgcagacttgatgcaggagagggaaatattctttcctggggaaaagtgacttagcccaatttttggtgactgnagctcaaccctacagtcatgctagttcaaaaaaaaaatttccaaaactaggaagaaaggtttggctttttgatcacagtttgnaacngatttaanggaccaatggngcttcatcccccngaaaaaaaattntggg

SEQ ID NO: 8479 - DNA, 534 bp, Homo sapiens
  misc_feature (455)..(455): "n" may be a, t, c, g, other or unknown
  misc_feature (481)..(481): "n" may be a, t, c, g, other or unknown
  misc_feature (484)..(484): "n" may be a, t, c, g, other or unknown
  misc_feature (488)..(488): "n" may be a, t, c, g, other or unknown
gtcctgctgttttcttaaaaacttttttttgataccaatatcttcttatggtcagagtcacaggcattctagatgtagaagcttaacatcctctttggtagttatattttctgacaaacattcactacaaatgtaccaagaaaagagaaggccagcctcgacctcgctgtggcacatgagttatccttcaacaggtgtaggcattttgagtcagagaggcctggacaatgaagagacagcacctcaggcagccttgccaggagccactgggtttcatcctggcctgacccagaaaaatcttatggaagagaacaagaggcccaagagctctctgatctgctgtcaaccagctgcagccgggagactgccaaagcgcttgcagtgactaggcagcggccctacagaagcccgctgggaaggggattaccagcctgatcccttggctttagaagccngaaatggctcaactttacaacagcanggnctgncagggagggggccatgaccctggaaagggtttttccccttgtgggg

SEQ ID NO: 8480 - DNA, 487 bp, Homo sapiens
  misc_feature (423)..(423): "n" may be a, t, c, g, other or unknown
  misc_feature (430)..(430): "n" may be a, t, c, g, other or unknown
  misc_feature (441)..(441): "n" may be a, t, c, g, other or unknown
  misc_feature (449)..(449): "n" may be a, t, c, g, other or unknown
  misc_feature (454)..(454): "n" may be a, t, c, g, other or unknown
  misc_feature (478)..(479): "n" may be a, t, c, g, other or unknown
agatgaacaccgttttctcttgtttatttaaatttgggagccaaatggtatggagaaggtaatgatggttttcaaaatacagtaagtcttcatttaacattgttaatagaacaatgaaaactccaacttttacgtgaaacagtgtatagccagtcctcaaataactgccttttgttcaacatcctttccttgtaacaactgatgagaaaaagtatggttttgttatacatcatttctcttgaagtacaagttttcaagaacctattgacaaggttaagtgtgggcttacagtttaccaatcttagcctcagattgggctagggcagggatgacaaaccaggctcttgcatgggtctttaaatggactgggcaataaatgaagactttggcctgtaaattcctaaatagcttctttgcttttgncctttangaatgcacagnctcattgntacangccatcttatggtcagtagaatcnnacccgaat

SEQ ID NO: 8481 - DNA, 530 bp, Homo sapiens
  misc_feature (389)..(389): "n" may be a, t, c, g, other or unknown
  misc_feature (405)..(405): "n" may be a, t, c, g, other or unknown
  misc_feature (408)..(408): "n" may be a, t, c, g, other or unknown
  misc_feature (430)..(430): "n" may be a, t, c, g, other or unknown
  misc_feature (454)..(454): "n" may be a, t, c, g, other or unknown
  misc_feature (482)..(482): "n" may be a, t, c, g, other or unknown
  misc_feature (506)..(506): "n" may be a, t, c, g, other or unknown
  misc_feature (530)..(530): "n" may be a, t, c, g, other or unknown
aaattaaccagatctgtcttttaatagttaccagaatttagatgttaattccccagaggaaaaatgtccatggcacagtttttctggaaaagttcacatgtagacagtgaagcttctgaagttaggcgtcaaattagtagtgacaatcttttttttaatcttgaaagtccctagttttaaagaaagtagaatccatctggggcatgtctgcatcacagggtatcactcaagagtcatcatcaggccaaaaagactctgaagggaaccaggagggtttggcccttgctgtggaaagatgctactgaaagtataagagaacaccctaatgcacgcgtcaggcacgaaacccgtaccatgccccgctaagacatgggaccagagaacacgtnaacgtcaaggccggtncangaaaaccattcccaagaccacngaagctacccgaggtcgacactgncatgaaaagtgttgctgaaccgcagttnccagggctttactggccgaacatncctaaggcacggttgggcttgttn

SEQ ID NO: 8482 - DNA, 497 bp, Homo sapiens
  misc_feature (453)..(453): "n" may be a, t, c, g, other or unknown
  misc_feature (455)..(455): "n" may be a, t, c, g, other or unknown
  misc_feature (459)..(459): "n" may be a, t, c, g, other or unknown
  misc_feature (473)..(473): "n" may be a, t, c, g, other or unknown
  misc_feature (475)..(475): "n" may be a, t, c, g, other or unknown
  misc_feature (483)..(483): "n" may be a, t, c, g, other or unknown
  misc_feature (490)..(490): "n" may be a, t, c, g, other or unknown
cctttcacaaaatggatttttattgtggtcatacatggtttctcagtgccacagaaaattgctatgtagggacaaaaaatttttggatggctctgtaaagaaacatggtaggttttcagaaatgagttgtgcaggaatgtggttaatgaaaagcagaaagggttaagggaagagaaaggaagccaaggagtgtggtatgtacatcaaatgattactttttaagcccctctaggctctgataaccctttccccaagtcagatcccaacaaaattcatcagtaactgaagtgattgtgctaacagatacataaagactaccggagaaaagtgggttgagatgggctcagacttattgttaggacaactctgggagtcttgtgtctgtgccaaccacgtatccgtgggctacctggagatgaagttctaacaacccagcacagaacccaaagctgntnttcnacacctttggttantnggggaaanctttatnggggcca

SEQ ID NO: 8483 - DNA, 526 bp, Homo sapiens
  misc_feature (441)..(441): "n" may be a, t, c, g, other or unknown
  misc_feature (501)..(501): "n" may be a, t, c, g, other or unknown
  misc_feature (515)..(515): "n" may be a, t, c, g, other or unknown
  misc_feature (521)..(521): "n" may be a, t, c, g, other or unknown
gaaaagtcatcacaatcagtttaattaagtgcacagaatagcaatcaatcaatcagtcatgtcaataaaaataaaacaattatttttacatcaagtgtgctttatttcctccacaggtattctgttaaataaagcaccatttatatactgccaggccacagctaaagaggattctttacagaatcaaatttcttgtggttgttccgtatacaagtaaacttaattttgataataagaaccacagcgatcggaggcaatctgcctctataaggtacaaaactggcacagaggacaccatatcatacacagtaaaaatgctgtaagtttaaattacattgtacagggctaggcaaccctgttcttcccagacagccatattaaatgaaagccactaaagtgaactcttaattacataaaacatatccattatctggatgcccnttaaggaagtttactggaaatgccaggtttttcatctggaggtttttgcttgcccaaaanttaaccctttaaancttttntggcc

SEQ ID NO: 8484 - DNA, 493 bp, Homo sapiens
  misc_feature (435)..(435): "n" may be a, t, c, g, other or unknown
  misc_feature (441)..(441): "n" may be a, t, c, g, other or unknown
  misc_feature (450)..(450): "n" may be a, t, c, g, other or unknown
  misc_feature (457)..(457): "n" may be a, t, c, g, other or unknown
  misc_feature (459)..(459): "n" may be a, t, c, g, other or unknown
  misc_feature (483)..(483): "n" may be a, t, c, g, other or unknown
  misc_feature (488)..(488): "n" may be a, t, c, g, other or unknown
aaaagaaaaatgttaagactttattcaagatgtgtatcaggcattataacaaaacagcagaacttcaacctttggaatactgtaattttacatccctttgatgcacagtccagtatactattttattacagatcattctatagggactacagacatgaactagaggaaatgtgcacagtcacaatccagaatatcagctctgggagtgtacactgtttgttagaggatgaagcacatcctttgccatttcaaatactgtgccaggtggaggactaggaaggctcaaagatggtcatggttgacaagcactcttatcacaaacacatggatagcttatcacggagaacacatttcaaaggccagcaaagtgagcaagctattcacacaaagccaggagggattatgactaaactctccagtttataagcacaagtncacatntcacctctnagaacangngctcaatggcattacttaaaggtnttgcntggac

SEQ ID NO: 8485 - DNA, 551 bp, Homo sapiens
  misc_feature (444)..(444): "n" may be a, t, c, g, other or unknown
  misc_feature (480)..(480): "n" may be a, t, c, g, other or unknown
  misc_feature (505)..(505): "n" may be a, t, c, g, other or unknown
  misc_feature (545)..(545): "n" may be a, t, c, g, other or unknown
  misc_feature (551)..(551): "n" may be a, t, c, g, other or unknown
ctgtttatgacactttattgatgctgggggggtggggaggagacctggagaaatatgtgggggcaagagtccccaggtggggacagggaaagtgttgaagcctggccactactgggcagggaagacagagttgccactgtatgcacaggggatgagcagctgccggtactccaggggcaggtgccgctccactagcacgtgcagtgagacttggtcagtgaccaggccctgccgccgcatcagcagctccaggtcctctggcttcacagtcttgcggccagcatgagcagcaaatacctccagatcatcacaaagatgctggaaatatttatctaggcacttctccaccatctcaagagccttcctctccatgggcatcttggcatagaagctaaagagtttcacatagtgggctcaagtccaaccttgtggggatctttgccngggcctggggcccgtggtcccgggcctaaggggatnctgaccacaaaaggttttgaagctntgaaaataaaattgagcaccagcccttgggcttggttaanaaactn

SEQ ID NO: 8486 - DNA, 549 bp, Homo sapiens
  misc_feature (448)..(448): "n" may be a, t, c, g, other or unknown
  misc_feature (480)..(480): "n" may be a, t, c, g, other or unknown
  misc_feature (492)..(492): "n" may be a, t, c, g, other or unknown
  misc_feature (512)..(512): "n" may be a, t, c, g, other or unknown
  misc_feature (528)..(528): "n" may be a, t, c, g, other or unknown
  misc_feature (549)..(549): "n" may be a, t, c, g, other or unknown
attttagtagagagcgggtttcaccgtgttgcccaggctggtgttgaactctggagctcaggcggtccgctcgcctcggcctcccaaagtgctaaggttacaggcttgagccaccgcgcccggcctcaaaacacttttctccacttattggccaagacacattattactccctgtttgcaagtgagaaaacagaggcacagagaggttagtgtttggacatggtcacacagccagttaatcatatgaccacagaggctggatctcctgagttttaaactgagctgtcattcagtccatagccatttattgtctttcctcccagccacggcgcctttcctgtgctcgctcatgagcttctgtgttatgaagaatgaagcatcaaagggtagtgtatggttaactctggcgtcttcccacttcggtggcttattaattctcaagggcagnctcataggagaggatattcaggcatgccagcnggtattgggtgnctactggggtcacttctggncctttacaccagcctntggggaaaagttcttacccan

SEQ ID NO: 8487 - DNA, 550 bp, Homo sapiens
  misc_feature (440)..(440): "n" may be a, t, c, g, other or unknown
  misc_feature (503)..(503): "n" may be a, t, c, g, other or unknown
  misc_feature (506)..(506): "n" may be a, t, c, g, other or unknown
aagtggccactattttattaataatgcacataacatatgcttatcattaactcttaaaaagattattatttaactatacaagaactaccatacaacatttcaacatacaagttcctatacttcttaagatacacaataatattttgaaagattggaaatgtttcccaaggactttcctatcacaaatcccccccagtaaaaattataggaactgtggaatatggctgctaatattctgagatgaatttagaaagtataagtattgagagatggactttattatagcacctgtagaagaaccaaattcaggcatttatcccatattttctgaaatatttacaaagctcttataacattttcaaataacatttaatttactaagttctatttcatggcaaataagaatcagaaaatttgaggatgctattttttaagttttnccaatacagcttaagcttttgggataaagctggtttactaaaaaggatccggtctcaattggnggngctcggtctctttggcaatttagagccctggttaagcacatgca

SEQ ID NO: 8488 - DNA, 540 bp, Homo sapiens
  misc_feature (453)..(453): "n" may be a, t, c, g, other or unknown
  misc_feature (469)..(469): "n" may be a, t, c, g, other or unknown
  misc_feature (485)..(485): "n" may be a, t, c, g, other or unknown
  misc_feature (500)..(500): "n" may be a, t, c, g, other or unknown
  misc_feature (514)..(514): "n" may be a, t, c, g, other or unknown
  misc_feature (518)..(518): "n" may be a, t, c, g, other or unknown
  misc_feature (527)..(527): "n" may be a, t, c, g, other or unknown
ctagaccactgagaaaatctttatttacaataaatttcaataaaatttgcataaatatattcccaatgtacaattttcacctctgatttcttcatatcatttaaaaagttagtctgtcctgttctccttattcctttcagacaccagtgtggcgctgacattggcaggtggaggggagctgccagggagctggggggtggctgagggctcaggctgcttggggtggacctctctctgggccgccaggctttcagctccatccctgccctccagtttcctctccatggtcgccaccaggatcttgagccacgtgttctcggtaaggaggttttctgaggcatcggccagctcctgcagcttgcgggccagctcctgcagctcacgtggtcttctgctcatagagggcctgcactgctcactgtgtgcgtggagcaagctgtgctggtcttccanggccccctgctgctgncgaacccgggctcaanttttcggcactgganaacttgggattcanctgnacttgggcncctggaggtggtt

SEQ ID NO: 8489 - DNA, 537 bp, Homo sapiens
  misc_feature (389)..(389): "n" may be a, t, c, g, other or unknown
  misc_feature (417)..(417): "n" may be a, t, c, g, other or unknown
  misc_feature (432)..(432): "n" may be a, t, c, g, other or unknown
  misc_feature (471)..(471): "n" may be a, t, c, g, other or unknown
  misc_feature (486)..(486): "n" may be a, t, c, g, other or unknown
  misc_feature (488)..(488): "n" may be a, t, c, g, other or unknown
  misc_feature (515)..(515): "n" may be a, t, c, g, other or unknown
  misc_feature (532)..(532): "n" may be a, t, c, g, other or unknown
gacagtcccacacaaatcaatttttaataatttcaacttgccaccagctccaaatccagctgccttggggatttatcaccagggaaaacactaaatgccccaggctgagctatccatccagtgatcagatgacccagcctgtgatctcttaagaacctacatctacacatggcagcctgttagtggcttctctggaactagtgcatagctgctcaatgttagagccagaactctggttcccagggagggcgagtatcccaaagagatttgaggttaaatggatggcagtccaggtggtcccagacatgctctcactgctgaattcctgcacttactcctagaatataccagtgctgtttgctcccgccatcctgagggctttaaaaagngctttaaaaagggaggatctcgaagcancaagctttttcaaangcactgttgggaaagcctatagtgggtccatggaggctnttccaagggaggaancncaagccaacttcccataagtcaggggnatttgcctggggccccnccaat

SEQ ID NO: 8490 - DNA, 534 bp, Homo sapiens
  misc_feature (281)..(281): "n" may be a, t, c, g, other or unknown
  misc_feature (447)..(447): "n" may be a, t, c, g, other or unknown
  misc_feature (483)..(483): "n" may be a, t, c, g, other or unknown
  misc_feature (495)..(495): "n" may be a, t, c, g, other or unknown
  misc_feature (497)..(497): "n" may be a, t, c, g, other or unknown
  misc_feature (516)..(516): "n" may be a, t, c, g, other or unknown
  misc_feature (522)..(523): "n" may be a, t, c, g, other or unknown
gaggtatctttggaaaatttaatttggaccatattttcttcctctttctgaaaacatcaaatatccccatacagtttgggttccacagcttacaaaggggcagtgggtttcccgcagttacatactgtacccaactttctatagaaagataaaacattttccaaccttgcttttgagtatttcctaaaaaatgctttaaagtttccttacaataaatggcaagtaaaacaaagtaaggctttttttttctccttttcccctttttatgtactgcatgttcnaggaataaggaaggaagactagttccatcagagtactagtaatcctagtaccctggggattactgctggatcctcccaggtatacccctattattgaggccctgatgcacccctgcactgaggaacctgagaagggtaagtactaaacaggctgcatagccacgtnggactgttacaagcacaaggtgggactgggaagtcnccaagtcttctngnggttaccaggagtaccaanggactnnggcttaaccct

SEQ ID NO: 8491 - DNA, 530 bp, Homo sapiens
  misc_feature (391)..(391): "n" may be a, t, c, g, other or unknown
  misc_feature (417)..(417): "n" may be a, t, c, g, other or unknown
  misc_feature (444)..(444): "n" may be a, t, c, g, other or unknown
  misc_feature (465)..(465): "n" may be a, t, c, g, other or unknown
  misc_feature (476)..(476): "n" may be a, t, c, g, other or unknown
  misc_feature (487)..(487): "n" may be a, t, c, g, other or unknown
  misc_feature (495)..(495): "n" may be a, t, c, g, other or unknown
  misc_feature (521)..(521): "n" may be a, t, c, g, other or unknown
gccttgaaatgtttttaatagaattggtctagtaatcattcaggatttcggtgatgggccctccctgtccggacactgccaacccacagctggaggggcacttaaggcacgtcattttgtgattagaattacacaaaatttgattaatattatagctgcaaaattaacatacacaattttcactcataatttaaaatattttgatgaaattctttgctttcacaatagaagatcaatggtacacagtatattgaactctgtaacaaaattatttttgagaaaatacagaagtgagaaatagtgatttcctcaatttgtttatagtctatcacaaagtaggccaaagttcagtattaaatagatatcctaataaaagtttttacaagttttnctaaggaaatccattcataagactgnttaccttctggttgacagcagtgacangaaccgtgggggatccccctnatggacgagtncctagccttangccctggnacccaaggccccgggggcgctccgtnacctggtag

SEQ ID NO: 8492 - DNA, 454 bp, Homo sapiens
  misc_feature (38)..(38): "n" may be a, t, c, g, other or unknown
  misc_feature (203)..(203): "n" may be a, t, c, g, other or unknown
  misc_feature (244)..(244): "n" may be a, t, c, g, other or unknown
  misc_feature (261)..(261): "n" may be a, t, c, g, other or unknown
  misc_feature (290)..(290): "n" may be a, t, c, g, other or unknown
  misc_feature (299)..(299): "n" may be a, t, c, g, other or unknown
  misc_feature (398)..(398): "n" may be a, t, c, g, other or unknown
  misc_feature (415)..(415): "n" may be a, t, c, g, other or unknown
  misc_feature (417)..(417): "n" may be a, t, c, g, other or unknown
  misc_feature (428)..(428): "n" may be a, t, c, g, other or unknown
  misc_feature (437)..(437): "n" may be a, t, c, g, other or unknown
  misc_feature (443)..(443): "n" may be a, t, c, g, other or unknown
  misc_feature (447)..(447): "n" may be a, t, c, g, other or unknown
gggcatatttatgcagttgtttttatttatccaactgnaaagactgcagcaatttttttgatgagtaatgccttagattaacactaattatattgctataaatttggttcaggatcagaatagggttcaggaaagggagagaacaaaaaaaaaagtctccaaacattaaaacagaaaaatgcttttttttttttttttttganactgagtcttgctctgtctcccaggctggagtgcagtggcncaatctcagctcactgnagcctccgcctcctgggttcaagcgattntcctgcctnagcctcctgagtagctgagattcaggcacacgccaccatgctcagctaacttttggatttttagtacagacagggtttcaccatgttggccaggctggncttgaactcctgacctngngatccccccgnctaagcctnccaaangctngggattc

SEQ ID NO: 8493 - DNA, 542 bp, Homo sapiens
  misc_feature (430)..(430): "n" may be a, t, c, g, other or unknown
  misc_feature (480)..(480): "n" may be a, t, c, g, other or unknown
  misc_feature (502)..(502): "n" may be a, t, c, g, other or unknown
  misc_feature (515)..(515): "n" may be a, t, c, g, other or unknown
  misc_feature (530)..(530): "n" may be a, t, c, g, other or unknown
  misc_feature (539)..(539): "n" may be a, t, c, g, other or unknown
agtttttagcttctttattcatttgaacacttcaatattctgtcttcttcaatgattcccccttgcccgtattttcagctggaacagtttctcattttccctatttctgaacactttcaggggcttccttcagtgaagcccaacacacaaaacgtccctttcagcaaaatctcagcggtggtgctaagggactaacacagactttaaggtcacaaaaccattgttttaacatttttctctgtttcttttctgataatgatgacagttctgtctctattatatttgctgaaacttactaggacccagtgatactagctcatcctctagagagaggtcccaagagcattacaccagatctcctacgaagatgtgggatttcctctaggaaaaggtgtgtatccaggtaatttactaagccagaagctgctgngattctatggcagccttatcttcttatgacacgtcatttactaagaattnggggatctggatgatggccaanagtggctggactnaaagcctggccccanatggggggnggg

SEQ ID NO: 8494 - DNA, 537 bp, Homo sapiens
  misc_feature (52)..(52): "n" may be a, t, c, g, other or unknown
  misc_feature (371)..(371): "n" may be a, t, c, g, other or unknown
  misc_feature (477)..(477): "n" may be a, t, c, g, other or unknown
  misc_feature (479)..(479): "n" may be a, t, c, g, other or unknown
  misc_feature (484)..(484): "n" may be a, t, c, g, other or unknown
  misc_feature (522)..(522): "n" may be a, t, c, g, other or unknown
aaaatatttatatggatcaactttattgaaagtgaataaacagagataatgnggcaaaaagaaattttcccaatattaaacccttgatgatacttttaaattcactataaggaaaagaatccaccagtagtaggtagctacttatttttgctgagtgtcctctgcttttctgcatgctccacaatcttttcttccacataaagccccttccgctttcgtactgcgttcatgtacttccgggcttggttctcagagtcagccttctccccaaagtgcaagtattcctcctcagtagttggcacccagaaggggtcactgggaatgatctcccaatggctgaatactagttgtgggctggccaggccacttgncctcttctgatttcatcagcaaaaccaaagctttcagcaacaggcagcacagcttgatgatgaacatgtctggcccttctttcatttcttcttgaagacccgaccntntcttntttgacaagacagcttagactcgaccgagaacattacngtgggcatgatgtct

SEQ ID NO: 8495 - DNA, 535 bp, Homo sapiens
  misc_feature (337)..(337): "n" may be a, t, c, g, other or unknown
  misc_feature (404)..(404): "n" may be a, t, c, g, other or unknown
  misc_feature (472)..(472): "n" may be a, t, c, g, other or unknown
  misc_feature (507)..(507): "n" may be a, t, c, g, other or unknown
  misc_feature (518)..(519): "n" may be a, t, c, g, other or unknown
atgtgttcaaaaaaatgttttttttattgaattgaatgggagctaaagtaggataaagtggagccaaattataaataggaatataggtaggagttcattcattcagtaaatatttattgaatgcttattgtgtccaggccctgttctcagctcttagaatacatccatgaacaaaccagataaaaacttctgcccttgcgcagcttatactctagatcgtaagggatgggattagcaataaatttacataaattcaaccatacctactggaaaaagacacatgcatggaaattattaatgctataagaatctcttgatatgcagtttgtatttttgnacttaatataagcataatatattcatacctacatatcactcccagggatttaaactttaagactacnaagagaaatttattggtaatctaaggagattttcaaggccatctgagcatgctcaattttggccctangcacggcttttaaaacctaacccccttacaggtgnggattccctgnnccaaatggaaactttg

SEQ ID NO: 8496 - DNA, 543 bp, Homo sapiens
  misc_feature (448)..(448): "n" may be a, t, c, g, other or unknown
  misc_feature (502)..(502): "n" may be a, t, c, g, other or unknown
  misc_feature (533)..(533): "n" may be a, t, c, g, other or unknown
  misc_feature (540)..(540): "n" may be a, t, c, g, other or unknown
  misc_feature (543)..(543): "n" may be a, t, c, g, other or unknown
ctctctagtaatgactttattcatgaatctataatggaattcaaaatagcaaagaacatgaaaatgttcagattaatatttattaaccaaatgcatcagaaaatacatctattttcacatatcaaaagtgcctaaaatgcatgtgagaatataaatattctccactttgtggaacttcaagataatgaaaaattgcttaatacactttgccacaaaaactcattacactgcaaatacagaagaaataaaataactcattacattgcagatcaaaagaaatcaaatgtaactggcaaaataaccatttcatggctaatcttttggtaaagtgctattttcacactgaaaaaaagaaattagaaaagattaaaaattttaaattctgaaccatcattctgaaagtctgaagcgttttctttagtattcactatggtcatcacattcatgnggtcccaccatgagacttaacactttctcaaaatcttaaaaaatctttcattcncggattattttccgggaggttaaaaattttncctcatngtn

SEQ ID NO: 8497 - DNA, 522 bp, Homo sapiens
  misc_feature (215)..(215): "n" may be a, t, c, g, other or unknown
  misc_feature (326)..(326): "n" may be a, t, c, g, other or unknown
  misc_feature (406)..(406): "n" may be a, t, c, g, other or unknown
  misc_feature (425)..(425): "n" may be a, t, c, g, other or unknown
  misc_feature (436)..(436): "n" may be a, t, c, g, other or unknown
  misc_feature (453)..(453): "n" may be a, t, c, g, other or unknown
  misc_feature (474)..(474): "n" may be a, t, c, g, other or unknown
  misc_feature (495)..(495): "n" may be a, t, c, g, other or unknown
  misc_feature (510)..(510): "n" may be a, t, c, g, other or unknown
  misc_feature (521)..(521): "n" may be a, t, c, g, other or unknown
aaagacaggttctcactctgttgtcctggctgcagtgcactggctattcataggcaagatcccattactgatcagcctgggagttttggcctgctccatttccaacctgggctgggttcacccgtcctgatgcaagtttgtggtttcctgcttcagggacatcaccatattgatgccaaacttacacccaactggcatagtgtaccacagcccanaactcctgggctctagggatcctcctgcttcagcctcctaagtagctggggctgtacgcatgtgccaccaaacctagcaattattatttttaatcttagaaaataaattgngtatagaaaggaatagttagcacatttatgtctaaagaggaataaaaaagggcaactggggtttacacaaaatgcattgnagtgactgattttgaacancctatcaggtncattcaaccaaatggcncaggagatgcatttagtactnaacccattcagacatcatttnccatgctaactggtntaaacctagtng

SEQ ID NO: 8498 - DNA, 533 bp, Homo sapiens
  misc_feature (450)..(450): "n" may be a, t, c, g, other or unknown
  misc_feature (523)..(524): "n" may be a, t, c, g, other or unknown
atttttgcttctttttaatgtaaacagaatacacaatcacattaaaaaccccaacatgacacagaatacacacagaattatatatagatatttacaggccctcgaaagccaaaaggaaaaatggcccctctggttaagggaagcttctcttcctaccttgtccctgtccaaaatcaaagtgctgaggcagctgaaggagcctccgcaattacttctggatataatgtagcaggaggctggaataacatcagaaacaccccacccccaccccagagcacaaccaagataccgactttctggccctggccctaatcctaaactctcctcctttgcaagctgacaaagcaaggatttgtatgtctcgagaggcatcagcatgacccctgaaattcagatgcacggcggaggggttcccatcccattccagctttccagccttgggctgattgngaaatgagccaaaaccaaccattttccaaaaaagaaggtgggggaaagtaaaggaagaatggatcttaaggcnnaaataatgg

SEQ ID NO: 8499 - DNA, 538 bp, Homo sapiens
  misc_feature (485)..(485): "n" may be a, t, c, g, other or unknown
  misc_feature (504)..(504): "n" may be a, t, c, g, other or unknown
cagattccaaaagagtaaattttactattggagtacagttagattgtaatcctcttgaaacagatactttttcctttcttaatcacctagatgacaaatgtaagacttacccctgacttggtccattgatttgttcattcattaattcaacaacatttactaagtttctccatgtacactggactgctcaaagctctataggagatacagtaatgtgctttgctgcctctgaatggagcagtgtccctcccagcctatgggcatggctaaattttagaaggattcttctgcttgtcttcaacttcaaagatcagcctgaacacggagtgaaatcaccagtgttcctggcaggaagagaccctgttccacacccaacacatcatcctaatagtaggcttttgacacagtcctattaaataatgaagcatgtctctgtctaagtttatataatcagtacttcataattcagaaactttgcctctcanaggtcgatcagcagctcangtgagttcctataaaccagtttggaaggaatact

SEQ ID NO: 8500 - DNA, 543 bp, Homo sapiens
  misc_feature (486)..(486): "n" may be a, t, c, g, other or unknown
  misc_feature (494)..(494): "n" may be a, t, c, g, other or unknown
  misc_feature (498)..(498): "n" may be a, t, c, g, other or unknown
  misc_feature (508)..(508): "n" may be a, t, c, g, other or unknown
  misc_feature (531)..(531): "n" may be a, t, c, g, other or unknown
  misc_feature (538)..(538): "n" may be a, t, c, g, other or unknown
cctttggtgagacagggtccggctctgttgctcaggctggagagcagtggtacaatcacagctcactgcagacttaacctctggctcaagtgatcctcctgcctcagcttcctgagtatctgggactacaggcgggtgacaccacgcacggctgacttttcttgttttgtagagacagggtttcacccatgttgcccaggctggtcttgaactcctagcctcaagtgatcctcccaccttggcctcctaaagtgctgggattgcaggcgtgagccgctgcgcccagcctgtttattttcacgctcacactgccccaggctggccaccgtatgctccttcccatccccccgtgttatttcaacaagtctcctcatcccagcaattcttcactctctagctcatctgataccttctctggcctggccctggttccttttggttacagaatggtatcagggccaaaaccctgagtgcaccggtcaatgngttcaggncctnaaaacttggnaacatttgggcacaagcccttanaaaaagncccct

SEQ ID NO: 8501 - DNA, 543 bp, Homo sapiens
  misc_feature (506)..(506): "n" may be a, t, c, g, other or unknown
  misc_feature (515)..(515): "n" may be a, t, c, g, other or unknown
  misc_feature (520)..(520): "n" may be a, t, c, g, other or unknown
  misc_feature (540)..(540): "n" may be a, t, c, g, other or unknown
cagataggcacacataatttagattagaaatgaaaatgggctttaagccctataagtattgttttccaagaaaataagttttgaaagtgcaaaatgacaactcaaaaaggtcccctttccacctcatgcaggcaaaggacatttaaaagcacatccaactaaatcaaaaaagggaggattagaaatcacactagttcatccttcattatcagggctggcttcaaacctgaatgtttctgagtgggatatgttgcaaaaaaaaaaattaaactagatccaagttacatttcctctaaaaaaaaaaatgtcaaaggacagctgccaagatttgtttttaaaagacacctctcaggtaagaggtagtgtatgctagctaggactacaggctgccaactcaacattgcttgagaacattaagtcctttgaagcatgttccctggagtctattaaacattctttctctggggtcaaatgtcaagccatatccaatagcatcttctggttcntggaatccnttctnggaactggattcatccttgnaaa

SEQ ID NO: 8502 - DNA, 542 bp, Homo sapiens
  misc_feature (440)..(440): "n" may be a, t, c, g, other or unknown
  misc_feature (491)..(491): "n" may be a, t, c, g, other or unknown
  misc_feature (513)..(513): "n" may be a, t, c, g, other or unknown
  misc_feature (519)..(519): "n" may be a, t, c, g, other or unknown
  misc_feature (530)..(530): "n" may be a, t, c, g, other or unknown
  misc_feature (541)..(541): "n" may be a, t, c, g, other or unknown
catggatttttttcccccattggctttcaaagcaagtgagataaacagcgttactggcagatattggtcataaataacatcttcccaaagcccaacagtcaaaaaacaaacaccaaatataagcagattaggcagatttcctaaatactcagttaaggctatggtgtgcttggttttgaccagagcaattctatggcttccttttatttttctccctggataaaactatgcttacttgatccatgcaatttcagttgttacagctttaacttataagatcaaaggaattaaaaagttgtcagaatagattttcaaataatgacaaaaactgacataaagtctacacagaactgacataaagtctacacagtcctcagggatatggataaaacaaatgaagtttcatgactggaagggggctcccttctaagtaaatagtncatagaaaggtatgtaaaggcctttttcatgaaggttccaaaggggaaaantttaaaccatgggtcaagaacnctggtncctaaatggtngaataaggggng

SEQ ID NO: 8503 - DNA, 540 bp, Homo sapiens
  misc_feature (488)..(488): "n" may be a, t, c, g, other or unknown
  misc_feature (499)..(499): "n" may be a, t, c, g, other or unknown
  misc_feature (505)..(505): "n" may be a, t, c, g, other or unknown
  misc_feature (516)..(516): "n" may be a, t, c, g, other or unknown
  misc_feature (535)..(535): "n" may be a, t, c, g, other or unknown
acatttttgtgttgttttattatatgattttttaagttacaaaaaaaaaaaagagggaagaaggaaaagcaataaggcaaacttgccaataggttcatgaacaaaagtcaattatggaatgtggcagaaggcaaatataaatgtattcaaagttttacctttaacaattacacttgtggttccagttatctgttgataatataaattactccgtatttagtgactcaaacaacaattttatttctctctcatgggtctggagtttggctggattcagctaggtagttcttgctgagggtcattcatggggttgtcatcggatggtggctggtgatggaagcatctgaagacttactaattgcagccaggcatggtggctcatgcctacaattccagcactttgggagactgaggtaggaggattacttgagcttaggagttcaagaccagcctgggcaacatagtgagaacccatttcgaattatttnaaaaaaaaaanttaaanccaaaaggaantgaaggcttactacttgcntattg

SEQ ID NO: 8504 - DNA, 542 bp, Homo sapiens
  misc_feature (43)..(43): "n" may be a, t, c, g, other or unknown
  misc_feature (102)..(102): "n" may be a, t, c, g, other or unknown
  misc_feature (130)..(130): "n" may be a, t, c, g, other or unknown
  misc_feature (134)..(134): "n" may be a, t, c, g, other or unknown
  misc_feature (418)..(418): "n" may be a, t, c, g, other or unknown
  misc_feature (452)..(452): "n" may be a, t, c, g, other or unknown
  misc_feature (516)..(516): "n" may be a, t, c, g, other or unknown
  misc_feature (522)..(522): "n" may be a, t, c, g, other or unknown
  misc_feature (539)..(539): "n" may be a, t, c, g, other or unknown
  misc_feature (542)..(542): "n" may be a, t, c, g, other or unknown
ggtttcaaaagggtgtgttactatttggccaaacaatattttntaattgtcagtcataaagtgaaatacatactaaaatatatattaaatattcaccaaatntgcattgctgctacatgaaaacattttntggnctgttggaaaatgtaattcctgagatcattgttgggctttgtcaatcattttcctcaccatcaaatcaccttaagtgacttgggagtgtgaatctaggatgttcaattttagaccaattttctctatcttctaaatgagtaaacaggctctgtcttttataaaaggtagaaaaataaccatggtgtgctaatttttttcaaggtataccatatggaaaagtataggctgaacacaaaggaagtcttttctgaatggctctcaatcacacataaggaacatatgntttccagttaatctgtccttgatgtacagcagtncagctgttgctttgcctttattaaaatattctctgcttaaaaagttatggttgctttaaaaggnaattgncttaaaattccttccanttn

SEQ ID NO: 8505 - DNA, 542 bp, Homo sapiens
  misc_feature (367)..(367): "n" may be a, t, c, g, other or unknown
  misc_feature (529)..(529): "n" may be a, t, c, g, other or unknown
  misc_feature (531)..(531): "n" may be a, t, c, g, other or unknown
  misc_feature (542)..(542): "n" may be a, t, c, g, other or unknown
cataaaaatgtaagttttattgagtgcctatagtgtgcatgggcctttattagacacgccaaattcaggcacaacagacacaagatccctggcctcaggtaccttatgatctaattaatagatattagaaacagtagaaagacaagttacacgtcaatgcccaatgactagagtcaacattaaagagttgtaatttaagtaatccaaactgacatctaattccaaaatcatttataaaatgtatttggctttggaatccacaggacttcaaacaagcaaagtttcactgcagatagtcacaaagatgcagatacactgaaatacttaagagccttattaatgatttttgttattttggatcttctgnttttttcttattatggtccgaagcctccttaataccaatttatcagacagaagcatgtcatcttggtggtcaagataatccagtaaatttcagtccattcaagtgccgctttatggctaatatgcttctctggatcagtctggtttctactcttactggaangnttttgctcaan

SEQ ID NO: 8506 - DNA, 542 bp, Homo sapiens
  misc_feature (485)..(485): "n" may be a, t, c, g, other or unknown
  misc_feature (504)..(504): "n" may be a, t, c, g, other or unknown
  misc_feature (506)..(506): "n" may be a, t, c, g, other or unknown
  misc_feature (514)..(514): "n" may be a, t, c, g, other or unknown
  misc_feature (520)..(520): "n" may be a, t, c, g, other or unknown
  misc_feature (541)..(541): "n" may be a, t, c, g, other or unknown
cttaagacaatgatttttattacctttagtctaccacatttgtcactataaatatacttattgaaaaaaaaccatactatttaaataagaattcagttcatgaaagtttacaaaatacaaccaatgtactctgacttgtggttatatcttaactatctcaactgtacttttctggtatggccagaccttttgcaaatattaccatggtattttaattttatgatataaaacagtagcaatttattaagttttccattataaaaattaatatggcaattctcaaaatactgaaaaaactgttttatgaaagcagtacccacatcactgcaacgtatttcctttctcttagaaaacatcttcaaaaggcacattttaattactagtgtttatatctaaagatagtagtttgagttttgaatttccgtcaattttccattatctcaaaattgagctaatggagggttggaagaggtaggagaacgcanggtttcaatggacttcctnanggcagcanaatccnattcattttggccctgggganc

SEQ ID NO: 8507 - DNA, 174 bp, Homo sapiens
  misc_feature (168)..(174): "n" may be a, t, c, g, other or unknown
gattttaaaaaatgtatttgtgttttgcaggttggaacgcaaacccagtctggccacgtcccgtgaagttgtggacaaaatgtttcagtttctgttcacctctgtgcgtgtgtgtgtatgtgttgtgtgcatgtgtgtgtgtgtgggggggtgggggatggggtcggnnnnnnn

SEQ ID NO: 8508 - DNA, 312 bp, Homo sapiens
  misc_feature (271)..(271): "n" may be a, t, c, g, other or unknown
  misc_feature (283)..(284): "n" may be a, t, c, g, other or unknown
  misc_feature (298)..(298): "n" may be a, t, c, g, other or unknown
  misc_feature (303)..(303): "n" may be a, t, c, g, other or unknown
  misc_feature (306)..(306): "n" may be a, t, c, g, other or unknown
  misc_feature (311)..(311): "n" may be a, t, c, g, other or unknown
gtattttttttttttttttttttaccattaaaaacagttatgaaatgtggcatcccgttgatgcaaggactgggaaagccatttttattttattttttttccccaaactcactgtaaacaacagtaactttggttaaaataaaaaaagtcttctatgtaggcagagctttgtcttttcaaagagggtggggtagggccctgaggggagtaaggtgaggacaaggaacagaaaggcgtgaggtgatggagggaggggaggtggaaggagganagagaaacaggnnagactttttcccanggganaanctggnc

SEQ ID NO: 8509 - DNA, 544 bp, Homo sapiens
  misc_feature (427)..(427): "n" may be a, t, c, g, other or unknown
  misc_feature (432)..(432): "n" may be a, t, c, g, other or unknown
  misc_feature (446)..(446): "n" may be a, t, c, g, other or unknown
  misc_feature (461)..(461): "n" may be a, t, c, g, other or unknown
  misc_feature (504)..(504): "n" may be a, t, c, g, other or unknown
  misc_feature (515)..(515): "n" may be a, t, c, g, other or unknown
  misc_feature (544)..(544): "n" may be a, t, c, g, other or unknown
acatgttcataccaactttattcatgatagccccaaactagaaacagcccattgttcaccagttagttgttcacctaacaggtgaaacgttaaaatgtggcattcatacatagaacactgctcagccataaaaaggaacaaagcttaaacacactgatgaacatacaaacatgctgagtaaaaggaacttacagaatacatactgcataagtgagtccgttatatgaagttctagaataggcaaaattaatctacagtgaacaaaatcctaacagtagctgactgccaggggagggaagaagggacaggagagagaggtgcaggaattgactaggtgaaaaaattcagatgtaatacagatgttccagacataggggtttgagttacatgcttttacatcaaaactcatcaaatgagtctgggtatnggggntcacacctgtaatnccagctactcgggangcttaggcaggagactcccttgacccaggaggtggaggttcantgagcccagancaggccctggacttttaccctgggggatn

SEQ ID NO: 8510 - DNA, 571 bp, Homo sapiens
  misc_feature (396)..(396): "n" may be a, t, c, g, other or unknown
  misc_feature (450)..(450): "n" may be a, t, c, g, other or unknown
  misc_feature (452)..(452): "n" may be a, t, c, g, other or unknown
  misc_feature (455)..(455): "n" may be a, t, c, g, other or unknown
  misc_feature (506)..(506): "n" may be a, t, c, g, other or unknown
  misc_feature (520)..(521): "n" may be a, t, c, g, other or unknown
  misc_feature (544)..(544): "n" may be a, t, c, g, other or unknown
cggggtgagacgggtttattgtgcacatttacacagcgtcagcagcgtctgggctggcagcggccatgctcctgtggtcgggctgctctacaagggcgttcacttttcttcaccacactatgtacagtcagtgctccaaggtgatgggctacagtgctgcatcagtgagtctgtacacacatttttacataaattacacacgactcatacatgaaaaatagagcctaagggcctgtattttaatgagaaaaaaaaaatttccaacatagttcgggtagctttgaatggtctagtcaaaaaatacttttggtatataaaaagcctgtccgtacaattcacaccttagtgaaagcgcccttcttgccttgaggctgggcctgggacaaaggtggcctnacaagccagcccaggcagggagatcggcagaaaagggtggcccctgaccccagntnctntggcccagctgctgctccttggtgggcgggcccttcttgacaccaggcgtntggcatccttaagnnccaaacaagccccgtttactggncctggctggccttaaacaatccaccct

SEQ ID NO: 8511 - DNA, 571 bp, Homo sapiens
  misc_feature (433)..(433): "n" may be a, t, c, g, other or unknown
  misc_feature (500)..(500): "n" may be a, t, c, g, other or unknown
  misc_feature (525)..(525): "n" may be a, t, c, g, other or unknown
  misc_feature (543)..(543): "n" may be a, t, c, g, other or unknown
  misc_feature (562)..(562): "n" may be a, t, c, g, other or unknown
  misc_feature (564)..(564): "n" may be a, t, c, g, other or unknown
aatgaaaaacaccaatttattatacttatgatactgtttaccaggacctgagcaggctacataggagttctcaccatgatagccaaaccttaagctaaataaatacacaagcatgtgttacttatcaatctgaaatacttcttatttaatctatgtaatataaaaatcatagtaattctttttattgaatataacaagaaaatatacagtacacatacagttcaaagaattatcaaaaaacgaacacacctgtgtaatctggttaactacttcaagaatcagaacattatcagctccccagaaacctccctcatattcactcctagtcactacctccttcctcaaaagcagccactatcctgacttctaaaaccagagactgggtcatgcctagttttcagtttcatattaatggaatcataatatgtgttgnatggcttcttttgtcaacattataagattcacttacaatggtatacatagctgtaatccggtactgntataaggcaggctacatctacaacntaaggcttttaacaatgnactgggtggtctacattangntatccca

SEQ ID NO: 8512 - DNA, 529 bp, Homo sapiens
  misc_feature (217)..(217): "n" may be a, t, c, g, other or unknown
  misc_feature (437)..(437): "n" may be a, t, c, g, other or unknown
  misc_feature (441)..(441): "n" may be a, t, c, g, other or unknown
  misc_feature (446)..(446): "n" may be a, t, c, g, other or unknown
  misc_feature (486)..(486): "n" may be a, t, c, g, other or unknown
  misc_feature (488)..(488): "n" may be a, t, c, g, other or unknown
  misc_feature (514)..(514): "n" may be a, t, c, g, other or unknown
  misc_feature (516)..(516): "n" may be a, t, c, g, other or unknown
agccacaaactctcggcatttgagaccgttgatttttaatattttcttaaaaaaatacaaaggaaattaactctgtaggtcaatacaactcagggaaagagggaaaaatggaatttcagagcaaaggttgtttaggttatcacattcccacactcctaatacccacaaaacaagaatttcactccatgacacagaggaacattgaatggtagctcanaaatgttgatagctgaggtactgaaactaacaaaaggattttggttgtccttgattattctgtcctgtgatgaataaaatctacactaaaggacaggtaaggaaaacttatagcagaaaaaagactagatgtaccaaacacagcagtacaaaccactccttggcagacatgtgcttctaaaagaatggggcagtaatcaggtagctgaactactaggctnctgncactnccagcccattcccaaataaatagtgtggaaatgtaatagngnaatagtatttgatcccaccaaaaaangnttttaaccccatt

SEQ ID NO: 8513 - DNA, 566 bp, Homo sapiens
  misc_feature (471)..(471): "n" may be a, t, c, g, other or unknown
  misc_feature (474)..(474): "n" may be a, t, c, g, other or unknown
  misc_feature (482)..(482): "n" may be a, t, c, g, other or unknown
  misc_feature (507)..(507): "n" may be a, t, c, g, other or unknown
  misc_feature (521)..(521): "n" may be a, t, c, g, other or unknown
  misc_feature (526)..(526): "n" may be a, t, c, g, other or unknown
  misc_feature (559)..(559): "n" may be a, t, c, g, other or unknown
atagaaaataaaattaatacttgattttattaaggtggtttatcacaacaaataccaacaagaagagaaaaaaatctcaggaaaatcaacagcatgcatggatttggaatgacactatgtaaataaatgcaatgaaataaaattgacttttcaacacttggacagcatgaagttcaacagacaaatccattaaaaagggaaataaaagctcaatctcaaggtgaaatttttgtccatgacactctcgaattctagatctgaaaaagtttgggataaatggcagaaaacaacgcgtcatcacgagatctctaatttaatccaaagctattccggaaggcagcagttttccctatttcttcaccagcgccctggggcaaaaggttaggaataatcggcttcaggaacttgaactcgccggcccctgagtctccggtcaaacacacctcgtagtggtagctctgggatagggtnccngtgcccgntcacgtccccagatgccctggaaangggcccttggcccnagcancgacccgaaccggggccgcctggtcctctgganaaaccga

SEQ ID NO: 8514 - DNA, 567 bp, Homo sapiens
  misc_feature (352)..(352): "n" may be a, t, c, g, other or unknown
  misc_feature (396)..(396): "n" may be a, t, c, g, other or unknown
  misc_feature (403)..(403): "n" may be a, t, c, g, other or unknown
  misc_feature (405)..(405): "n" may be a, t, c, g, other or unknown
  misc_feature (442)..(442): "n" may be a, t, c, g, other or unknown
  misc_feature (453)..(453): "n" may be a, t, c, g, other or unknown
  misc_feature (457)..(457): "n" may be a, t, c, g, other or unknown
  misc_feature (468)..(468): "n" may be a, t, c, g, other or unknown
  misc_feature (519)..(519): "n" may be a, t, c, g, other or unknown
acttttagttcacattttttaatgtttaaaaactatgttaacagagcagttatagaacagaacttcttatatttctttatttacaccacactctgaaaaaaaaacccagttctatttgattaactatgaatagcaaagttttgtgacttgtgactcacttaaatcacccatctgaaattcatttacaaggtttttacattaataaaacagtagtgtggtacatatattggactcagatgaagtctaaagtacactggactctagagagtggattacataccaacgaccaagattcaagtgtttggggaaaaaaataccttagacagtctatgttggcgtcaacactaaaatnaaaggcaaacatgcaggactttcaaagcttgattagataatggntctttgntntctttccttcaaatttgtgctcataattaatattcangttccctcttnccgntttcatagatncccaaagttgagaaaatgcagcaattcaattgggaaaaaaacattcttctnccaacttctggtttcatatgactggggaatggtatcaagggtaaaaag

SEQ ID NO: 8515 - DNA, 562 bp, Homo sapiens
  misc_feature (437)..(437): "n" may be a, t, c, g, other or unknown
  misc_feature (540)..(540): "n" may be a, t, c, g, other or unknown
  misc_feature (545)..(545): "n" may be a, t, c, g, other or unknown
  misc_feature (549)..(549): "n" may be a, t, c, g, other or unknown
  misc_feature (552)..(552): "n" may be a, t, c, g, other or unknown
  misc_feature (557)..(557): "n" may be a, t, c, g, other or unknown
aaaacataagtatgggtatatttatttctctcaaatgcatacaagacaataattacacagcaacaaatcttttgttcaacaatgatttgattcataagcatttgaaatttacataatttcatatcaatacccttgtatttttaaatacagtaagtaaaaaagcccccaaataaccaattcttatatttcctatttatccctctatacatccaaacttttaaaaagttacaaactgaacattatacagaacatataaatcatgtttaaaaacttgaggttttaaaatcactgcttccccaatatgattcagaaaaattctcatactgacaagtacagtcataggtggtaaagtaagttggtggcggggaaaatgaaagaagagacagacacaagtttgctgtcttaatgttttactaatcctgtcagttaaaaatggngacgtcatgagaagtaatagtttaatatgaggaatgggagtttgccttgcagcttgagacatgcatttcaggatttttcctattggactgggctcctggagcnaactngtgnccnaaaanaaata

SEQ ID NO: 8516 - DNA, 580 bp, Homo sapiens
  misc_feature (477)..(477): "n" may be a, t, c, g, other or unknown
  misc_feature (494)..(494): "n" may be a, t, c, g, other or unknown
  misc_feature (544)..(544): "n" may be a, t, c, g, other or unknown
  misc_feature (572)..(572): "n" may be a, t, c, g, other or unknown
ccaggtacaacagcaggttcttttccaattcctcaaagcgctgcatggggtgggggcagagacagaagagaatgtaaacattgggttccaccccctggagctcaagggaagacccttacccagatagggactaactggaggggtggaagggaacaaggtgaaaggtatgggtcctggtgagacaaaagcaggggggcctgagaacacagagcaaggtgggtttggagggagcacagcagggtgcaggaagggagatgggggacatttcctattccagtgcatgtccccttaaataaactgggtacaggagcattatggaaggagaaccaaaggacagaagacaaagcgagcacccccaccccaggccaacgccatcctctgtacacaattacaacacaggtccagaatgagaaccctgccaggaagtgggggagacagggagggctgaagacagggaaaaggaaccagcttcacctnatggtaaaggggagctntggagtgtaagaatcttgaaacttgctgacttccattaaccaggagtcancccttgggattacaaccgggccatttanggacagct

SEQ ID NO: 8517 - DNA, 541 bp, Homo sapiens
  misc_feature (467)..(467): "n" may be a, t, c, g, other or unknown
  misc_feature (521)..(521): "n" may be a, t, c, g, other or unknown
  misc_feature (528)..(528): "n" may be a, t, c, g, other or unknown
  misc_feature (540)..(540): "n" may be a, t, c, g, other or unknown
gagatttctcctactcacctcaaaccctctaagactgccaaaagctacgccacaatcaaattctgcaggttctttcaaatatcatttcacttagctcttctacaataaagcctcactactcaaagtatggtccttagaatagcgtcatcataattgtttggaatgttattagaaaaataaaatgtttttcttctgataattgaaaatgttcctcttcaaagcattttaccaaagaagacagtcaaataaccaataaacatatagaaaagtgttcaagttaattacttgtcagggaaatgcaaattatagccacaaagagtgtctctgccatccaccagaatggctaaaatgaaaacacaaaacagacatgtcaagcatcgataatgatatgcagcaatgggagttcatgcgctaggaatgggcaaactggtaaaactagaaaactaattggcaatagctactaaagntggccaaaggggatctatacgaccgggcaattcctttccaaaaatttccccacngaaaggntttttttgcttnc

SEQ ID NO: 8518 - DNA, 568 bp, Homo sapiens
  misc_feature (538)..(538): "n" may be a, t, c, g, other or unknown
ccaaaattgtgctttattaaatgctagttcattggaatgttaatacatgtttcacacacacaatcagcaggagaaaatgtttctatagccaaatgacattgataaacagtgttcttacacaaagttaagcctgtttctttattataagacttttcagatactttcccagtgcatagtgtgaatctccacaaagcaagtgaaacatgaatagctccctaaacttacttgaccacagaatgcttcattctatctccatggaaaccacttgtgaaagtctcctactccaactttcttctccaacaaaactcacctgtttgtgatcatctgaactcattttgtgctcttgcctttatataaaagagaagttctgtgaaatgttgaagaagcagggttatggcactagtaatgatccaggcctatacaaattggtaaaattttccattattttagttcagaagccctaccataggtattctaacagtggattgtgggaacccagtatgagtggttgagacatggttccaaaatataggagctnttttaaaaaggaatcccttaataataccgg

SEQ ID NO: 8519 - DNA, 579 bp, Homo sapiens
  misc_feature (405)..(405): "n" may be a, t, c, g, other or unknown
  misc_feature (412)..(412): "n" may be a, t, c, g, other or unknown
  misc_feature (443)..(443): "n" may be a, t, c, g, other or unknown
  misc_feature (457)..(457): "n" may be a, t, c, g, other or unknown
  misc_feature (497)..(497): "n" may be a, t, c, g, other or unknown
  misc_feature (509)..(509): "n" may be a, t, c, g, other or unknown
  misc_feature (529)..(529): "n" may be a, t, c, g, other or unknown
agtagaaaaaatacctttttattaattattaggaataatccattcatgtaatgcaggatgtatgttggagaaggttaagtacagccacatgaatgaggggaaacgtgcaagaggaacagtggtgagaagggggatggtcccccactttccacaaactataaacagcaacatgaacacagagaatcacaaataagagggtctttcctcatgtctcctctcaccccattcttccataatgagtcccagttggtccctagaggtgccagggcatctggaagttctgggctgggagtggggtgcagtgagtggcctcaaagttgtgcagatgcttccgagccagaaacaaagccagctgccgccgtccatctgcactcatgtcttccccacgcttcaaggggaaagtcnggccccngttctgcctggtaggaaccggaggacagacnggacaccagtcctntttcaccttccatcggctattaaattggggctttcttcancttgtgaagganggcttcaaccactggcttancactcgaagaccctctttggcatacccggggataccgatgcttgaaggac

SEQ ID NO: 8520 - DNA, 548 bp, Homo sapiens
  misc_feature (472)..(472): "n" may be a, t, c, g, other or unknown
  misc_feature (493)..(493): "n" may be a, t, c, g, other or unknown
  misc_feature (509)..(509): "n" may be a, t, c, g, other or unknown
  misc_feature (512)..(512): "n" may be a, t, c, g, other or unknown
  misc_feature (534)..(534): "n" may be a, t, c, g, other or unknown
  misc_feature (537)..(537): "n" may be a, t, c, g, other or unknown
  misc_feature (547)..(547): "n" may be a, t, c, g, other or unknown
caatagaaattaggtagatccatttattttttaaatacaagtataattttggaaggggtatttgacaaattcagcattaactgccaactctatagacatgttttaacaaaaagcaaaacaaaacaaaacaaaaaaacaaaacaaggcatttactcttggccctttcagtacaggcgaagtgttctattgcatcacaagtgctagtgatgcagtaacagatccaagggcataatattaaatatgtttttttccaactgcgatttagttgaaaaataacataatacaaacatatattaatggctatcaagaccagcagtgatctgcagaatacctagaggcctacctaattagaaggttgaaacttagtaaaaccgtattaaagtcagtgtttttattcttagattaacaatgacagagtgaagatatctttgattcaattttataaggtgtggtgggggaattgagaggagcnagatttggggaaaactggcantgggtgctgagttaanttngggaatgtgggtcaaataagcnatntggttaggana

SEQ ID NO: 8521 - DNA, 549 bp, Homo sapiens
  misc_feature (474)..(474): "n" may be a, t, c, g, other or unknown
  misc_feature (484)..(484): "n" may be a, t, c, g, other or unknown
  misc_feature (487)..(487): "n" may be a, t, c, g, other or unknown
  misc_feature (518)..(519): "n" may be a, t, c, g, other or unknown
  misc_feature (525)..(525): "n" may be a, t, c, g, other or unknown
  misc_feature (544)..(544): "n" may be a, t, c, g, other or unknown
gaggtgatggatagattagctttatttaatcccacattatattcaaaaatcataatgccactttgtttctcataagtatatacaactataatttgatatataataaaaaaaatctaaaaaggtagtctcctaacaatcatatgaagactatcctaaaatgtcctttagtaactgtcatggactgaaaagtatcccacgaagagacaatgtctactcagatcatgtgaatacaaacttacttggaacatgggtctttgtaaacataattaagggtctccagacacaatcaccctagatcagggtgggccctacattcaaagacactgtccttaaaaggtaatgaagagaagacagagggaaaggccgtgtgaacacagaggcagagactggagtgaagattgctgctgcaatacttggacaagatttgtccagaagccaaagaactccaggaattgcccacggccccagattttnggaaccgccnttnaaggccggttatggatcttccttaaggctcnnaagganccactttgtgacctttganttaac

SEQ ID NO: 8522 - DNA, 414 bp, Homo sapiens
  misc_feature (391)..(392): "n" may be a, t, c, g, other or unknown
  misc_feature (402)..(402): "n" may be a, t, c, g, other or unknown
  misc_feature (406)..(406): "n" may be a, t, c, g, other or unknown
  misc_feature (408)..(409): "n" may be a, t, c, g, other or unknown
  misc_feature (411)..(411): "n" may be a, t, c, g, other or unknown
gcactttattccgccacttttattgagcaacagccgtggggacctgattctgcactaagtgctctactgtgagacatcacaggttgtcattgctagaggcaagaatctcttacaaagatgaaagggcagaacccagtgctttttttaatggttgttattccatgcagaaacactgactgatccagaactggtaactaaggcggtgatcaaacaggaatgcttttcttctcagtttaggacgaagacccgccatgacaatggcgggaacgctggagtaaaacctcacggcggccagcatgtagtttttcgccagatttgtggccccacccccaagtacccacgcggagaggcctccagtcatacagcacaaagggcatcgccttgggcagtnnaggctcactntgtncnnanctg

SEQ ID NO: 8523 - DNA, 572 bp, Homo sapiens
  misc_feature (511)..(511): "n" may be a, t, c, g, other or unknown
  misc_feature (548)..(549): "n" may be a, t, c, g, other or unknown
  misc_feature (557)..(557): "n" may be a, t, c, g, other or unknown
  misc_feature (559)..(559): "n" may be a, t, c, g, other or unknown
gaactttaaaactactatattatacaatagtaaagcagcagagtatcttacttttatataattatataaaaacttatttttatattgttacattgtgaatcacattacaatttagtctccttttcaatagaaagattttctaaggacatgatttggagccgtccacatttatcagatgccttttcattaattttttccatttttgcaattcttgatccaaactgcatggcccgtttgggcagaagagcagaggctgtaagaccaagttccacagctgcaaggcgtaaaagtaatttttcaccaattcctcggggtaaagtcaagtttgctttttcccaaatcggcagagaatttagaaaggagacaacattttcatccaggaaaggaaatcttgcttcttttccatgatcaccaataactctgtcatcacgaccaagattttaggaagaaattcgacccagttccatcattatttcttattcaatcctttcagcccatgcgactggaagcngacccgatgaccagaatacctggaaggtgctcattgnnccatttcngngggactaccttgg

SEQ ID NO: 8524 - DNA, 572 bp, Homo sapiens
  misc_feature (443)..(443): "n" may be a, t, c, g, other or unknown
  misc_feature (469)..(469): "n" may be a, t, c, g, other or unknown
  misc_feature (495)..(495): "n" may be a, t, c, g, other or unknown
  misc_feature (511)..(511): "n" may be a, t, c, g, other or unknown
  misc_feature (517)..(517): "n" may be a, t, c, g, other or unknown
  misc_feature (520)..(520): "n" may be a, t, c, g, other or unknown
  misc_feature (544)..(544): "n" may be a, t, c, g, other or unknown
atgctctttttttggttctaaaactgatgtggtttcatttggagttctcttcttttcattaaccacatcaccgtccgcttctcttgcttctagtagtgataaactattttgctctttatggataaattcattcatctcttttgtaaccctttctgtttgctgcttttcttcttccatctgtttatcatgtaatagctgctgttctttttcttttctccaaaaagcttcctgtttttgccggattcgatgccgtaattcttcatcatcagtgtcagatgactcagatcctctgtcactcctctcatcttcactgtctcctgatccataaccacccagtccaccgagtccagtgagggaagccagtgcactggactgtgccagctgttttgcaggagctttgtatcacatcaacaacaggaacaacatgttaacacaaatagccncgattcatagtcatgagtctattggnattggtaaaactactactaatgctgntttttggggagagaanaaaccnttnaaacctaccatcattttaaccagnttaaggctgctttgaaatataaccctgg

SEQ ID NO: 8525 - DNA, 596 bp, Homo sapiens
  misc_feature (483)..(483): "n" may be a, t, c, g, other or unknown
  misc_feature (538)..(538): "n" may be a, t, c, g, other or unknown
  misc_feature (567)..(567): "n" may be a, t, c, g, other or unknown
  misc_feature (570)..(570): "n" may be a, t, c, g, other or unknown
  misc_feature (593)..(593): "n" may be a, t, c, g, other or unknown
gaggggcatgtcatcattttaatgatgtgatctttggtgtttccctcattagctgtagactatcccctctcctcccaccacaatgtttctatgatgagttacaaacagaaaggaaatcacattttcatactaaaaacaaaatgatcagagccttgatttctccactagaaactacacgtacagttaagagtccacatgcaacaccttaaatcacagactgagacctcacattctgacctggagtctcctccccttccccagccttgggctagctttggcctaggctcaggtaatactgacacccacaggcgctgctctgagggccttgcggggagaagactggtggacaagccctgggggctggccagcctacaccccccactcctgagtgaggacctgcccactgtcccttgaccccatcctgtatcaggcaaagcaggcgcccccttacccacaagtaagtcccccattagtaaatgcccnaagtccctgtccttcaagaaatttgggagcctgggcccgatcctggtgggttcantggggtaagacgaccaaaaaaggttgaanctntggaaaggctcaaagttggaggnggg

SEQ ID NO: 8526 - DNA, 576 bp, Homo sapiens
  misc_feature (392)..(392): "n" may be a, t, c, g, other or unknown
  misc_feature (404)..(404): "n" may be a, t, c, g, other or unknown
  misc_feature (424)..(424): "n" may be a, t, c, g, other or unknown
  misc_feature (435)..(435): "n" may be a, t, c, g, other or unknown
  misc_feature (438)..(438): "n" may be a, t, c, g, other or unknown
  misc_feature (455)..(455): "n" may be a, t, c, g, other or unknown
  misc_feature (479)..(479): "n" may be a, t, c, g, other or unknown
  misc_feature (523)..(523): "n" may be a, t, c, g, other or unknown
  misc_feature (560)..(560): "n" may be a, t, c, g, other or unknown
  misc_feature (576)..(576): "n" may be a, t, c, g, other or unknown
aaccactgtaaatttattatgcattaggaagcttaacctaaaaaccaatagcatagtaaaaagatatgttatctctgttcatagcagaacaggtttcaaaatatattttcttttaaatgtattcagtcagtacacaatcctttataaaagttgtatatatttttttctgtcaataccttcattacatttataaatacaagatttacacagcaccccatcaaaaaaaaaattaaaaccctttacaaatatctacatatatttcatacctataaaactttcaaaggggtgctctgttaaaggtgggccctagttaatggtccatttactggtgcagcaaaatcatataaatctgtaaagtttctttgccataaaacatcttcaaaaaatagcangacacttatcgnggaacctcagcttcataaancctaatttagnaanggacttaatgggcgtantccatgcgatcaaaaaggttaacnggatggaataagatgaattggaaaccaatgcctcctcagagcanttaggccgaatgtgatggtgagaaaactttagaagcnggactggaaacatggn

SEQ ID NO: 8527 - DNA, 571 bp, Homo sapiens
  misc_feature (142)..(142): "n" may be a, t, c, g, other or unknown
  misc_feature (206)..(206): "n" may be a, t, c, g, other or unknown
  misc_feature (235)..(235): "n" may be a, t, c, g, other or unknown
  misc_feature (269)..(269): "n" may be a, t, c, g, other or unknown
  misc_feature (441)..(441): "n" may be a, t, c, g, other or unknown
  misc_feature (463)..(463): "n" may be a, t, c, g, other or unknown
  misc_feature (474)..(474): "n" may be a, t, c, g, other or unknown
  misc_feature (483)..(483): "n" may be a, t, c, g, other or unknown
  misc_feature (503)..(503): "n" may be a, t, c, g, other or unknown
  misc_feature (511)..(511): "n" may be a, t, c, g, other or unknown
  misc_feature (537)..(537): "n" may be a, t, c, g, other or unknown
acagattgatttaaacattttttaaaccacatgcttctttttctgggctccagccagatctctgggggaggagttgttggcagtggtgatggaattgggaagggtctgtgagaaaatctgaggagcttcctgcctcccccanatctccctcacaagactgtctctctcagggttgcttgtgagaatcatttaggaactgctgcagngttttgatgttttctgaacccctccccanaaagcccaggagcttgtaattgaaacaagaagtnaagggaaagacccagaatcatcatttccccaaagtcattagaggaggccagtaaatgtgtttagggggcacaagttcccaaacgccaccccaccattccttcctaggaagttctcaaaggtcagcaccaagaacctgtccctcctctttcatctcctcctccttctggtctnctcctggggcttggaaaaccantgctttgaaanaggaaaggnaaaaggaggacttaaaatanctgatccnaccgttctgctttccggggtgacaanggattgcccaacccttaaagggttgcccgaaggg

SEQ ID NO: 8528 - DNA, 508 bp, Homo sapiens
  misc_feature (413)..(413): "n" may be a, t, c, g, other or unknown
  misc_feature (446)..(446): "n" may be a, t, c, g, other or unknown
  misc_feature (459)..(459): "n" may be a, t, c, g, other or unknown
  misc_feature (476)..(476): "n" may be a, t, c, g, other or unknown
  misc_feature (478)..(478): "n" may be a, t, c, g, other or unknown
  misc_feature (486)..(486): "n" may be a, t, c, g, other or unknown
  misc_feature (491)..(491): "n" may be a, t, c, g, other or unknown
gagagttgaaacaaagaaactttaatgttctggctgactatactatgttgataggctgacaattactgcatctatactgaaaatacatagactcttttccttatcatgagtccctaaacaatacaatagaacaactatttgcatagcttttacaatgcatgaggtattttaagtaatctagacataattgagagtatacaagaggatgtgggtaagttacatacaaatatgtcattttataaaagggactggacatggctcacggagtgctggaaccaatacccagcaggtatcaagggatgactgtctggaaagaaactgaaattacttaaggttttaccaagtgcttacattcacagggctatctccaatgggttcgtacaagtatctgaaatgaaataaaattaataaangctttccacattccttccttttgagagaagctntggggcttttaangctatccagggactggnanaaccaatnttttnccaattcttcatcctac

SEQ ID NO: 8529 - DNA, 565 bp, Homo sapiens
  misc_feature (478)..(478): "n" may be a, t, c, g, other or unknown
  misc_feature (503)..(503): "n" may be a, t, c, g, other or unknown
  misc_feature (528)..(528): "n" may be a, t, c, g, other or unknown
  misc_feature (540)..(540): "n" may be a, t, c, g, other or unknown
  misc_feature (545)..(545): "n" may be a, t, c, g, other or unknown
  misc_feature (556)..(556): "n" may be a, t, c, g, other or unknown
  misc_feature (565)..(565): "n" may be a, t, c, g, other or unknown
gtagacgggctaaggtttatttacttacttaacatttaaaaataattcatttgcttcaacaacatggcagacaatcaagagtactattgaaacataattcagagagggtcaggacaggaaagatcacaacctcattcctgaggtggaatgaaagatctaagccaggcctccatcctaggccaggctcctccattaagcagagacaaccaaaagataagaaagccttggcctcatccccatcaggagatagcctgaactgctcacaaataagaaacaacttgaccagactgaggactggttcctgatgagtcaataggaaagtcagttggttctctcttcagtaggtgacttagcacccttctggagaacatagagtagtagtctggacctggaggctaaggcccacattcaacaaaggttaccttcttttcagtaacgctttggtccttttttcaacagcaagaaacctgaaatccanggaagtcatttaaaaaacccctttngctggacctggaagcatttccaagncaactggggtanaaatnaggcctccacnttagggggn

SEQ ID NO: 8530 - DNA, 564 bp, Homo sapiens
  misc_feature (413)..(413): "n" may be a, t, c, g, other or unknown
  misc_feature (501)..(501): "n" may be a, t, c, g, other or unknown
  misc_feature (528)..(528): "n" may be a, t, c, g, other or unknown
  misc_feature (533)..(533): "n" may be a, t, c, g, other or unknown
  misc_feature (562)..(563): "n" may be a, t, c, g, other or unknown
gactgttgtgattttcagcaggtacagttttgattttattgcaaggcacacaatcgtatatacaatgcataattatcatcttttaaagtacaagataaaaatcatatacattatagtaaagaacatatgagtatattcttgtttcagagaagaaaattgccttaaggaagctgggttataccgtttttggatgtgattttcgtatttatactgaatcatccgaacagctcttggttagaaaataaatctcattgataggacacacaacctttcacagctttcactttacaatgttccaatttaaagtcagccagtgtgctccctgaatttgcatgagtcatcgtatttcatcccaggactagatgaaacacctataaattgtctgacaatagttatacacgtttaagaactgnatttcttagtaatatatcacagaatagaaccattttcttaagattttatgtgactctttattgattttttttctccaagctatttttncaaatgatggattaattttgggattancctanagtttgacttaaactcgaaggggctcttnna

SEQ ID NO: 8531 - DNA, 538 bp, Homo sapiens
  misc_feature (38)..(38): "n" may be a, t, c, g, other or unknown
  misc_feature (44)..(44): "n" may be a, t, c, g, other or unknown
  misc_feature (58)..(58): "n" may be a, t, c, g, other or unknown
  misc_feature (75)..(75): "n" may be a, t, c, g, other or unknown
  misc_feature (100)..(100): "n" may be a, t, c, g, other or unknown
  misc_feature (119)..(119): "n" may be a, t, c, g, other or unknown
  misc_feature (138)..(138): "n" may be a, t, c, g, other or unknown
  misc_feature (141)..(141): "n" may be a, t, c, g, other or unknown
  misc_feature (149)..(149): "n" may be a, t, c, g, other or unknown
  misc_feature (183)..(183): "n" may be a, t, c, g, other or unknown
  misc_feature (185)..(185): "n" may be a, t, c, g, other or unknown
  misc_feature (233)..(233): "n" may be a, t, c, g, other or unknown
  misc_feature (237)..(237): "n" may be a, t, c, g, other or unknown
  misc_feature (247)..(247): "n" may be a, t, c, g, other or unknown
  misc_feature (252)..(252): "n" may be a, t, c, g, other or unknown
  misc_feature (272)..(272): "n" may be a, t, c, g, other or unknown
  misc_feature (311)..(311): "n" may be a, t, c, g, other or unknown
  misc_feature (366)..(366): "n" may be a, t, c, g, other or unknown
  misc_feature (396)..(396): "n" may be a, t, c, g, other or unknown
  misc_feature (440)..(440): "n" may be a, t, c, g, other or unknown
  misc_feature (466)..(466): "n" may be a, t, c, g, other or unknown
  misc_feature (479)..(480): "n" may be a, t, c, g, other or unknown
  misc_feature (501)..(501): "n" may be a, t, c, g, other or unknown
  misc_feature (519)..(519): "n" may be a, t, c, g, other or unknown
  misc_feature (523)..(523): "n" may be a, t, c, g, other or unknown
aaaaccaaaccaaatcattttattgggcaatttccttntaccanaaaattactaaaantataaatattaactctntaaaaaatactcagaatagatctgnaatcttcctcctcctcctncgaactggagccaatcttnttntttaaacnctgatggattgcatacatgtatgtcttccatatnanccacatacacaacattcagatacacttccctttgtgcagggggatacnccancctcctgccnggttntggaagctcaccttataatntaccaggacaaagctgtgtgctgagtaggaggttatggnggggttggggagtaacaaggagataaaagaccttgggggcccaacttccttatgnggacagagaagataggtcctttactcctcntcattaccctgccctctcatggactgggctaactgaaggccaanctcccaaagaagcttggactcactgngtgggattactgnnggtgtggctgtcagctcagcnccggaagggcaaactttnaaangggctgggaaccagg

SEQ ID NO: 8532 - DNA, 577 bp, Homo sapiens
  misc_feature (539)..(539): "n" may be a, t, c, g, other or unknown
  misc_feature (565)..(565): "n" may be a, t, c, g, other or unknown
  misc_feature (574)..(574): "n" may be a, t, c, g, other or unknown
cacactttggaaaatttcaactttattgttccaaacatgagaaaatccaacagttgcaaattatgccagcagttaaatgtgaatcctactcaagaacatgttccactggtagttttgattaaactctctactctgatttaactgttctctcttccatttgaaaaatcagagtactttttaatcagtctttgctaaacagcagctattgctattcaatggagacggtggccaccatttcccctgcatcgtctctcctacgtaatcagtccctgatgaactctcttcccataaaaatccctgtgtcctaaagtcatggcgtgctctatttcatggtcatttgtagagcacagcagcactgtgcctgtcaggaaaagtgtgtgctaactgcaataagcatgatgactgccatcacggttttgttattctctgtccacctccatggtctctaaatcagacaatctttaatctgaaaaggcagtgtccttattcctccaggaaactggatagaaacgctcctcatctaatggaagcagccctgncatcttactggatcttttccagaccncaggggaanggc

SEQ ID NO: 8533 - DNA, 569 bp, Homo sapiens
  misc_feature (483)..(483): "n" may be a, t, c, g, other or unknown
  misc_feature (530)..(530): "n" may be a, t, c, g, other or unknown
  misc_feature (532)..(532): "n" may be a, t, c, g, other or unknown
  misc_feature (568)..(568): "n" may be a, t, c, g, other or unknown
accagtaaaatagttttatttgattttaaaatagtcatcaatgtgaaaatttctcaaagcttaagagtaacagtctagagccaaggttgggagtgggggccaggcctcacacagagcccagcttgaggcccctgagccccaccctcctttccagagggagggaggagacagctgagggggccctgaatcagtcctctccctcgtccccaaggccagctgtgccaggcccctggagggcaacagctcatgcggaggactggggggggaagcaaacaggtaggaaacggaaatgaggttaacaattacaccatcacccccaaaaaaaaacaaaataacaaaacttgtgactatgaaaggatggaagatgaatactgataaactcctcagctccccataaaagcccagtctgggctgggttgggctgattggaggaaaggctttgagacccaactgcatgttacctctgaagaattaatattctangaaaaagggaaaaccatgaggcaagcttctgaagtcagttaacgcantnacaaggccttggcattggccacaacctgccccttcnt

SEQ ID NO: 8534 - DNA, 575 bp, Homo sapiens
  misc_feature (5)..(5): "n" may be a, t, c, g, other or unknown
  misc_feature (54)..(54): "n" may be a, t, c, g, other or unknown
  misc_feature (111)..(111): "n" may be a, t, c, g, other or unknown
  misc_feature (319)..(319): "n" may be a, t, c, g, other or unknown
  misc_feature (335)..(336): "n" may be a, t, c, g, other or unknown
  misc_feature (359)..(359): "n" may be a, t, c, g, other or unknown
  misc_feature (411)..(411): "n" may be a, t, c, g, other or unknown
  misc_feature (501)..(501): "n" may be a, t, c, g, other or unknown
  misc_feature (524)..(524): "n" may be a, t, c, g, other or unknown
  misc_feature (537)..(537): "n" may be a, t, c, g, other or unknown
  misc_feature (544)..(544): "n" may be a, t, c, g, other or unknown
  misc_feature (560)..(560): "n" may be a, t, c, g, other or unknown
gattnggatgaaatatttaatggaaaataaaaacatattccaaactgataaggntaatctggagaaatgttttagccataaaacccaaaaccggatttgagtaaataccgnggttcttagttaagtaaacacctccatcttatgtaaacaggtttaaaacaaaaaaaatattattttctgatttggttgtgtaatcgtgggcctcagaggaaaagcttcctaacccttttgtcatatatatatatattttttggagtcttgctttgtggccatgctggaatgcagtggtgcaatcttggctcactgctacctccacctnctgggttcaagcaatnntcctgcctcagcctcccaagtanctgggactacaggcgtgcaccaccatgcccagctaatttttgcattttgtanaaatgtggtttcaccatgttggccaggatggtctttgatctcttgacctcgttatctgcccacttcagcctccaaagtgctgggaatacnaggtgttaaacaccggacccagnctcctttggcatntcttganggaccctcaaaaaganatccttggggggaac

SEQ ID NO: 8535 - DNA, 580 bp, Homo sapiens
  misc_feature (502)..(502): "n" may be a, t, c, g, other or unknown
  misc_feature (507)..(507): "n" may be a, t, c, g, other or unknown
  misc_feature (530)..(530): "n" may be a, t, c, g, other or unknown
  misc_feature (546)..(546): "n" may be a, t, c, g, other or unknown
  misc_feature (560)..(560): "n" may be a, t, c, g, other or unknown
  misc_feature (577)..(577): "n" may be a, t, c, g, other or unknown
aaaacttaagagttgtttatttctgaaatttttcatttagtattttcggtctgcagttggctatgagtaactgaaaccatgagtaacagaaaccatggatgggggaggatgactggagtctggagtatcctatcctacatggcctgggaatgtttgttctcatgctctgcctggcagttaattgttcacaagtgtccccataagtaactgtcgagaagattctcacaggagaccacgtgggttgcctgaagaagccagagtgaaggagggttgaaatcaacgcctttagagtcttaggaataaaagttaaaaagccccagagaaatgttgtcctttgtccacggcacctgcactaacccctcccagaaagtgggcatgcagtttcccaggccagacgagtgttcgttgctcaccgaagaccagtgtttactagcaggattgtcgccagaagcagctgcattctccccggatgcagacctgcccgttggtagggactctgctnacacngaacatggccggtacacctgtgnccgtggtgaccttcancacttttggacatntcgcgtgggtgttgggnaag

SEQ ID NO: 8536 - DNA, 590 bp, Homo sapiens
  misc_feature (483)..(483): "n" may be a, t, c, g, other or unknown
  misc_feature (521)..(521): "n" may be a, t, c, g, other or unknown
  misc_feature (526)..(526): "n" may be a, t, c, g, other or unknown
  misc_feature (537)..(537): "n" may be a, t, c, g, other or unknown
  misc_feature (550)..(550): "n" may be a, t, c, g, other or unknown
  misc_feature (554)..(554): "n" may be a, t, c, g, other or unknown
  misc_feature (590)..(590): "n" may be a, t, c, g, other or unknown
atttcaaaaacagggatatctgcatttaatttcattcagtaaatcaattccagttaacttaccatctcttaaaaatgggagaaagcaaacataggacgtgaaaagttaaagatgcgtgacatactggagagtaataagacatactggagagtagtaagtgcacacgtggcaattaagggttgtaatttagatgtaacacaagaaaaaaagtaaaattactgtactttattgctgtatctatgctttcccagtatagctataatactacaaggagccacagagtgccaccttctggtttaaaactgtggcaccttatttcttttgaaatgtcactttataaggtgtatgtagaaagcaacagcagcagttacaaaatgttgtctgagtgattctgagagctcaaaacaaggatccgcgtataggctgaagaaaaagacgttcagttaacagtgcgcgctgtagaactttaacacaagtcttcangtggaattcctgtgtaaaccttagtagagatgccactnacggngaccaaaagtnaaaatctttttanccgntacaagttaatgagggggctggattttgcaaccacn

SEQ ID NO: 8537 - DNA, 571 bp, Homo sapiens
  misc_feature (488)..(489): "n" may be a, t, c, g, other or unknown
  misc_feature (497)..(497): "n" may be a, t, c, g, other or unknown
  misc_feature (509)..(509): "n" may be a, t, c, g, other or unknown
  misc_feature (534)..(534): "n" may be a, t, c, g, other or unknown
  misc_feature (536)..(536): "n" may be a, t, c, g, other or unknown
  misc_feature (569)..(569): "n" may be a, t, c, g, other or unknown
gagactgagtcttgctctgtctcccaggctggagtgcagtggcacaatctcagctcactgcagcctccgcctcctgggttcaagcgattctcctgcctcagcctcctgagtagctgagattacaggcacacgccaccatgctcagctaacttttgtatttttagtacagacagggtttcaccatgttggccaggctggtcttgaactcctgacctagtgatccacccgcctcagcctcccaaagtgctgggattacaggcatgagccacaacgcccaacctttttttttttaaactttaattaaatgctactttctcatagacttccctagactggtttgcaatctaaggtaataggaaacaaggcattgggcattttgaagaaactgcaggttaagctatggtgccaagcagaagactaaacactgatttgagtgtcaaatcttcagcacgttctgggatagaggcaggttctcaaatggttcctannggtctttnctcttcactaantaaattttccttttttggggaatcnangcagatacaaacccctggatggcctttttggcnaa

SEQ ID NO: 8538 - DNA, 596 bp, Homo sapiens
  misc_feature (436)..(436): "n" may be a, t, c, g, other or unknown
  misc_feature (515)..(515): "n" may be a, t, c, g, other or unknown
  misc_feature (537)..(537): "n" may be a, t, c, g, other or unknown
  misc_feature (557)..(557): "n" may be a, t, c, g, other or unknown
  misc_feature (571)..(571): "n" may be a, t, c, g, other or unknown
  misc_feature (575)..(575): "n" may be a, t, c, g, other or unknown
  misc_feature (587)..(587): "n" may be a, t, c, g, other or unknown
  misc_feature (593)..(593): "n" may be a, t, c, g, other or unknown
ataaaccaagaaagtaaatttatttaaattactaaaatagcttttaaagtcatttacagatcagctgctataattatttttcctgaaagacataggtaacatattacttttaaattacttgggtcaatgaaacatttaataaaaacatttgtttctctatataatacgtatgtataaaataagccttttcaaaaactctggttttcataatcctctataaatcagatgatctgacttctaagaggaacaaattacagtaaggggtatacatttatgaatactggtagtactagaggaaagacgttaaaccactctactaccacttgtggaactctcaaagggtaaatgacaaagccaatgactgactctaaaaacaatatttacatttaatggtttgtagacaataaaaaaacaaggtggatagatctagaattgnaacattttaagaaaaccatagcatttgacagatgagaaagctcaattatagatgccaaggttttactaaactactattngtaggtaaaggaaatccatttnacaccctttatataaaatcnctatcttggcttgnggcnctccttaaaagnttaccngct

SEQ ID NO: 8539 - DNA, 543 bp, Homo sapiens
  misc_feature (413)..(413): "n" may be a, t, c, g, other or unknown
  misc_feature (445)..(445): "n" may be a, t, c, g, other or unknown
  misc_feature (497)..(497): "n" may be a, t, c, g, other or unknown
  misc_feature (502)..(502): "n" may be a, t, c, g, other or unknown
  misc_feature (504)..(504): "n" may be a, t, c, g, other or unknown
  misc_feature (508)..(508): "n" may be a, t, c, g, other or unknown
  misc_feature (524)..(524): "n" may be a, t, c, g, other or unknown
  misc_feature (526)..(526): "n" may be a, t, c, g, other or unknown
ctagtttgggttagattataatcatctgaagcacaggataaccgagaagcaaaattccattctggtacaaacacccaatttctagaaaagagaaaggaaaagaagaaatacgacgtgagcttttttgatcagaagactccatgaaatgagagcggtggtaatatgaatccacgtgatttttcaagtcttcctgttgtacagtcatcaaaatgaccaggtttgtgctgcaaaggagccagcaccatgtggctactgctttgattgttctcagatgaatgtttatacaaaataatatcttatcttcatttagtttataaacatacacagtgctgtccctttcaaattaaggaaaaaaaaccacacacacaaatactgcaaagtagcaaaatacaaaggaaaacaaagctactttnggtttttggcaacattaaaaaagaaagaaatntaaaaagcaatgtggcattggtccctattcattaaaaaaaaaaagggacttngggcncnacanaatcagaattaggttngntttctaaaaattcaaag

SEQ ID NO: 8540 - DNA, 593 bp, Homo sapiens
  misc_feature (469)..(469): "n" may be a, t, c, g, other or unknown
  misc_feature (523)..(523): "n" may be a, t, c, g, other or unknown
  misc_feature (550)..(550): "n" may be a, t, c, g, other or unknown
  misc_feature (569)..(569): "n" may be a, t, c, g, other or unknown
  misc_feature (582)..(582): "n" may be a, t, c, g, other or unknown
  misc_feature (586)..(586): "n" may be a, t, c, g, other or unknown
atttaaaacttttattaacgcttgaagaaaaataatgcaatgtgacaatgtacaggtcctgttgcctaaatccgtagtagaaacagatattatcacttagcaagctcacgtggtgccaattctgagatcagacggggttgttcctccttaggaagtggccactggaagcattgtttttccatgctatttccgtgaagccttttgcttggttcgagtttaaatttctccctttgtgtgagtatgactatagttctggcctggtgttttctatttatttagttttagatgtcagcattttactatacttggtcctctcacttcagaataacagggctatttattgatacaaaggagaggtgttcagatcatcttgttaagatgcagagctcaaaataaacactaaatctttatttggagatccacatccttcctcaaaggaaggctcatgagtaaatttgtatgcagtatnaagcccaagtagagggtgtattttaatgactactttgcttacattttagattgngccaaatgtctcaatcaatgcttgcangaatggtggcccttcccangtttaacccaaanaccntgggcaa

SEQ ID NO: 8541 - DNA, 583 bp, Homo sapiens
  misc_feature (518)..(518): "n" may be a, t, c, g, other or unknown
  misc_feature (521)..(521): "n" may be a, t, c, g, other or unknown
  misc_feature (542)..(542): "n" may be a, t, c, g, other or unknown
  misc_feature (571)..(571): "n" may be a, t, c, g, other or unknown
  misc_feature (575)..(575): "n" may be a, t, c, g, other or unknown
  misc_feature (577)..(577): "n" may be a, t, c, g, other or unknown
  misc_feature (580)..(580): "n" may be a, t, c, g, other or unknown
atttgcttattattgcattttatagaacctggcaaagatattacaagaatgtaaaaatacaggccaatttctttcattaacatagatgagaacaaaatctaaacaatacgttatcaaaataaatccagtattgcatacaacaaataataatggtgtatttcagcaagttgtggtaacaaattgaagtaaatcaatgtactaagccacattaacagaacaaaaatgatacacaattgtctcaataatttacagaaaagacataggtagaatacgagttttcattttatacaaaaacttgtagtaaattaacagatcagaacttcctaaatttgatcccctgcatcaatcaaaaaaaacctgcatcaaatactatgcttaatggcaaaatactgaaagcgccccctatccacctcaagacctgtcatcagtcaaagatgcttactctcaccactgggtgcatcctagtctgagtaactggttaaaacgaaagaactgtctggggcgcggcgggtcacatntgnaatccagcctttgggaaaacnaggccggtggaccttgcggcaagaattcnagancngcnggc

SEQ ID NO: 8542 - DNA, 537 bp, Homo sapiens
  misc_feature (406)..(406): "n" may be a, t, c, g, other or unknown
  misc_feature (461)..(461): "n" may be a, t, c, g, other or unknown
  misc_feature (475)..(475): "n" may be a, t, c, g, other or unknown
  misc_feature (499)..(499): "n" may be a, t, c, g, other or unknown
  misc_feature (511)..(511): "n" may be a, t, c, g, other or unknown
  misc_feature (522)..(522): "n" may be a, t, c, g, other or unknown
  misc_feature (529)..(529): "n" may be a, t, c, g, other or unknown
  misc_feature (536)..(536): "n" may be a, t, c, g, other or unknown
cgtaaacaaaatttaatacaaccatatagtcaagtaataatggttaaaagacattttattagatacaacttttaaaaaattaaactatgcaagaagtatatttaaacaaaacatgtaagtaagtattcacgtgctacaacttaactaagaacaattaaatacaaagcattctttccactatgaagactctggagcctctaattgaaagcaaatgaccttaggtctatactagttgtaaagcagattatacttttgttcaactctaaatttgtattgtcttagagctccaacaactctcaataaaaatttaaataaagaaaccttgggggaggggtgataggggaaggggagagtaagtgctttttcaaaaaggtaaatgaaaaagcctgaagagggaaaaaattgncataagtatggaacaaaaataagtatacttttttgacattcgatgtagatactgnaaatgaatttcccnggtttaatcaatgtaggatagatntttggctgaatntttaaaaagcncctaggntcaaaant

SEQ ID NO: 8543 - DNA, 539 bp, Homo sapiens
  misc_feature (458)..(458): "n" may be a, t, c, g, other or unknown
  misc_feature (471)..(471): "n" may be a, t, c, g, other or unknown
  misc_feature (475)..(475): "n" may be a, t, c, g, other or unknown
  misc_feature (481)..(481): "n" may be a, t, c, g, other or unknown
  misc_feature (490)..(490): "n" may be a, t, c, g, other or unknown
  misc_feature (493)..(493): "n" may be a, t, c, g, other or unknown
  misc_feature (537)..(537): "n" may be a, t, c, g, other or unknown
ccttgccaaactttattgtgattaaaattccagagacagtaccagctccacatacctctagccctgtctttgccctagttcccgagtgtccttcacccccatcttccaaatcatctctggtttcacggggaagaaaaaacctagggctgctgtgaatgtgccctctcaggtccctgagttggccccaggtagagctgtaagagatcaggaagagggcctccctgcctgacggcgatgatcctggaggcaacgtgtggagcagaaagagaagtcgaggtagtgaaagggagtcaggccttggagggatgccccacaactccagcagcgtcgagtattgacgattgcagagtcagggattggagaggtaggggctcccaactgggcagcgagtcggcgctctgcagccagagctctcttctctcggtcactgagggcggcaaatcgccgctgctcttctngttcacgcttctnctgnttctgntgcctctgntgntggtccttcccgttgccgccggctgctttggttccttttccggnaa

SEQ ID NO: 8544 - DNA, 554 bp, Homo sapiens
  misc_feature (49)..(49): "n" may be a, t, c, g, other or unknown
  misc_feature (64)..(64): "n" may be a, t, c, g, other or unknown
  misc_feature (101)..(101): "n" may be a, t, c, g, other or unknown
  misc_feature (152)..(152): "n" may be a, t, c, g, other or unknown
  misc_feature (266)..(266): "n" may be a, t, c, g, other or unknown
  misc_feature (289)..(289): "n" may be a, t, c, g, other or unknown
  misc_feature (367)..(367): "n" may be a, t, c, g, other or unknown
  misc_feature (467)..(467): "n" may be a, t, c, g, other or unknown
  misc_feature (473)..(473): "n" may be a, t, c, g, other or unknown
  misc_feature (491)..(491): "n" may be a, t, c, g, other or unknown
  misc_feature (513)..(513): "n" may be a, t, c, g, other or unknown
  misc_feature (522)..(522): "n" may be a, t, c, g, other or unknown
  misc_feature (546)..(546): "n" may be a, t, c, g, other or unknown
  misc_feature (554)..(554): "n" may be a, t, c, g, other or unknown
caccagcagcgtcctccctttattttagtttattaatagaatacagagngcaggcacttacagnggtcaaactgagcgaggagtgggtgaggtctcctcanagagaggccgccctgggcccacccatcagggaggcatgggcgggagctganaggcccccaagaccccccgccaccaccacccacatagcccaagcccagccaccctgggggacccaggaggaggaggaggagaggaatagggcaaggccggcccgggccaacggntccgggcctagcaaaggcacctntggcagccgaggctgggccaggctcaggctgtgtggttaatatggccgggaaggactatgtacaccttaggcctgcanctgggcactaccgagcccactgggccaggcttgccgctggggaactcctgctaatgggaagttgatatacccctggaccccacaagggctggggatgtangccccnttgtgcccgactttttanaaggcttgcctaatgggctttncaacccaanaaacttggtagaatccccccaggntggacccn

SEQ ID NO: 8545 - DNA, 568 bp, Homo sapiens
  misc_feature (433)..(433): "n" may be a, t, c, g, other or unknown
  misc_feature (519)..(519): "n" may be a, t, c, g, other or unknown
  misc_feature (522)..(522): "n" may be a, t, c, g, other or unknown
  misc_feature (548)..(548): "n" may be a, t, c, g, other or unknown
  misc_feature (552)..(553): "n" may be a, t, c, g, other or unknown
  misc_feature (567)..(568): "n" may be a, t, c, g, other or unknown
aacaatgagacatatgcagctttatttaataatccgtaaaaagtcatactctggcagagtgatgcattccttatctcagcagaaagcaaacagtctgtctgaaaagccccttcccaagatttggaactgtgtaaccctgagcttacatctcaatgctcccaagagctgggctcttgctatgtggtagttggtctccacaattctctcaccctccagcaatactctctgtctggctgtgactccctcacctaacagtagacatgaggctgaaaacaactttacctggacagggctacccctacagattggccctttctctcctacaaaagggagttcataggattaacaatctttctaatggctgggagcaatgactcatgcctgtaatcccagcactttgggaggctgaggcaggtggatcacctgaggtcangagtttgagaccagcctggccaacatggtgaaacttcatcctactaaaaatacctaacttaactgggtatggtggcaagtgcctgnaanctcagttctcggaggctaagccgganaatnnttgaacccaggggnn

SEQ ID NO: 8546 - DNA, 558 bp, Homo sapiens
  misc_feature (470)..(470): "n" may be a, t, c, g, other or unknown
  misc_feature (479)..(479): "n" may be a, t, c, g, other or unknown
  misc_feature (485)..(485): "n" may be a, t, c, g, other or unknown
  misc_feature (512)..(512): "n" may be a, t, c, g, other or unknown
  misc_feature (523)..(523): "n" may be a, t, c, g, other or unknown
  misc_feature (526)..(526): "n" may be a, t, c, g, other or unknown
  misc_feature (531)..(531): "n" may be a, t, c, g, other or unknown
acatacatattcttatattgtgtaataaaagattctgaagtccattactggctagaataataactagaaattgcttaatattactatacattgcatttgaacttaatctccacagtaacaattaggtagtattacttggatttcatggatgaagaaaaccaagatacaaaaagttcacacagccagtaagcagatgagcctgacttcatagtcatacatagcctgaattgagtcccagcaggagcacatgggcatggacatctaccagatttgggaactggcgtagccaagcaagaaataggagacggaatcaggagttaggattccatgcttaggaccatcccagatggatggctgcctccctctgggagctgcactcttctgaggttgcaggcatccagggccagggtgcttctgtgaggtgtgccagcacgtgccactctgcttggatcaagctatcatggtctganggctgcttncctcancataagaaggggcttctattgggaagngtaggcttcantgnagggnccacttgagccttttttttagagacag

SEQ ID NO: 8547 - DNA, 552 bp, Homo sapiens
  misc_feature (488)..(488): "n" may be a, t, c, g, other or unknown
  misc_feature (497)..(497): "n" may be a, t, c, g, other or unknown
  misc_feature (535)..(535): "n" may be a, t, c, g, other or unknown
  misc_feature (540)..(540): "n" may be a, t, c, g, other or unknown
  misc_feature (547)..(547): "n" may be a, t, c, g, other or unknown
  misc_feature (549)..(549): "n" may be a, t, c, g, other or unknown
  misc_feature (551)..(551): "n" may be a, t, c, g, other or unknown
agaagtactgatttttattgttatacaacacatatatataattgtttccccaaaatatgcacaattacatgtgtcaattttaaaaaatgaatgaagactataatgtaaaacctatagctgtaaaattcctagcacaatacagaagggtgaagcttcattacaactggtcgtggcaataatttgggggacgtagcatcaacggatgagacaacaaaagcaagggaatacacaaggtactgaatcagtgtatgaaaaatatcccaaacagacaaagcagaacatggaatagatatatgcacattgtagtattactcacaaacatgttacctggaagcaaatgtacccttaaggatgagtagattcagcaaacagggcacgtacaatcactgggatagcattcagccttaaaaataaggaaatcttgaaaagtctaccataaggacaaatcttcaaaacattctggtaagtaaaataagacagtccaaaanggaagctgnttaataccctcatgtaaaaattagtcaactcaaggaanccagngtcgtantntna

SEQ ID NO: 8548 - DNA, 571 bp, Homo sapiens
  misc_feature (506)..(506): "n" may be a, t, c, g, other or unknown
  misc_feature (517)..(517): "n" may be a, t, c, g, other or unknown
  misc_feature (537)..(537): "n" may be a, t, c, g, other or unknown
  misc_feature (552)..(552): "n" may be a, t, c, g, other or unknown
  misc_feature (571)..(571): "n" may be a, t, c, g, other or unknown
cctttagacatttacaggtatttatttgagtaagagctcataaaatatatttttataatatgcacaagaaaaaatacatttgaatgaataaaaaataaaatgacaggaggtgacagaatttagtgtttataaatgaggtcataaagaactttaataattcagagaagaagttcaaagtgtatttaaaagttgagaccctgctttacaatattttataattttaaaaaaaggcgtttaaaggtgataggtgacttaataattttccactttcaaaatgggtttctagacactgttgttcatgaaccaaaaacaaacaaacaaacaaacaacaacaaaacccaaacactttggcaagcaaagtattattagtcatagcagcttcataacagtttacttttttaatataaagatttttcaattcacacttgtagggagtagaaaaactaatatgctaagtctgtaagctacgcagccaaaaataatgacctaatgaagcccgaatctgngaaaaggtgcnccacactgcttatatagtanctgagtaaatgtaancctgggcttattaactttn

SEQ ID NO: 8549 - DNA, 539 bp, Homo sapiens
  misc_feature (461)..(461): "n" may be a, t, c, g, other or unknown
  misc_feature (496)..(496): "n" may be a, t, c, g, other or unknown
  misc_feature (504)..(504): "n" may be a, t, c, g, other or unknown
  misc_feature (514)..(514): "n" may be a, t, c, g, other or unknown
  misc_feature (523)..(523): "n" may be a, t, c, g, other or unknown
  misc_feature (528)..(528): "n" may be a, t, c, g, other or unknown
  misc_feature (535)..(535): "n" may be a, t, c, g, other or unknown
aaaccacatactttatttgatgtcaacatcaaagaaggaatattttaaaaagcacatagaaacccttaagttagtaatattttaaactgcatgaaaaacatattattttacatcttgtcatactgtatatacaactgtacataaacttctgcatttcaaagcacttgtcatttataaagtgaaaagtttgaaagtgctaaataaacatttcctaattattatttttaaaaacagcactcttttggaagttatctcttctttgtgcttatagttgatctgcaaacatttcaagtcaaagtttctggaaacttctttaggaaacatctggagaaaatcatagtagacaagggctaagtgcagacataagcagctccattttataaacaaaatttcgaccttccattttattccactgaacttctttgaatggcccacgaagatgactccatttggtatcttgnaaaacatcactttttgggaaggctttacatttggntccgaggnaactggaccntaatcttgntggcncttttanggcc

SEQ ID NO: 8550 - DNA, 570 bp, Homo sapiens
  misc_feature (445)..(446): "n" may be a, t, c, g, other or unknown
  misc_feature (474)..(474): "n" may be a, t, c, g, other or unknown
  misc_feature (555)..(555): "n" may be a, t, c, g, other or unknown
  misc_feature (567)..(567): "n" may be a, t, c, g, other or unknown
  misc_feature (569)..(570): "n" may be a, t, c, g, other or unknown
aacaggtaaaatgaataacatactttatttaatccaatagagccaacatattatcattgcaatacacaaaggaaaagttattagtgagatattttacattattttttgaagtaggtatttgaaatctggtatatattttatacattgagcacatctcaattcagactaggcatgtatgaagtactcaacagacattggtggctcctggataccatatgggacagccagtgccattctcatccttgatatttgtttctaccctcacatgtacctcttaatttcttttatagctggttcaaaaaacatattgcacctctctaccaaagtcatagcagctcactcaacagctgtttgttcctgcgcataaagagagtgtggaaaagctggaagaaatcatcctcttcctttaagtgctttatattggtcatattttctctttgggggnntctttctattctgagagaaaatatgtantgggatggttttctcttcccactactcttttggttttactgcaattaattggaaggacgaattttttttatggtcaattgntctcttaaaggngnn

SEQ ID NO: 8551 - DNA, 536 bp, Homo sapiens
  misc_feature (419)..(419): "n" may be a, t, c, g, other or unknown
  misc_feature (482)..(482): "n" may be a, t, c, g, other or unknown
  misc_feature (484)..(484): "n" may be a, t, c, g, other or unknown
  misc_feature (487)..(487): "n" may be a, t, c, g, other or unknown
  misc_feature (494)..(494): "n" may be a, t, c, g, other or unknown
  misc_feature (498)..(498): "n" may be a, t, c, g, other or unknown
  misc_feature (506)..(506): "n" may be a, t, c, g, other or unknown
  misc_feature (530)..(530): "n" may be a, t, c, g, other or unknown
caacaaacactttatatcatttattaatgcagtatacattagatctaaaatctgcagtttctaagcacaccatgtttagatctttcagatccttctgcagttttaggttatttctacagaggtacctttaagtgaatgaataccacattctgtaattcctgaaaatatagtacagagtgaaatgatttaaatataatttaggcacatattgattatgaaaatagattatctctcaatacaatacttctctgtcttggtaaaaataataaagcaaagaaaatagttcatttctgaagttgctttccttcacttgtaaaggtctgatctcctcccactatgcatatgtaccctttactgttaaggaaagctttgcatatgtagatatagaagaataagctacgtaaatactaaagatatgncattctcccaaaggagacacaggtgggtttcaatgattccttggcttatggtgatgagtctgnanaantcagaanccanttggcccngcttatatcccggttttggggganaaaata

SEQ ID NO: 8552 - DNA, 577 bp, Homo sapiens
  misc_feature (483)..(483): "n" may be a, t, c, g, other or unknown
  misc_feature (530)..(530): "n" may be a, t, c, g, other or unknown
  misc_feature (554)..(554): "n" may be a, t, c, g, other or unknown
  misc_feature (556)..(556): "n" may be a, t, c, g, other or unknown
gaccgtaggacatattaagatgtttattatttactaagagtaacatgtatacatttgcagtaatttgtacaatccaactacattacaattcacagtaacatacactagctctaacctgccttggatacaattaagtctcctcaacacactattttatcgccaaacttacattctggcttttataatcattttgcaacacctggtacagtatacacctatagctttgccatagaaatgcccctaaatgcccttcagagagcagaggtgaatactttctcatgaagaaacgccaacttttctaagcgagttcgtttcagtagtgggagccattcccagtaggataactctaccacacggtagccaagccgagccagctgccgcctcttcatattgtgcagtccaaggagatccctggagccatagcaatactggttcctggttgtgaactgaacagccagcttcattcttggggtctgcatgcangctgcggggcacaagccaagccatcttcaatggccctgattatctgntacattggaaaaggaagcccccanangtacagtggcttatttcaact

SEQ ID NO: 8553 - DNA, 537 bp, Homo sapiens
  misc_feature (487)..(487): "n" may be a, t, c, g, other or unknown
  misc_feature (490)..(490): "n" may be a, t, c, g, other or unknown
  misc_feature (496)..(496): "n" may be a, t, c, g, other or unknown
  misc_feature (499)..(499): "n" may be a, t, c, g, other or unknown
  misc_feature (530)..(530): "n" may be a, t, c, g, other or unknown
  misc_feature (532)..(532): "n" may be a, t, c, g, other or unknown
  misc_feature (535)..(535): "n" may be a, t, c, g, other or unknown
gtcaaaaaggatcaaacactttattcatctacacataacatatataaaagcaagcaaaatcaggatgttttcctcagccaccctttccacattttgtgcagttttagtgaactataaatcactgacttcttcaggcctaaaagagaaaagatgagaaagtaagaagatggaggcttgttgagtggatgctcagagtttcagtgacattctgagcagacttgtctttggaggagggcagtgaggggctgacccgtggctctaggagaccagggagctgaaggtgattaaaggtcactgtgatcaatgtagggggaaatgattctgatttcggcattttccgatttagggctatggatgccaacggttcctaagttattgggataagtgatccttttgagttatgaacatattggcagcctctgaatttagctctttcaaaaggggtaggacaaggataagactctgtatgccactgggtccccgtctnttnagcctnaanttcaaccccacttactggctctatggcctgngnaangc

SEQ ID NO: 8554 - DNA, 583 bp, Homo sapiens
  misc_feature (467)..(467): "n" may be a, t, c, g, other or unknown
  misc_feature (483)..(483): "n" may be a, t, c, g, other or unknown
  misc_feature (532)..(532): "n" may be a, t, c, g, other or unknown
  misc_feature (552)..(552): "n" may be a, t, c, g, other or unknown
  misc_feature (562)..(562): "n" may be a, t, c, g, other or unknown
  misc_feature (565)..(565): "n" may be a, t, c, g, other or unknown
attgtgaacacaattttctttatttcatttttggagttttctgaacagaaaaatacaattgattttctgtatattgatctagcctgtgaccttgctgaacttgattaattctattacactatgattttttgttgtggttagacccttacacaatcaaatgaggttaaaaaaaattgtcagagtggccccagaccaacaacaggatgacagtagcctttgcccatacagagataaaatttagtttttgcagtcctttcccatagagattgtatggcagtagccaattctatggcctactgccatacaacctgaactgaagtccagaaagtttaggtgactgggccacagagctaattactggtggagccaagaagagaaattatatccctacctccttgcccactaagctccccattccagtggggctgctttctggtccttttccatgattgggctttagtagctgncatttccttcagtgtncaagaagtattttcttggcctttcagtaaagcttcccaaagtttgctgngttccgccttaacttgtaanttggcctccntgntaaacatttttgaaaacg

SEQ ID NO: 8555 - DNA, 535 bp, Homo sapiens
  misc_feature (470)..(470): "n" may be a, t, c, g, other or unknown
  misc_feature (480)..(480): "n" may be a, t, c, g, other or unknown
  misc_feature (490)..(490): "n" may be a, t, c, g, other or unknown
  misc_feature (496)..(496): "n" may be a, t, c, g, other or unknown
  misc_feature (507)..(507): "n" may be a, t, c, g, other or unknown
  misc_feature (515)..(515): "n" may be a, t, c, g, other or unknown
  misc_feature (522)..(522): "n" may be a, t, c, g, other or unknown
ctaagagatgaggtctcactacattgcccagggtggtctctaactcctagcctcaagtgatcctcctgccttggcctcccaaagcgctaggattacaggcataagccaccacacctggcccccatattcgagcctaatgttcctttgggaaacaactgagtaaagaggatgccaacccccaaaagaaactgaagataacgttctgcccagtgggaccgatgatcatgctataacactccttttgtctccaggaaaagctgaaagcagctctagctaaccaacccccctctaaaccccctgacatacatacggcttccaactccagcaagggggccaaccaacccactcaaatcaaaaccaaaaactaaatcataacagtaaaaatatgaccagcaaacaacgaaagaggatatctctggtcccacagtttcctacgggagaccagatggctgatttctggcattctctgncctggagccngaaaattacnccaatntcccttggacntaaggtanaccttgnggaccaaagccaa

SEQ ID NO: 8556 - DNA, 571 bp, Homo sapiens
  misc_feature (485)..(485): "n" may be a, t, c, g, other or unknown
  misc_feature (497)..(497): "n" may be a, t, c, g, other or unknown
  misc_feature (537)..(537): "n" may be a, t, c, g, other or unknown
  misc_feature (559)..(559): "n" may be a, t, c, g, other or unknown
  misc_feature (561)..(561): "n" may be a, t, c, g, other or unknown
atgtttaaatgttgtttccttaatatcatcaaatatccagccagagttcaaatttgctttgtcccttaagcacatttttacaagattgattggctagttcagatcaagaggcaaacaaggttcatacattgcactggattcacacgtctcaagtatctttcaatctccaggcttcccttcccttcccttttcctcttgtaatgtatttgttgaagaatctaggtccctctgtagtcactcctctccccattcccagcccctggtaaccacttacctgttttctgaccctataattttgtagggcccactttgtactgatgtacttctgactaggtgtgtttatgttcaagcatcagagccaaggcccaaacctctaccctggccctccttctgctgtggcccaactgtacccagagctgggctctcccgtctccctgcctgttaatcctagaagtgggtgccgaggagggagaaacaggaagganggagttgggganggcaacttggtacatggacaacaaggctgttccacttcancaacaagctttggggtaacttngntccaaattga

SEQ ID NO: 8557 - DNA, 534 bp, Homo sapiens
  misc_feature (453)..(453): "n" may be a, t, c, g, other or unknown
  misc_feature (456)..(456): "n" may be a, t, c, g, other or unknown
  misc_feature (461)..(461): "n" may be a, t, c, g, other or unknown
  misc_feature (478)..(478): "n" may be a, t, c, g, other or unknown
  misc_feature (495)..(495): "n" may be a, t, c, g, other or unknown
  misc_feature (504)..(504): "n" may be a, t, c, g, other or unknown
  misc_feature (526)..(526): "n" may be a, t, c, g, other or unknown
gaataaactgcatgtttattccaggctcgtttagctggacgagcagtacagacagggctgaggctgactccatggccatgtgggcagaggtcaaacccatgatctctcttcctacagcttcctaatgtctgcgatgttggtcttttgaaggaggcccccacagagccgagcttgcttggttatctgggactgctgctcagtctgagtaggggagggtaatgaaccagtcaggcctcctcctggaggtgcccaacactggcctagtccccaaggctgacgaaacatggtctggcctgaccccaggacgtggggtgaggaggaacactgggcataatatagtagcggaaacaggcaagcctctatgggtcccttccccttagaattttagggtagggaacgaggaggctacagactaaattgcagaactatctgcacctgggccttgagcttttnctncactnccagtggagccattctngggactgagttcatgangactaccanaaggtggcaagttcaatctggncctggctt

SEQ ID NO: 8558 - DNA, 550 bp, Homo sapiens
  misc_feature (58)..(58): "n" may be a, t, c, g, other or unknown
  misc_feature (420)..(420): "n" may be a, t, c, g, other or unknown
  misc_feature (428)..(428): "n" may be a, t, c, g, other or unknown
  misc_feature (476)..(476): "n" may be a, t, c, g, other or unknown
  misc_feature (494)..(494): "n" may be a, t, c, g, other or unknown
  misc_feature (497)..(497): "n" may be a, t, c, g, other or unknown
  misc_feature (520)..(520): "n" may be a, t, c, g, other or unknown
  misc_feature (532)..(532): "n" may be a, t, c, g, other or unknown
  misc_feature (541)..(541): "n" may be a, t, c, g, other or unknown
  misc_feature (544)..(544): "n" may be a, t, c, g, other or unknown
gacggtcttgcttgaggtttatcaattaattgatcttttctaataaccagctctttgntttattctttaaagtgtttatctgttttcaatttcattgagttctactctttgttattgcatctttctgctggcattgggtctatttttccttctttttttaggtttttgaggtggaagcttaggttactggttgaagacttttcttttctagagcatgcatttagtgctatatattttcccatcagttctgctttatgtgtctcacaaattttatgttgttttcattttcattcagttcagtgcatttttaaaatttcttttgagatttcctctatgaccatgggttataaaatattgttgttcagttttcaagtgtttggtgattttcccattatcattggtatttatttctagttcggntcttttgnggttggagaaagtacttgtagtatttcagttcttttaaattggttgangcttggtttaatgcccanggnctatccttaaatggggggtccgngagcccctgganaaactgggntcngccggt

SEQ ID NO: 8559 - DNA, 555 bp, Homo sapiens
  misc_feature (262)..(262): "n" may be a, t, c, g, other or unknown
  misc_feature (392)..(392): "n" may be a, t, c, g, other or unknown
  misc_feature (424)..(424): "n" may be a, t, c, g, other or unknown
  misc_feature (446)..(446): "n" may be a, t, c, g, other or unknown
  misc_feature (514)..(514): "n" may be a, t, c, g, other or unknown
  misc_feature (531)..(531): "n" may be a, t, c, g, other or unknown
cacgtagtaacttatagatatatttggaaaactgattatcttttaaaaaatgactactaaacagattaaaatgcagagttcattaaaatacagaggatgcctctggttctctggtattgactctttttgtctactaagataagaagtctgggctaggctgaaaaactcagaatccaggtctggggtttcccagtactatgctcccatttcccagtactgtgctcccatttcccagtactatgctcccatttccgagtactgngaactcccctttcccagtactgtgggctcccatttcccagtactgtgctcccatttcccagtactgtgctcccatttctcagtactgtatgcccatttcccagtactgtatgcccatttcccagtactgngctcccatttctcagtagtgtactcccatttntcagactgggctcccacttttnagtactgggctccacttccaagactgggctccatttccaatactgggctccattttgcaagcttgganccccatttccaagaccngggttcccatttcccagactgggc

SEQ ID NO: 8560 - DNA, 419 bp, Homo sapiens
  misc_feature (124)..(124): "n" may be a, t, c, g, other or unknown
  misc_feature (161)..(161): "n" may be a, t, c, g, other or unknown
  misc_feature (301)..(301): "n" may be a, t, c, g, other or unknown
  misc_feature (354)..(354): "n" may be a, t, c, g, other or unknown
  misc_feature (408)..(408): "n" may be a, t, c, g, other or unknown
  misc_feature (412)..(412): "n" may be a, t, c, g, other or unknown
  misc_feature (414)..(414): "n" may be a, t, c, g, other or unknown
  misc_feature (417)..(419): "n" may be a, t, c, g, other or unknown
gcagggagtgcaacatttatttcataacagaaccccttttccacagagcagctgacagggggctgcatgaaacatactttggaaattaaagtgaactctccacttgggcataatgttatgtggncacatggattggcttaaaagggaaacaagaatacttnaacatttgatcaacagtaggcagttgctggacattttagaaaaaggagaaatccattttttgaccatggctaaacatggggaaacagcatcacattttcctgaaccaccctaatcccggcccctcaagatccaccaggtntgcaaccccaaaccccagtcacatacattaaatctacacttttattttttagntgtaaaatgtgctttttcctcaatgaactttaatcagtccaggacctacaaacncacncncannn

SEQ ID NO: 8561 - DNA, 514 bp, Homo sapiens
  misc_feature (468)..(468): "n" may be a, t, c, g, other or unknown
  misc_feature (500)..(500): "n" may be a, t, c, g, other or unknown
  misc_feature (502)..(503): "n" may be a, t, c, g, other or unknown
  misc_feature (510)..(511): "n" may be a, t, c, g, other or unknown
  misc_feature (514)..(514): "n" may be a, t, c, g, other or unknown
aaaaaatgcaatttttatttgttgaacataatttgaaactgtaaaaagatttctctgtccatcaccagaaatccagaagacacctgaagaggactgactgtttctttgccacggggaaggtgtgatgaaacaattaaaatcccatgcatccctggcccttcctccacgttgcccctcagaatgcctgcagctgcagcaggcaggaggcagcaggagaacccgggctgtggaaggcccctctgcctctctgggaaagctgctggggaagccagaggtcacagtgcattggaggcctggctttcagccactggccaggccaaaatgaaacatctgctcaagtctccccaggcaccttgctgggggtgagtgggagaaagaagtggagaaaactgatgctggaccacaagttatcaccctgtaccttggctttgaagtggcccctgctggtacaggaacagggtgagagtnaaagttaattaattaaagccacatgctttaangnnaaaaggnnccn

SEQ ID NO: 8562 - DNA, 514 bp, Homo sapiens
  misc_feature (2)..(2): "n" may be a, t, c, g, other or unknown
  misc_feature (234)..(234): "n" may be a, t, c, g, other or unknown
  misc_feature (311)..(311): "n" may be a, t, c, g, other or unknown
  misc_feature (358)..(358): "n" may be a, t, c, g, other or unknown
  misc_feature (423)..(423): "n" may be a, t, c, g, other or unknown
  misc_feature (466)..(466): "n" may be a, t, c, g, other or unknown
  misc_feature (485)..(485): "n" may be a, t, c, g, other or unknown
  misc_feature (487)..(487): "n" may be a, t, c, g, other or unknown
  misc_feature (489)..(489): "n" may be a, t, c, g, other or unknown
  misc_feature (499)..(499): "n" may be a, t, c, g, other or unknown
  misc_feature (501)..(501): "n" may be a, t, c, g, other or unknown
gngttgctgaccttcacttttatttaaatatagtgatcttttaagagaataaacaaaaaatactttacacagcaaatattttacataaatgtaaacatgcatgtctacttcataattaagcaaaaaaacttttaggcacaagattttaaaaataaagaatgagacaatgaaaccaagactggaataacagaagtaacaaaaactcacatttcctaactcttcaattggtcttgncttccaacctattggttaaggcctgagtttcagaaatcctaccttccttgccaaatagaaacatccactttggctgnatataacattatccacataacacactaattctctttcaaaataatgnaataaatataccattcatacacacacacacacacacacacacacacaccctgctgaaccagcctntcaaataggaaaataaggattttggaattttcaaggtttcctnccacccaagcacattcccncncntttacccctncnttggaaaaatggg

SEQ ID NO: 8563 - DNA, 557 bp, Homo sapiens
  misc_feature (427)..(427): "n" may be a, t, c, g, other or unknown
  misc_feature (476)..(476): "n" may be a, t, c, g, other or unknown
  misc_feature (524)..(524): "n" may be a, t, c, g, other or unknown
  misc_feature (531)..(531): "n" may be a, t, c, g, other or unknown
  misc_feature (542)..(542): "n" may be a, t, c, g, other or unknown
  misc_feature (557)..(557): "n" may be a, t, c, g, other or unknown
cattggaaacttaactgattctttattccaactatcaattttataacttgagcccaattaacattcaaagggtcatgattacctcttctcctaagtggtcaactccatagttgtatagttcccccacataatgccttctaacaacatcttcactaacttgaaggtgatgggctaaatccacagctagagctggccaatcttggtctttcccaaaaggagtgggtgtggcctcttctgtgggatctttgacctttgtggctgaatgttgggcctggacagctgcactgacaactttcaataagaactgttgtcgtacagaaataaaatttggatccatttccccactaggtaataactgaattgaagttaggtctttgaaaaatgcattttttcccttactgtcaaaaagtgaaagtggcttcacggncttcagagaaaacctcatgactgcatacaagatggagcacaggatggantggtgcttcaccagtgggtagtgggatgtgcttttggttaagggccanttccctntggaaattggncctttcacggaaagn

SEQ ID NO: 8564 - DNA, 526 bp, Homo sapiens
  misc_feature (9)..(9): "n" may be a, t, c, g, other or unknown
  misc_feature (13)..(13): "n" may be a, t, c, g, other or unknown
  misc_feature (22)..(22): "n" may be a, t, c, g, other or unknown
  misc_feature (34)..(34): "n" may be a, t, c, g, other or unknown
  misc_feature (52)..(52): "n" may be a, t, c, g, other or unknown
  misc_feature (108)..(108): "n" may be a, t, c, g, other or unknown
  misc_feature (118)..(118): "n" may be a, t, c, g, other or unknown
  misc_feature (138)..(138): "n" may be a, t, c, g, other or unknown
  misc_feature (158)..(158): "n" may be a, t, c, g, other or unknown
  misc_feature (160)..(160): "n" may be a, t, c, g, other or unknown
  misc_feature (186)..(186): "n" may be a, t, c, g, other or unknown
  misc_feature (215)..(215): "n" may be a, t, c, g, other or unknown
  misc_feature (219)..(219): "n" may be a, t, c, g, other or unknown
  misc_feature (246)..(246): "n" may be a, t, c, g, other or unknown
  misc_feature (260)..(260): "n" may be a, t, c, g, other or unknown
  misc_feature (287)..(287): "n" may be a, t, c, g, other or unknown
  misc_feature (291)..(291): "n" may be a, t, c, g, other or unknown
  misc_feature (429)..(429): "n" may be a, t, c, g, other or unknown
  misc_feature (432)..(432): "n" may be a, t, c, g, other or unknown
  misc_feature (441)..(441): "n" may be a, t, c, g, other or unknown
  misc_feature (444)..(444): "n" may be a, t, c, g, other or unknown
  misc_feature (489)..(489): "n" may be a, t, c, g, other or unknown
  misc_feature (497)..(497): "n" may be a, t, c, g, other or unknown
  misc_feature (507)..(507): "n" may be a, t, c, g, other or unknown
caccataanggcnccactaaanggttttatttanaacctcagcagcctgtanaggctacacaatttcaggttcatcagcttttacaactattttcaacgtaagaatanaagctattancaaataacttctatcaaatntaaaagggaggcctaggatntncaacatctttgctttataaagatgcncctaacatgaactaacttgtcaactttanactnttacagcagctcaaacagttgcaaaancaatgaacatcagngatttctggcaataagtctgtcagttntaanagagtaaacaacacttttttaaagctacattctagtctttcttcatacactacacataagaaagaaatgcaggttcaaaaataaatcacccaaaagcttttccatgtccctgagacttaaccttcagttcaacccaancangagataagngtnctccaaaaggccttctgaatctcaagaatctggtttccaacttgnacattttntaaggatagncaataaggttccttaaaaa

SEQ ID NO: 8565 - DNA, 544 bp, Homo sapiens
  misc_feature (343)..(343): "n" may be a, t, c, g, other or unknown
  misc_feature (399)..(399): "n" may be a, t, c, g, other or unknown
  misc_feature (502)..(502): "n" may be a, t, c, g, other or unknown
  misc_feature (504)..(504): "n" may be a, t, c, g, other or unknown
  misc_feature (507)..(507): "n" may be a, t, c, g, other or unknown
  misc_feature (544)..(544): "n" may be a, t, c, g, other or unknown
attttgaaaagtatttacttagtttaaataaattaattgcaaataaaaattaagctacaatatatagcctgaataaaaatgactagaacaaatacaacacaggacttgctttcttgcattagtcacaaagcatgtgacaatctagaaaacttcaaaatcaattacatttctttgaaaaaggggtaacagcagttactgatacatcacaactaataaacttataatacaagtttcctgacatgcatttcctgagtgaacccaaatgatcattttttaaaacaaggaagtttcgacagttgaagtaaaataaaataattcatggcttctaagcaacaagttttgntttttaaaaaccaaaagaaaattcagaacagttttgtaataggataaattaaaggnatgctccacatataaaactttgctacagcagttaagtattatacacttttcaaactaaagggaaacaatcaaaattttaaaggaagatccggctaactaaaangnccnggttctacaggggcaaaaaaagaattggtggaaggcn

SEQ ID NO: 8566 - DNA, 553 bp, Homo sapiens
  misc_feature (553)..(553): "n" may be a, t, c, g, other or unknown
acagaagtaaagtttattacatttgaaacaatacagcagaaacctcaaaagtttactcataaatatagtttaattcttacaaatcttcttttgaaaatgcaattcatatatgctgcaacctcagaagtttgaatttgaaatgaaatatgaaggtagtagtcagggaagtcacatcagagtgccttgtcaaatatccaaacaaatcagcacatacctcttccttgatacaggaggaaaaaagtgattctaaatatatccaagtgaatgcagaaaaatacattactatttgaggcagaccatgctaaaatataatttacaatgattagtttgcacttaagatggttaataacgcatttaaaccaatgaaatgaaggttaagttgaattttgtagtatttgctcagtctctgtctaaacaatagttcatctgaaaagtttggaaaaagccaatacctgatcttctctttatgcttatcatttctactggcatcttaaatgcaaaccaaatcaatccgcatcagaatttttaccttttaaaatggaaactaatggcn

SEQ ID NO: 8567 - DNA, 551 bp, Homo sapiens
  misc_feature (445)..(445): "n" may be a, t, c, g, other or unknown
  misc_feature (498)..(498): "n" may be a, t, c, g, other or unknown
  misc_feature (500)..(500): "n" may be a, t, c, g, other or unknown
  misc_feature (508)..(508): "n" may be a, t, c, g, other or unknown
  misc_feature (519)..(519): "n" may be a, t, c, g, other or unknown
  misc_feature (525)..(525): "n" may be a, t, c, g, other or unknown
agctgcaacagcactttattgggatctgagtctacagttcacatagggaggtgaagccgtgggagaagcaggggtaaaaaaaaaaaaaggggggggacttcaccccctagggacagctgcttccaaacctaacaaaaccccagggtaagtcctcgtgctgggcctcgagccagcaaccctagtcaaatcccaaggcaccggtcagcatgtgggtcaaggggcccactatggggacatacactcaagaggatgaaagctctttagcttcagaatcagattgccttccccagaccccaccccaaaacaggctcctctcccatctcccccttcacagtgacaaaacacaagcccacatcccagggcctggagtatttgcatgcatttgcatagacggcaacacaggtccagctaaggcctttttctacataaagtgacatcagtgcanggctggggaatttgctctactgggtgaaagatatctgagggcccccaaccagncnggccgagnccccttcaggnagttantacccttggaacttgggctggccagc

SEQ ID NO: 8568 - DNA, 546 bp, Homo sapiens
  misc_feature (2)..(2): "n" may be a, t, c, g, other or unknown
  misc_feature (34)..(34): "n" may be a, t, c, g, other or unknown
  misc_feature (40)..(40): "n" may be a, t, c, g, other or unknown
  misc_feature (144)..(144): "n" may be a, t, c, g, other or unknown
  misc_feature (296)..(296): "n" may be a, t, c, g, other or unknown
  misc_feature (441)..(441): "n" may be a, t, c, g, other or unknown
  misc_feature (445)..(445): "n" may be a, t, c, g, other or unknown
  misc_feature (458)..(458): "n" may be a, t, c, g, other or unknown
  misc_feature (484)..(484): "n" may be a, t, c, g, other or unknown
  misc_feature (516)..(516): "n" may be a, t, c, g, other or unknown
gngattctttttttcattgaaaatgtcaatttanaaaacncaaaagatttcacactttattcagacaacactgagagaagaaaagggaagagtgagtaggggagatggggagatccggctcccaaggatttcaggaaacacagnggggcacctgatctagcacacattcagagggtagggaggggaagggatctagctatactctgggcatggagcagggaaggtcgtccttgctatggaggaaaggagagaggaaggacagaggaagagtggtcccccatctcatctcgacaatntcacaagacaggagtatatcgggacctagctaccagggagggatggatgcaagaagggattccaggatctaacagatccttgacactctggatctactctcaagaaacaaccttccccagagaatcaggatctgggggaaatggngggngtcagccaatctnctttagagacccccaaagcaaccccnggtttggggttcctgccccttccccaaaatgngggaaatgaaaaagtttggccatggggaat

SEQ ID NO: 8569 - DNA, 548 bp, Homo sapiens
  misc_feature (488)..(488): "n" may be a, t, c, g, other or unknown
  misc_feature (490)..(490): "n" may be a, t, c, g, other or unknown
  misc_feature (510)..(510): "n" may be a, t, c, g, other or unknown
  misc_feature (516)..(516): "n" may be a, t, c, g, other or unknown
ctatggagtcatgtttaatgtagggaaataacattttgtcaatactaggcaccataaaatgtaaacacaattactgtcataaacctagatataccttcaaggattgaagattgaaagtggctttgttttagttagttaccctgtttgcatatagtgcagaaaaaggtcttcatgttagcactatgtacattaagaagagatccaaattacaagagaggcagataaaatttgaattctttaagcattcattaaacgaagttttggagtaacatccacgtttatcttcctttcactaatcacgttccctgttaagcacatcataacaacagcacagtgaagtgaatgatgaaataagagcattttgatacactagaaaacagtgctcagtgagacatttacattctatttatatgattaaacatttgatcatacagtaccttcctacaggattactggctaattttggggtgggggttatactattagangnattacttacctggaaacttncttccntaattgcaacctttggggctttaattttatgg

SEQ ID NO: 8570 - DNA, 261 bp, Homo sapiens
  misc_feature (10)..(10): "n" may be a, t, c, g, other or unknown
  misc_feature (13)..(13): "n" may be a, t, c, g, other or unknown
  misc_feature (74)..(74): "n" may be a, t, c, g, other or unknown
  misc_feature (119)..(119): "n" may be a, t, c, g, other or unknown
  misc_feature (133)..(133): "n" may be a, t, c, g, other or unknown
  misc_feature (164)..(164): "n" may be a, t, c, g, other or unknown
  misc_feature (167)..(167): "n" may be a, t, c, g, other or unknown
  misc_feature (206)..(206): "n" may be a, t, c, g, other or unknown
  misc_feature (222)..(222): "n" may be a, t, c, g, other or unknown
  misc_feature (246)..(246): "n" may be a, t, c, g, other or unknown
  misc_feature (249)..(249): "n" may be a, t, c, g, other or unknown
  misc_feature (259)..(259): "n" may be a, t, c, g, other or unknown
cacatgaagnctncatttattctgggatgggttagagtaagcctttgaggctgccatcaggctggctgagttgntgcccaacattgtatccagcagtctcaggcccgcacagtgcacanccagcatggggctnacaggtgcagatggaatccataagctcccanctntgctgcaaaggccaggcctaggggtccgggtacatgcantgagtccttggggcanggccagccctgctgactacacaancanggttggtggnga

SEQ ID NO: 8571 - DNA, 551 bp, Homo sapiens
  misc_feature (446)..(446): "n" may be a, t, c, g, other or unknown
  misc_feature (501)..(501): "n" may be a, t, c, g, other or unknown
  misc_feature (505)..(505): "n" may be a, t, c, g, other or unknown
  misc_feature (524)..(524): "n" may be a, t, c, g, other or unknown
  misc_feature (540)..(540): "n" may be a, t, c, g, other or unknown
  misc_feature (545)..(545): "n" may be a, t, c, g, other or unknown
  misc_feature (548)..(548): "n" may be a, t, c, g, other or unknown
ataggtacacgtctatttactgcacaaatatcaaatgtgtacatcgatggtaaaaagttgtaaactggctaacagtcatcagcacttaagtacaatgggtctatactgacacttccattctcattttaagagcttatatatttaattgatgactgctctcctcatcagggacatttaagatatggaaaaggcatttatatacacacgcatgcatgcacatatgcttaaccttacaaactgaaaaagtaagcccaagcatgattaattaattactttgcctggatcaataaatactagtctcaaatgttaagtgtactaataaggacagaagctatcagttacataaattatcatgttgctacctactgatgctccatttgctaatgcatgttagtcagtctgtagactttatccaacacatacatagagattatttttttggttgnttgaaattctcagcagatcaacagatctcttttggacatttctcttccattactnttangatgaaaatggaatacctnttaaattaaaattttnaaatnccngcc

SEQ ID NO: 8572 - DNA, 559 bp, Homo sapiens
  misc_feature (419)..(419): "n" may be a, t, c, g, other or unknown
  misc_feature (517)..(517): "n" may be a, t, c, g, other or unknown
  misc_feature (544)..(544): "n" may be a, t, c, g, other or unknown
  misc_feature (551)..(551): "n" may be a, t, c, g, other or unknown
  misc_feature (559)..(559): "n" may be a, t, c, g, other or unknown
ccattgaaagaatatttattttgcagctgttaaaagacatttttccctaaaaaaagaaaagctgtgctttacatagcaatcttataaaagaaatgctagaatcagaaaaccatcattttaggctgggtgcagtggctcacacctgtaaccccagcactttgggaggacgaggcaggtggatcacttgaggtcaggagttcaagaccagtctggccagctcgatgaaactccgtctctactaaaaatataaaaattagcagagcacagtggcacctgcctgtaatcccagctactcaggagggtgaagcatgagaactgcttgaacctgggaggcggaggttgcagtgagccgagattgtgccactgccctccagcttggacaatagagcaggatttcgtctcaaaaaaaaagagaaaangaaaaccattattttgcaatagccaatgttataatctacacaggcacagactatcaatgcttaaaatcattttaaaaggacatcttaaggggtaattncccgaaatttggatttttgaacccttntgtaatnaaaattcn

SEQ ID NO: 8573 - DNA, 557 bp, Homo sapiens
  misc_feature (504)..(504): "n" may be a, t, c, g, other or unknown
  misc_feature (554)..(554): "n" may be a, t, c, g, other or unknown
ggaaatcaagttttgtttttatatgaacagaagtagaccatctagaaatatttcagtttatttaaattgttaagtagaatatgaaaccgaatttgtagctagtaccagagaatggacttaactgtttggtgtttaatgagaacagcttctacacaggatcccaagagacttacagaaaaggggcaaagccctaatattaagcaaataaaactcatgtttcaaacagattatacaaaaattgatttatacttcatttcccttttttgatatttagaaagtgcagatttaacaaaaggtagccatatcctttctatgtacaatgccgattataattatgcaaaactgtcagtctgttatccaaaaatcccagtgtttagctctccaaccttaagtcatggaattgaataagaattaaagagggttaaaataaaaaagctaatgccacattccagataaagggaagcaccaatacattaatctaacaccagtaggttaaccctaacntttcaaaagcttaacatcattcattatatttttagtggaaaatagggatnttc

SEQ ID NO: 8574 - DNA, 561 bp, Homo sapiens
  misc_feature (477)..(477): "n" may be a, t, c, g, other or unknown
  misc_feature (501)..(501): "n" may be a, t, c, g, other or unknown
  misc_feature (512)..(512): "n" may be a, t, c, g, other or unknown
  misc_feature (528)..(528): "n" may be a, t, c, g, other or unknown
  misc_feature (541)..(541): "n" may be a, t, c, g, other or unknown
  misc_feature (544)..(544): "n" may be a, t, c, g, other or unknown
ctttttgacagagttttgctcttgttgcccaggccggagtgcaattgctatggcgtgatcttggctcaccgcaacctccgcctcctgggttcaagcaattctcctgcctccgagtagctgggattacaggcatgtgccaccacgcccagctaattttttgtatttttagtagagacgggatttctccatgttggtcaggctagtctcaaactcctgacttcaggtgatccacccacctcggcctcccaaagtgctgggattacaggcgtgagccactgcgcctggcccggttttacttttaacaagcgtgagagcatctgttgctgagctatgtgggcaacatgcatgtgaggtgcggccctgccctccaggacacgcagcttcatgagtagagaagaaatcttatccaagggcgaagtagcaagaacacagcaaaccaacgcacacagaagggcgatccacaagtcaaactggcanatggaaacagctgagggtctttantggctcccaanggaaaaggcgggctantctgagaactgangcngaagggacttgctggtt

SEQ ID NO: 8575 - DNA, 553 bp, Homo sapiens
  misc_feature (473)..(473): "n" may be a, t, c, g, other or unknown
  misc_feature (483)..(483): "n" may be a, t, c, g, other or unknown
  misc_feature (506)..(506): "n" may be a, t, c, g, other or unknown
  misc_feature (538)..(538): "n" may be a, t, c, g, other or unknown
  misc_feature (546)..(546): "n" may be a, t, c, g, other or unknown
gattcaaacaagtataattctcaagttatcacaaaatttcccacaaaaatttacaatcagcaaaatagtttccttatttctcatgtatcattttcatataattccatggtttcactaatattatatgttacaataagcctccattagtccctcaaaacgatgatataaataagtctgtacaacctagcatagagtaaaaaactgaaaccaagattcccaacgtttttcatagcagccgggcacactttggtgaccccaacgagaaccctctcggcagcagccaggagctgttcaccttccagaagcagggcctgtggcagcctaacagggagaggccacggggcccaaaaacgcaacacgtctcaaggcaaacccgagggaggaacttggtctgggaggaagagagaactcgctcctcaaccaccccagacactggagtgtcaggaaagcactgagctgttggggcacactgnccagcccggnccagcaagctaaccagtcacagnttcaccttcaacttttcaaggagcaattttantggggaanaaccctt

SEQ ID NO: 8576 - DNA, 559 bp, Homo sapiens
  misc_feature (514)..(514): "n" may be a, t, c, g, other or unknown
  misc_feature (529)..(529): "n" may be a, t, c, g, other or unknown
  misc_feature (536)..(536): "n" may be a, t, c, g, other or unknown
  misc_feature (549)..(549): "n" may be a, t, c, g, other or unknown
  misc_feature (557)..(557): "n" may be a, t, c, g, other or unknown
gtttgttctctagttttattatttgtcaattttcccaacacaggaactataactcattttgaggatttttttcagtgcatttcgcagcaaaaatgaacaagggaatcattaaaattgttgtacacaaaccaactctttttcttataatttacaatttgttgaaaaaattattgttttgctgttttcatcctactaacctctttaacagaacacaatttatcagagcacaaagcttaaacttcttatgatgatgcaacagacacagccacctacaatggctgataaacaacaggtatgttacacacactgattggaagaccatatcagaaaaaacagagtaaggcaccactcttgggaaattaaggtagcttgcagtaacaagtgttgagcaccataataagtaggtgctcaataaatacatgaatgaatgatgaaagccataattagctctattcttttaattgccagcaattcttcaacctcaacaaaaatacttatttaaaaaaaggattgnacctggatccacttnctggacnttttttccggaanccttttantt

SEQ ID NO: 8577 - DNA, 558 bp, Homo sapiens
  misc_feature (198)..(198): "n" may be a, t, c, g, other or unknown
  misc_feature (417)..(417): "n" may be a, t, c, g, other or unknown
  misc_feature (439)..(439): "n" may be a, t, c, g, other or unknown
  misc_feature (441)..(441): "n" may be a, t, c, g, other or unknown
  misc_feature (488)..(488): "n" may be a, t, c, g, other or unknown
  misc_feature (533)..(534): "n" may be a, t, c, g, other or unknown
  misc_feature (545)..(545): "n" may be a, t, c, g, other or unknown
catctttaagattctatttttctagaaccacttttggcaccaaaatctgtatcagtcagattcaactagagaagcagaaccagtaggggatatattgagatttattgcaaggaattgacttcagtgattgtaggagctggccagtcatgtctaaactctgtgaggcaggctatcagaagggcagactgtcaggaactntcgccaagcactgggctgctgtcctcaggcagaatttcttcctcagggaaacccttagctctgttctttaggccttctgactaatcaggtcaggctgacccagattatctgagataatctcacttacttagtcaattgggaatggacttctgtcacatctacaaaataccttcacagaaatacctagattagtggctgattgaattactgggtgactgnggcctagctaagctgacacatncnaagaccattcgacccaccacaagccttgctgaagcttaagggctttnggacaagccttaacctttttccactggggtcccgggatgggcagnnttatttggctnaacctaaaatccc

SEQ ID NO: 8578 - DNA, 522 bp, Homo sapiens
  misc_feature (7)..(7): "n" may be a, t, c, g, other or unknown
  misc_feature (167)..(167): "n" may be a, t, c, g, other or unknown
  misc_feature (182)..(182): "n" may be a, t, c, g, other or unknown
  misc_feature (253)..(253): "n" may be a, t, c, g, other or unknown
  misc_feature (413)..(413): "n" may be a, t, c, g, other or unknown
  misc_feature (470)..(470): "n" may be a, t, c, g, other or unknown
  misc_feature (481)..(481): "n" may be a, t, c, g, other or unknown
  misc_feature (495)..(495): "n" may be a, t, c, g, other or unknown
  misc_feature (497)..(497): "n" may be a, t, c, g, other or unknown
  misc_feature (503)..(503): "n" may be a, t, c, g, other or unknown
  misc_feature (510)..(510): "n" may be a, t, c, g, other or unknown
  misc_feature (522)..(522): "n" may be a, t, c, g, other or unknown
gctcggngccattttatttaatgcaaacactagacagtttacaagtcacacctggacacaagcacgtgaacagatgtacagggaattctggaattttgagatcagtccccatttcttcctcagggccctggcactgaaccccagcccctgtcccagagcctcccctntgggtcccaccccanaagccacgcacacctccttccgcccagctttatctttccttgagctgtgacttcacccagcatgtgctcanagttgttacaaattttctctgccaaattaagctgacagagattggccactttcaaccagtcctttcagtccactgtgtctcccctctcgcttgggacaggcccatgctggccagtgcaaccttcagatagacacatggtgaccagagcccgccaggcttntgcaggtggcagtgtcgagcaagtgtaaagatgtctgtgggaaggagaagcttctgnaatgaacgttntggaaacagaaagntnaagggnctttcangcattttcaggn

SEQ ID NO: 8579 - DNA, 551 bp, Homo sapiens
  misc_feature (190)..(190): "n" may be a, t, c, g, other or unknown
  misc_feature (462)..(462): "n" may be a, t, c, g, other or unknown
  misc_feature (493)..(493): "n" may be a, t, c, g, other or unknown
  misc_feature (500)..(500): "n" may be a, t, c, g, other or unknown
  misc_feature (520)..(520): "n" may be a, t, c, g, other or unknown
  misc_feature (528)..(528): "n" may be a, t, c, g, other or unknown
aacagccttcaccatcttttattcattctgctgtgatacaactaaaatggccagtaaattctcccctgggtctcaggtaacagttttccaaaagtgaagtatcactttctctgcacagtggtgaaagccggcatttggatgggctggatcgggtggacaggctgaaacactggcttctttctcacttcanagtgtgttttcactgcagggagcagctgattccttttgatgatctgtaaggccagctgagtattaccattctgcagttcaaggtagactgccagcaagatggcctcagggggcacctctttaggatggatcattgaagccgcctggtggagacactttcgggctttgtcatattcgctcctcaggcagtaagcgctgccaaggttgaacagcatcacagtcctggcagagttgacggaactggggtagcactgaggggcccgcttaccagangattccattggttcattttcaccttgctganccttggncctgctcatttgaagaaaancctaaggngacattagtgacatttttccggg

SEQ ID NO: 8580 - DNA, 544 bp, Homo sapiens
  misc_feature (60)..(60): "n" may be a, t, c, g, other or unknown
  misc_feature (430)..(430): "n" may be a, t, c, g, other or unknown
  misc_feature (455)..(455): "n" may be a, t, c, g, other or unknown
  misc_feature (497)..(497): "n" may be a, t, c, g, other or unknown
  misc_feature (509)..(509): "n" may be a, t, c, g, other or unknown
  misc_feature (521)..(521): "n" may be a, t, c, g, other or unknown
  misc_feature (525)..(525): "n" may be a, t, c, g, other or unknown
  misc_feature (534)..(534): "n" may be a, t, c, g, other or unknown
  misc_feature (541)..(541): "n" may be a, t, c, g, other or unknown
gtgaggttgaaaagtcatctatacagaggactttaatgagcattcagatttttcacttgngatataatttacatacaaaaaatagcataacaaaaatatattggaatatagtatagatacatttacataaacattgcatgaatatcacagtggatatgtagagaaggttgataaaccttaaaatgtaaaatatcaaaggatcaaaaacatctaaaactgacctggaatgaattatttgtaattttaatattctataaatctaagtacctttttatgttaaacttaaaagcattataatggttattaaatagaacaggggtcaagcaaacttttcccagaaaaagttagatagtaaatatttcaggctttgtgagttacagagtttctattgcaactaatcaatgctactgctgtagtgcaaaaccagccntaggatacacgtaaaccaatgagcntgactgggttccatagaacttattttaaaaataggcacaggnccgaatttggtncctggaccatanttgntgacctttnaacaaanaaa

SEQ ID NO: 8581 - DNA, 572 bp, Homo sapiens
  misc_feature (463)..(463): "n" may be a, t, c, g, other or unknown
  misc_feature (482)..(482): "n" may be a, t, c, g, other or unknown
  misc_feature (499)..(499): "n" may be a, t, c, g, other or unknown
  misc_feature (561)..(561): "n" may be a, t, c, g, other or unknown
  misc_feature (565)..(565): "n" may be a, t, c, g, other or unknown
  misc_feature (571)..(571): "n" may be a, t, c, g, other or unknown
actttttaaaagttttattcagcaataagaccataatttttcatatttaaggagtatgaaaaatttgtggagttttaaaagctgaatacatgtagcgttggatcaaggcacatacaagactggccaaagggcgtacaatgcactttggttttttgttgaaaaaaaaaaatcatggcaacagaaaagtgatatggtttttcaacaagtaacagctcacaattcagtaggaagctagaaggaaatgttacattacgagttcattatataatatctggaaaattgtgacagtaatgggcagtattcttgatctttgtaaaagtaaattgaacatttatgtcagtgttaaaacctttgacataaaccagatctaaatttgatgtctagtatttatttttctttaaattatctcttatttaaagaactactttctctggaatggtgaagggaatcgcttataattacnttcatttttaatatgcctnaaaggttctctgacatnccttatgataaaacctcttaacccttaccaattttggggttaaaatcactttttaaaaatcnggangggttng

SEQ ID NO: 8582 - DNA, 493 bp, Homo sapiens
  misc_feature (440)..(440): "n" may be a, t, c, g, other or unknown
  misc_feature (442)..(442): "n" may be a, t, c, g, other or unknown
  misc_feature (448)..(448): "n" may be a, t, c, g, other or unknown
  misc_feature (452)..(452): "n" may be a, t, c, g, other or unknown
  misc_feature (482)..(482): "n" may be a, t, c, g, other or unknown
  misc_feature (489)..(489): "n" may be a, t, c, g, other or unknown
  misc_feature (493)..(493): "n" may be a, t, c, g, other or unknown
gcaagttgaatatttatttaaaaataaatctcaaaaatatctattgacagtacagtaagaggggcatgtgcaaacaacagaaagggggaagtcagtcctgctgtgggaagcccacacatcagtgtgttggagcaaagttcacgaaggccatgggctgactgagctgtggtgtacgaaatgacattcagctaatactggactcggttcacctttgacacctggagaggtggggaagccagggggtggggagtccagctggggatccttgtgtttaggaagggggcggccaagggatgagcctttgggagaggccccgtgtggcaggagggctcatttcacaagccaacaggcctctagctcgccgctccaggtggatgtttggtgacctgaagggccctttccagtccaagttggctttgcaatgggaggggtaggtgcancnagggtnccanagacagaaatcctctttaaaggaaaaaccnaccaccnaacn

SEQ ID NO: 8583 - DNA, 429 bp, Homo sapiens
  misc_feature (341)..(341): "n" may be a, t, c, g, other or unknown
  misc_feature (376)..(376): "n" may be a, t, c, g, other or unknown
  misc_feature (399)..(399): "n" may be a, t, c, g, other or unknown
  misc_feature (403)..(403): "n" may be a, t, c, g, other or unknown
  misc_feature (410)..(410): "n" may be a, t, c, g, other or unknown
  misc_feature (417)..(417): "n" may be a, t, c, g, other or unknown
  misc_feature (420)..(420): "n" may be a, t, c, g, other or unknown
ctttttttttttttttttttttttcttggcaagcattcatttattcacgtaacataagccagacactatgccaggggctggcgatacagaaatgagtaagacatgatccctggcccctcccatccctggaatgtctactaggaagaagctgctagaaaaagacaacatgctactttaaagccaagaggggccagtctcccattccagcttggtacacactgaacacatttgaggcttatgactggttcttttacttacaaatattgtttagacacattttcaaatgtcacaccaatcaataataataaggaatggattttatctatattgacagttctttnaaccttaagagtgaactgctacaggtaagattcantcacatttttcaggagaaagctnttgngaccaanatgcttnggntatctaata

SEQ ID NO: 8584 - DNA, 549 bp, Homo sapiens
  misc_feature (418)..(418): "n" may be a, t, c, g, other or unknown
  misc_feature (493)..(493): "n" may be a, t, c, g, other or unknown
  misc_feature (504)..(504): "n" may be a, t, c, g, other or unknown
  misc_feature (508)..(508): "n" may be a, t, c, g, other or unknown
  misc_feature (513)..(513): "n" may be a, t, c, g, other or unknown
  misc_feature (532)..(532): "n" may be a, t, c, g, other or unknown
caattctcacaagatttatttataaataatgcaataaaaatactagtaagctctttatggagttagacaaattgatacaaaaattcatgtagaaaaataaacacggaagaatagctagaacacctgatattctagtaaaagaaaagccataaggggtgtctactcctatcacatattaaatcattctataaaatctctgtaattaaaactgaaatattgacacatgaataaacagaaagactagtggaagagaagagaaatctagaaatagacttaagtccataaggaaaatcagtatatgatgaaggtgttatctgaagtcactggagcatagatgggctctctaattaaatggtgctggacaactgggtggccatttggaaaaaaggtaagattagaatccattcctcatgccatncacacaattaactccaaatttaaagaagaatgacaattgaagaaagtgtaagagaattcctctataaactcagtnttgagagagcnccgnaaacntaaaggactgatcaatggnctccgtaaaaaattaaa

SEQ ID NO: 8585 - DNA, 509 bp, Homo sapiens
  misc_feature (383)..(383): "n" may be a, t, c, g, other or unknown
  misc_feature (417)..(417): "n" may be a, t, c, g, other or unknown
  misc_feature (430)..(430): "n" may be a, t, c, g, other or unknown
  misc_feature (456)..(456): "n" may be a, t, c, g, other or unknown
  misc_feature (468)..(468): "n" may be a, t, c, g, other or unknown
  misc_feature (482)..(482): "n" may be a, t, c, g, other or unknown
  misc_feature (498)..(498): "n" may be a, t, c, g, other or unknown
  misc_feature (506)..(506): "n" may be a, t, c, g, other or unknown
gtgattcagggccgagcagggctccctggaagccccctcttcctgccccaactttattttggttctagaatcattccagttggcatacccggttcccaccacggctgtcctgggcacacagttaacatgtcatgcagttagggggagggagagaggggagagggcagggggggagtcagtggcctgcaccgcacagccactgggttagagaaagtcggggtctcccaggctgcaaagccttgtccagccatgtgtctcctggccctgggctgacctcctgctgtggccatagggtagacagcctggccttggggctgggccatggctgtgtcaggtagggaaagccaccatcctgccttcagtcccctgggcccttgttctancccctcttcccccatatcactggggataatttgnttgcctgggtctncatagctcaccagttatggaccaaangaacaagggcanccaccttgagggtncatgctggcaccttgnggtggccnacc

SEQ ID NO: 8586 - DNA, 542 bp, Homo sapiens
  misc_feature (496)..(496): "n" may be a, t, c, g, other or unknown
  misc_feature (503)..(503): "n" may be a, t, c, g, other or unknown
  misc_feature (526)..(526): "n" may be a, t, c, g, other or unknown
  misc_feature (535)..(535): "n" may be a, t, c, g, other or unknown
  misc_feature (537)..(537): "n" may be a, t, c, g, other or unknown
cagattctgaggtctgtttgtgtttaatcagacaatatgcaaagtatttacaaccaattctggatacccccccaccccccgcaagtctgggccttggaatttcggagccccaggcccggcccagagccaggggtcccccaggcctctgcatagtcatctgaaatctacaaaacactgttaaaaaaaaaaaaggacagtattaagacaccttacacaaagggccttaggcagttggagagggatttgagagctcgctggggtgagtgagcccagatttgactggaatggacgggagaagacttgggtaataaagacgtatgaaaggaaaagttgaaatttcataggcaggcactgcttggcctccttccccactggcagggcctggctggctcaagaacccctggcagtgggaatgttattgctatgatgagggggccatggtgaaatgtcaacatgtttgggggacggaccggggggacattttacatggtaaatntggcccncatgagacccccccacttcccancttcccccncncgggg

SEQ ID NO: 8587 - DNA, 556 bp, Homo sapiens
  misc_feature (505)..(505): "n" may be a, t, c, g, other or unknown
  misc_feature (510)..(510): "n" may be a, t, c, g, other or unknown
  misc_feature (518)..(518): "n" may be a, t, c, g, other or unknown
  misc_feature (535)..(535): "n" may be a, t, c, g, other or unknown
  misc_feature (555)..(555): "n" may be a, t, c, g, other or unknown
cagtatacactctctttattatgagaatgaaaccaaataataagcaaaatacatcaggaatttcaaattgtactgcaaagaaggtcccagctggtctcttctgggagtgatctaactaacttaagctgaccctgtgactggctgaggataatcccttctgtccactgcaccgtgcaatgccacaggtcatgagatggtcagttcctcttgctctgtgtcgtctgaagcaagtcgaggccctacttctggttccgcccttcttccttgggcttagatttgctgggttagtagtttgctactattgtcaagactgtactgtccctttaaggtaccacatgccaccatagcttacacagcagtcctttagtactttatccacctcctgtttactgagatcttctccacactcttgagtcaacccgagactggatcatgtttcggcgtacccggtaatttttggaaaaaatttcaagcaaaacctgtcgatgctgatcactcatgtctncaganttccaaanggccaaacaccttttgntcatccggggaagcagcaant

SEQ ID NO: 8588 - DNA, 544 bp, Homo sapiens
  misc_feature (295)..(295): "n" may be a, t, c, g, other or unknown
  misc_feature (362)..(362): "n" may be a, t, c, g, other or unknown
  misc_feature (458)..(458): "n" may be a, t, c, g, other or unknown
  misc_feature (471)..(471): "n" may be a, t, c, g, other or unknown
  misc_feature (478)..(478): "n" may be a, t, c, g, other or unknown
  misc_feature (500)..(500): "n" may be a, t, c, g, other or unknown
  misc_feature (515)..(515): "n" may be a, t, c, g, other or unknown
  misc_feature (524)..(524): "n" may be a, t, c, g, other or unknown
  misc_feature (539)..(539): "n" may be a, t, c, g, other or unknown
gttttatttattcacttacaggaaatataaacacaaattctaaaagtgtgaagttgcaaacgacaggcaagttcacatttcaattaatgtgaactgaacaagagtttaaggtgatttttaaataccttccacgttagaaaatccttctttcttaaataagttttcatataaagccaagtccttgcaacttaacgacggttttacagtcttaagtgattttagaaagtgctcttgtttcactgtagttgcgtctagtccattttcttgcagagccagcaaagcagcttctgtgcanaggtttctaagatcagctccagaaaaaaaacaggtttctgctgcgaggttttctaaggagacatcangccctattggcatggtttttgtcagacttttaaaatagaaagcctgccttgggatctgggaggtggggatatagatgatcttatctaatcttccangttcgtaacaaancagtatnttaacacatcaggtctatttgntgcttgcaataatcntgacacttngggttaaaaaacttnttgaa

SEQ ID NO: 8589 - DNA, 551 bp, Homo sapiens
  misc_feature (303)..(303): "n" may be a, t, c, g, other or unknown
  misc_feature (452)..(452): "n" may be a, t, c, g, other or unknown
  misc_feature (489)..(489): "n" may be a, t, c, g, other or unknown
  misc_feature (517)..(517): "n" may be a, t, c, g, other or unknown
  misc_feature (535)..(535): "n" may be a, t, c, g, other or unknown
gcaaggaaggaataaggggatttattgaaaatgaaagtacactccacagtgtgggagtgggcctgagcacaggggctcaaaacgcctttcttgtttttgtatatagaaaatatacatgctttctcatctaaccgattttttttttttttttttttttaagacagagtcccactttgttgcccaggctggagtgcagtaggcatgatcttggctcactgcaacctccacctcctgggttcaagcgattctcatgcctcaaccaggcgccaccacacctggctaatttttgtatttttagtaganatggggtttcaccatgttggccaggctggtcttgaactcctgacctcaggtgatccacccacctcggcctcccaaagtgctgggattacaggcgtgagccaccgcgcctggcctcatctaaccaatttgggattctggttggagttcangaaaaactaaagttcccattactttcagaatattttnaaaataaaaaatcctgatgacttgtganggaaaaggaaaacatttnaaatcctgactttctt

SEQ ID NO: 8590 - DNA, 536 bp, Homo sapiens
  misc_feature (178)..(178): "n" may be a, t, c, g, other or unknown
  misc_feature (371)..(371): "n" may be a, t, c, g, other or unknown
  misc_feature (443)..(443): "n" may be a, t, c, g, other or unknown
  misc_feature (464)..(464): "n" may be a, t, c, g, other or unknown
  misc_feature (480)..(480): "n" may be a, t, c, g, other or unknown
  misc_feature (487)..(487): "n" may be a, t, c, g, other or unknown
  misc_feature (499)..(499): "n" may be a, t, c, g, other or unknown
  misc_feature (502)..(502): "n" may be a, t, c, g, other or unknown
  misc_feature (524)..(524): "n" may be a, t, c, g, other or unknown
accaatctttatgtatttattcacacatttgataaaaatgtcacagttaggagtgaaatcattacaatgacatgagtaactgtacagacagaccccaagtgcagaatcaaattgccctaagtcagaacatggagcaaccgcaactccttcgcacttgtgcatgtgtgtgcgctcgcanacgcacacacacacacacatattctctctctctcttatgcacacatccatccacatcccaacaattgcaggtgctaagtttggacataacccagggactcctccctgacttctgtcaggtcctggaaagaagaagtaataaatgaaaagcagctgggactgctcgatgcatctctcctcttccaacaatgacncggagaaggcaagacatacactggggcagctacttccttggcacaaaaatgaacaggcaacaagaaggtaanggagtgttaagttaatctcanggttaaaccacttttnaacaccnccaaaacagtancangcaggaaaaaaaaaaccgggtnccaaaacttaac

SEQ ID NO: 8591 - DNA, 538 bp, Homo sapiens
  misc_feature (338)..(338): "n" may be a, t, c, g, other or unknown
  misc_feature (374)..(374): "n" may be a, t, c, g, other or unknown
  misc_feature (390)..(390): "n" may be a, t, c, g, other or unknown
  misc_feature (430)..(430): "n" may be a, t, c, g, other or unknown
  misc_feature (483)..(483): "n" may be a, t, c, g, other or unknown
  misc_feature (486)..(486): "n" may be a, t, c, g, other or unknown
  misc_feature (497)..(497): "n" may be a, t, c, g, other or unknown
  misc_feature (501)..(501): "n" may be a, t, c, g, other or unknown
  misc_feature (504)..(504): "n" may be a, t, c, g, other or unknown
  misc_feature (527)..(527): "n" may be a, t, c, g, other or unknown
  misc_feature (533)..(533): "n" may be a, t, c, g, other or unknown
ggtattaaaatgtctgtgattacttatttctcagcattcatctggtaacttaagcagcatgaagcaagagttgcactttaaaaaatgacaagaaaatagctattcatttagtcgacagagtaaggcccatctcatttccaggatcactagtttctgcttatgacggggtgagcatccgccagcgcggtgattgggaggcgcccctgtgtctttaggctgaggcagtgcccatagctgcagtgcctcgagtttccggagcaaccgcggggctctttcttgaggagtcttgggaggggccggtggcctgcctccccatcctagatcagcgaggtcccaanaagtgccgtattgctgcggggtaactgtggagtgtngacacgttccgaggtnggcttgacatcctgaggcttgggtggtgtgaaagggaaangaaagaagggcaggtccccgggcttttgctggctcttgcttttaaggtcaggnccntgggtctgcanagcnatngcaccggggctcttgccaacccngggggnttccc

SEQ ID NO: 8592 - DNA, 549 bp, Homo sapiens
  misc_feature (538)..(538): "n" may be a, t, c, g, other or unknown
ctttttttgagacagggtctccctctgtggcccaggctggcgtccagtggcatgaccatgtcccatcgcagccttgacctgccaggctcaagcaatcctcccatttcagcctcccgagtagctgggactacaggtgtgcaccaccacgcccagctaatttttgtatttttttgtaaagatagggtttcattatgttgcccaggctggtctcaaactcctgggctcaagcgatccacccacctcgatttcccaaagtgctgagattataggcctgagccaccatgcctggctgcagatccttcataggtttcttaatcttaagaacaaaaagctcacctggaaagcaagaacacatcaatttggcagtatctggtcactaaaagaactgtatctctggaggcaaagcatgggctctaataaaccccacaaagtattggccgctaattcccaaatattcctgactggctctttcacaaagcttaaggagggttcaattcaaagaacatttaaagccctttggcttggatagcagacgagnaaccagacttt

SEQ ID NO: 8593 - DNA, 539 bp, Homo sapiens
  misc_feature (346)..(346): "n" may be a, t, c, g, other or unknown
  misc_feature (389)..(389): "n" may be a, t, c, g, other or unknown
  misc_feature (395)..(395): "n" may be a, t, c, g, other or unknown
  misc_feature (485)..(485): "n" may be a, t, c, g, other or unknown
  misc_feature (535)..(535): "n" may be a, t, c, g, other or unknown
ggaattcagattttttatttttggctcttaggaagtagtcagcaaatactgtataatccctagtagggaaccatgtcataaaatatattgacatttctgcaacaaagaatcacactaaaaggaacacatcataattacccatagcttcctatcagtgtaagttcaggtcaggtttggtttcaaatgggttatgaaaatacttttggttttcagagcattgggactttggaaatgaggacctggatcatcctttattagggagaaatagccccaggagccacgtctcagcaattccatggaaacacaggtttctttgccctcaaaattccgttcctaccttctttgncttccttcccccaaagaaactggacaaaaaaggtcagaactgnatttgntattcatacatttgcgttgatttaaatcattacgtacaatttctacattggattagaagaatgacacagggggcagcacacttttgcagnccagcctcattcctgacctggagcagggcctatggtggcaaaggacgggntcct

SEQ ID NO: 8594 - DNA, 553 bp, Homo sapiens
  misc_feature (439)..(439): "n" may be a, t, c, g, other or unknown
  misc_feature (463)..(463): "n" may be a, t, c, g, other or unknown
  misc_feature (470)..(470): "n" may be a, t, c, g, other or unknown
  misc_feature (494)..(494): "n" may be a, t, c, g, other or unknown
  misc_feature (510)..(510): "n" may be a, t, c, g, other or unknown
  misc_feature (518)..(518): "n" may be a, t, c, g, other or unknown
  misc_feature (553)..(553): "n" may be a, t, c, g, other or unknown
gtggttttaatagactttatattttagagcaattttaggtttacagcaaaattgagagggtacagagatttcccatatagttgttgtccccacacatgcatagtctccaccattttcaacatctcccaccaaagaggtacatttgcagtaattgatgaacctacactgacacatcattatcactcaaagtccacagtttacattagggttcactcttggtgttgtacattttagggggttggacatatgtacaatgacaggtatttataattatagtatcatacagagtagtttcgctgccctaaaaatcttctgtgctccaattattcctccctcccctcccccacccactgctttttactgtctccatagttttgccttttccagaatacatcccagtgtcatatagttggcatcatttaatatgaagccttttcanactggtttaattaagaggcttccnttaagtnccctgggaactttttaacctgggnacccaaaatggcatancttgattnagcccctgaataatgactactgcaccacaattttn

SEQ ID NO: 8595 - DNA, 548 bp, Homo sapiens
  misc_feature (122)..(122): "n" may be a, t, c, g, other or unknown
  misc_feature (134)..(134): "n" may be a, t, c, g, other or unknown
  misc_feature (188)..(188): "n" may be a, t, c, g, other or unknown
  misc_feature (399)..(399): "n" may be a, t, c, g, other or unknown
  misc_feature (424)..(424): "n" may be a, t, c, g, other or unknown
  misc_feature (452)..(452): "n" may be a, t, c, g, other or unknown
  misc_feature (454)..(454): "n" may be a, t, c, g, other or unknown
  misc_feature (458)..(459): "n" may be a, t, c, g, other or unknown
  misc_feature (479)..(479): "n" may be a, t, c, g, other or unknown
  misc_feature (518)..(518): "n" may be a, t, c, g, other or unknown
  misc_feature (535)..(535): "n" may be a, t, c, g, other or unknown
gctgcttaaaaaatgcattaatgttactgctttattcacactaattagaatacatacacaaaaaatgtgtatcatatatcactttcaaaaatttccatgttccatgagaactatgtaaacantgcaaaatgttnccactacgtaacaaaagaaaatcagcattcccacatagtattaggaaaatattnggataatctgaatttatagtaaaacaaagtgatctgaatttgtagtaaaacaaagtgaaatattacaaagcagtcttgtcatgaagtagccttatataactcagaagcagcacatttcatactttcaaacactttggtataagtgaaattaatagaaaacaaaaagaagaagaaaaaaacctctactttggttttcacattattggacttnagcaacaaggcaagtgcacaggtanccttggatgaccaaaatggaaaaccttntnatcnngcttggtttctccttctggnaaatgggccgtgcttaggaaaagcggtttcccaaggacnttttggaaaattaaggnggcattttcactt

SEQ ID NO: 8596 - DNA, 519 bp, Homo sapiens
  misc_feature (66)..(66): "n" may be a, t, c, g, other or unknown
  misc_feature (87)..(87): "n" may be a, t, c, g, other or unknown
  misc_feature (175)..(175): "n" may be a, t, c, g, other or unknown
  misc_feature (180)..(180): "n" may be a, t, c, g, other or unknown
  misc_feature (184)..(184): "n" may be a, t, c, g, other or unknown
  misc_feature (187)..(187): "n" may be a, t, c, g, other or unknown
  misc_feature (190)..(190): "n" may be a, t, c, g, other or unknown
  misc_feature (279)..(279): "n" may be a, t, c, g, other or unknown
  misc_feature (298)..(298): "n" may be a, t, c, g, other or unknown
  misc_feature (356)..(356): "n" may be a, t, c, g, other or unknown
  misc_feature (384)..(384): "n" may be a, t, c, g, other or unknown
  misc_feature (396)..(396): "n" may be a, t, c, g, other or unknown
  misc_feature (435)..(435): "n" may be a, t, c, g, other or unknown
  misc_feature (440)..(440): "n" may be a, t, c, g, other or unknown
  misc_feature (470)..(470): "n" may be a, t, c, g, other or unknown
  misc_feature (475)..(475): "n" may be a, t, c, g, other or unknown
  misc_feature (487)..(487): "n" may be a, t, c, g, other or unknown
  misc_feature (494)..(494): "n" may be a, t, c, g, other or unknown
  misc_feature (516)..(516): "n" may be a, t, c, g, other or unknown
aaagttttataaaaaactatttcttgttctttaagtaaagaacactatacaaagaaaatatattgngaaataccccagagacatggnttttttttccccttgaaagatatgtccatcctaggaaatggtggggggtggatgtggggggtgcagagtagggcctagtccctgttgncattnttgnggnggntattgattctggaaggaccctcgggtgccaatgaggctctctaagccataatcttctgaatgcagggcatgcagctccttaaaagacanacagccctgggagaaaganaagggaatatgttctgaattcatttgactcagtttctcgcctgccaagaaatttcttncaagcagtgatggctccttactcattcngagattaagaangatggccaatttttcaaaatcaaatttgttcaaaacttnccatngtcccccagggatcaaggtcaccctccttnattcngcattaaaagtntttcatncttcccgttcttctccctcctntta

SEQ ID NO: 8597 - DNA, 450 bp, Homo sapiens
  misc_feature (387)..(387): "n" may be a, t, c, g, other or unknown
  misc_feature (417)..(417): "n" may be a, t, c, g, other or unknown
  misc_feature (421)..(421): "n" may be a, t, c, g, other or unknown
  misc_feature (427)..(427): "n" may be a, t, c, g, other or unknown
  misc_feature (435)..(435): "n" may be a, t, c, g, other or unknown
  misc_feature (448)..(448): "n" may be a, t, c, g, other or unknown
  misc_feature (450)..(450): "n" may be a, t, c, g, other or unknown
ggatttgtttctctttttatttaggtactttctccaaaagtgattttagtttgtatggaaaatcttctgatgctttgatggtacatattcttattaatgccctcacattagaataactattttcagaacataaaattgtaggttcaaagtttttttcaggttcaatttcacattcttgagctaggcatggtactgatggttttcaccataacatacaccaatgtccttttgtctgtgggctcccatccagcctggtggctgaagtcatctacaggtaagattgaccaaacctctgaacaggactgaaaaaaatgttatcttcagaaaaccagccctcttgtacactgctgctgtgaatacaaattgattaacttttctggatggcantctaccaatgcagatcaaacattttaaaantccntttttntttgaacnaattttttttccngn

SEQ ID NO: 8598 - DNA, 558 bp, Homo sapiens
  misc_feature (395)..(395): "n" may be a, t, c, g, other or unknown
  misc_feature (432)..(432): "n" may be a, t, c, g, other or unknown
  misc_feature (459)..(459): "n" may be a, t, c, g, other or unknown
  misc_feature (465)..(465): "n" may be a, t, c, g, other or unknown
  misc_feature (475)..(475): "n" may be a, t, c, g, other or unknown
  misc_feature (496)..(496): "n" may be a, t, c, g, other or unknown
  misc_feature (506)..(506): "n" may be a, t, c, g, other or unknown
gagagagaaaataattcactttatataaataacagctaagaacaacatactgtgaacagtttccagagtttgaacattcagcacaatcaattcttacttcttgggaaaaaaatatcttacctatcttttctgttacagtatgccttcttggagaaaatattttagtggtaacatcattttctggggcatttggttaattttgaaagatgattatgccacatgaaccaaaaaaaaaaaaaaaaactggcaggaggaggagggtcctaggccattctggaagcaagctgggttttgcattattcagagtcaactattaagctgacttatattagaatggcgacagataagaggcaatgagtgacaccaggacatgcacagcacacagagaatatggnctactcttggcttccctgcacagattaaacataagangcttggtagaaagacatggggaaaggngctatnggggccaccntttggaagcatatttcccagngacttgggtnttgctatgcaacctctggaccaaaaactgggaaaggcccctttcccccacag

SEQ ID NO: 8599 - DNA, 558 bp, Homo sapiens
  misc_feature (390)..(390): "n" may be a, t, c, g, other or unknown
  misc_feature (469)..(469): "n" may be a, t, c, g, other or unknown
  misc_feature (506)..(506): "n" may be a, t, c, g, other or unknown
  misc_feature (547)..(547): "n" may be a, t, c, g, other or unknown
aattttggggctttattataatttttctttccaagatgctacatagtcaaacagaactgggttggtcttttatggcataaaattaattcacagtcaaactctcaactagtactagaaggattcgctgaagagtttctctcttcccttgctccccacccacaactgctggtgccctcgcttctaaccctctgcagcccgatccatttgtcctgactccaggctaggtccccaaggggaggtcaggctcagacttggacctgggcgctggaagtgtgagtaatggttgagaggtggtataagaacaatctagaagactgactactcttcattaaaaaaggtaacctagagttgactgtcactactgagaatttccctccctatgacagttgntatttactgacccagaaaaaacacttctggcagctcttcttcagcatcccaataaaccccaccttcacatgacagactnttcagaaacagaggacccacagccttcagcagcaatnccagttaaccaacagagttaacaacacgcaacattaactgncttttgggaaa

SEQ ID NO: 8600 - DNA, 425 bp, Homo sapiens
  misc_feature (378)..(378): "n" may be a, t, c, g, other or unknown
  misc_feature (381)..(381): "n" may be a, t, c, g, other or unknown
  misc_feature (390)..(390): "n" may be a, t, c, g, other or unknown
  misc_feature (393)..(393): "n" may be a, t, c, g, other or unknown
  misc_feature (397)..(397): "n" may be a, t, c, g, other or unknown
  misc_feature (400)..(400): "n" may be a, t, c, g, other or unknown
  misc_feature (416)..(416): "n" may be a, t, c, g, other or unknown
caaactgagaaaaagcagttttaatagcacacacacacacacattcataggactttaacaagatgtagtataaaatctttaaaaaaaaaaaaaaggaaagaaaaaaatctgtatttacttcctaagagctggtggattaactggctgacaggactgcccaggaaaaacaaatgcacagataatgaggtgcgccgacactgttcatgagtaaggaataaccatggatcatgctaactgctctacgtgccccgccgcctggaccctactgttgcctccttagcgacaaaccaccacagtcatcccctaattctccaactcagtagcttgtttaatgggctacctcttaaaattttcatttttaatttaaaaattactctnggnttaaagacnccncacnttnttactggccagtcccnaccaattat

SEQ ID NO: 8601 - DNA, 458 bp, Homo sapiens
  misc_feature (438)..(438): "n" may be a, t, c, g, other or unknown
  misc_feature (444)..(444): "n" may be a, t, c, g, other or unknown
  misc_feature (446)..(446): "n" may be a, t, c, g, other or unknown
  misc_feature (448)..(448): "n" may be a, t, c, g, other or unknown
  misc_feature (451)..(451): "n" may be a, t, c, g, other or unknown
  misc_feature (453)..(453): "n" may be a, t, c, g, other or unknown
  misc_feature (457)..(457): "n" may be a, t, c, g, other or unknown
caatgtcaaaatgtgtactgcactttataaaagcatggataatattaaaggatcacaaaaggcagcattagcattctctatccaggtattattaaatctttttatcccatgcccccctcaaatataggagaattattatctgataagcctgaaacgacttttttaataccataacctaaaaagacacttcttacaggtgtatgcaactttggtcagcagaaacacaatacgagcctctggcctagctaaggcactctattctgaaagtacggaaaacatgcacgtatgctccttatcatggcattgctccccaaaaggcagctcactgtatgctggggagaaaggctggggcatgaagtcacccacaatatcatgcataagcctgaaagacctttcatactttggaaatgttatagtaattggcatgacataaatgcncacagntntntgnantgang

SEQ ID NO: 8602 - DNA, 544 bp, Homo sapiens
  misc_feature (27)..(27): "n" may be a, t, c, g, other or unknown
  misc_feature (141)..(141): "n" may be a, t, c, g, other or unknown
  misc_feature (430)..(430): "n" may be a, t, c, g, other or unknown
  misc_feature (470)..(470): "n" may be a, t, c, g, other or unknown
  misc_feature (479)..(479): "n" may be a, t, c, g, other or unknown
  misc_feature (509)..(509): "n" may be a, t, c, g, other or unknown
  misc_feature (512)..(512): "n" may be a, t, c, g, other or unknown
  misc_feature (539)..(539): "n" may be a, t, c, g, other or unknown
  misc_feature (542)..(543): "n" may be a, t, c, g, other or unknown
caacacaatggccctgcctcccaccgntttatttctttcggtttcggatgcaaaacaaaaaattttaaaagaaaatgtgacttcaaaggaaaagaacaaatttccaaagacttgggggagtgaaggcagagcctggtgcanatggacgaggtctgcagacggagggcagaggtggtggaaggggccaggggcctgcaggcctccccctggaactgggactggtctcggtctgctgacgtcagggtcagctcccccgcggagctgacttcagcagcccacagctgtggggcttcagcagccacaccagcccagcccagcccagctctcgatacgtttggtctttcatgctgaaaaataaataataaagcctgtcccgtgtctactgcctcccccaactgcacagacgccagcctctaggcctgactgccanggaggtggaaacactggcaccagcccggcagcccctacangccccccanatggctgcctaatcgcctctgaaactgcanatncttcaacttggccttccggccttgggncannt

SEQ ID NO: 8603 - DNA, 564 bp, Homo sapiens
  misc_feature (508)..(508): "n" may be a, t, c, g, other or unknown
  misc_feature (538)..(538): "n" may be a, t, c, g, other or unknown
  misc_feature (542)..(542): "n" may be a, t, c, g, other or unknown
gattgattgattaatttattatttttaaaaacttggaaattcataaactaggataatcacattctccttccccatctctgggtagtgccatcattttaataagcaatgctcaaataacagaatggaacctttatcatggggatggcccttgtacaacaggagtacaaagggcttacaaagtgagtagactggctcaaactaacaatcacctttgctttgttttagcactttgcttacaagtgaatgggcttctagggctaagttattagttttcaattccttgtaatttgataccaaaacatatcaaaaataataagctaaaacaatattcaaacccatattttattggctttattacacacttcaatatttacaaagttaaagttaaatgaaaagtctctattgtattaaaaaaaataactacagcccaaattaaagtgccctggggcaaatcatatcaatcaactaagaatcagtgactggatcaaggacccaggccagtctctgnggtacaaccaaagccggtttattttgggancaanggttgggactctatacaatccc

SEQ ID NO: 8604 - DNA, 561 bp, Homo sapiens
  misc_feature (408)..(408): "n" may be a, t, c, g, other or unknown
  misc_feature (528)..(528): "n" may be a, t, c, g, other or unknown
  misc_feature (554)..(554): "n" may be a, t, c, g, other or unknown
gcaagataaggcactttgtttttaattctatcagtctctttagaatgaacaaaggtctgggtcctctggaaatctcaagtggtgctgcctgcagctttaaaaggctgagcacaaacccatcagagagccacagtcctaagtagactcctcggtgcgctctgcccacctgtccatgtgcattcagatttctcattaaattttccacagcatgaccagtggggatgacctgggtggcctttgtgtccatggccacagcctaggtacccacctggcatggtgcctccacaggcgcagcgagcggttttctggcccccgctggagcagaaggtgcagcagtgaaacacgcctgagtgtgggcggtgctttctcctcaccgtcacagtgaatggcgagccctgcacatgctgntctttgatgcagacccacacagtatagacgccaggttccttgggggttgtaggaaatgtagtatgtccatccttggtatcctggaccattggtctgactgggctgctttcttaactttangggcaacgggaactttgaacgttgtntcctcct

SEQ ID NO: 8605 - DNA, 560 bp, Homo sapiens
  misc_feature (26)..(26): "n" may be a, t, c, g, other or unknown
  misc_feature (89)..(89): "n" may be a, t, c, g, other or unknown
  misc_feature (116)..(116): "n" may be a, t, c, g, other or unknown
  misc_feature (129)..(129): "n" may be a, t, c, g, other or unknown
  misc_feature (132)..(132): "n" may be a, t, c, g, other or unknown
  misc_feature (143)..(143): "n" may be a, t, c, g, other or unknown
  misc_feature (160)..(160): "n" may be a, t, c, g, other or unknown
  misc_feature (207)..(207): "n" may be a, t, c, g, other or unknown
  misc_feature (294)..(294): "n" may be a, t, c, g, other or unknown
  misc_feature (302)..(302): "n" may be a, t, c, g, other or unknown
  misc_feature (347)..(347): "n" may be a, t, c, g, other or unknown
  misc_feature (364)..(364): "n" may be a, t, c, g, other or unknown
  misc_feature (366)..(366): "n" may be a, t, c, g, other or unknown
  misc_feature (372)..(372): "n" may be a, t, c, g, other or unknown
  misc_feature (391)..(391): "n" may be a, t, c, g, other or unknown
  misc_feature (420)..(420): "n" may be a, t, c, g, other or unknown
  misc_feature (471)..(471): "n" may be a, t, c, g, other or unknown
  misc_feature (495)..(495): "n" may be a, t, c, g, other or unknown
  misc_feature (506)..(506): "n" may be a, t, c, g, other or unknown
  misc_feature (521)..(521): "n" may be a, t, c, g, other or unknown
  misc_feature (527)..(527): "n" may be a, t, c, g, other or unknown
  misc_feature (529)..(529): "n" may be a, t, c, g, other or unknown
  misc_feature (539)..(539): "n" may be a, t, c, g, other or unknown
catgtgaaacctgtaacattttattngttaaaaatgaacagcttcagaatagatctaaatgtaacttttccaaaaaacaccaaaaagtncagggtaaagcacctcctcgttaaatncaaactttcattnggngatgcacggcnccaatgttttgcatatnccttgatgcaaagaaaagtttaagttgcatcctgtttttaaaaaaanccgaaacttaagaactgaacaaggattacaaccacattccaataaagaaaattttccttcaacaaagcatattgttttgtttatatncaatatgngaccaccaagagttttaatttagttgtaccaaaggcaaaacattntacttaaaattaaattncngatgcntgaagaataaaggtttaangttcaaagaataattgggtatttaatgcnctcaatgtcagtattttggggcaatttttaaaggttttcccaaaaaatggnctggataggctttatccaataatngggtaagaacngggaaaatggaaacncctttntnccattttttnccaaaccctttttaaagacgg

SEQ ID NO: 8606 - DNA, 447 bp, Homo sapiens
  misc_feature (372)..(372): "n" may be a, t, c, g, other or unknown
  misc_feature (400)..(400): "n" may be a, t, c, g, other or unknown
  misc_feature (414)..(415): "n" may be a, t, c, g, other or unknown
  misc_feature (443)..(444): "n" may be a, t, c, g, other or unknown
  misc_feature (447)..(447): "n" may be a, t, c, g, other or unknown
agtagagatggggtttcaccgtgttagccagggtggtcttgatctcctgacctcatgatccgcccgcctcggcctcccaaagtgctgggattacaggcgtgagccaccgcgcccggccatcatttctatgctaccatctcagcatctgtggtgaggggaggggtgccacttcctctttgcccagcgagagggcgtactctaccccagagagggaaacaccatgcccacagtgcttggttttgcactcaggtgtgcgggcagcacagcaggcctcaccttgcagcactctgggcacaatgacactgtccactggggagctgcagagcttaacagctggctgggtctgccctcgggggaagggaagagtttgcnaaaaaaggaggccctaaggtgagggaantttggggcccaccnnccaggtttaaagaggaaaccttttattnncan

SEQ ID NO: 8607 - DNA, 550 bp, Homo sapiens
  misc_feature (386)..(386): "n" may be a, t, c, g, other or unknown
  misc_feature (399)..(399): "n" may be a, t, c, g, other or unknown
  misc_feature (440)..(440): "n" may be a, t, c, g, other or unknown
  misc_feature (471)..(471): "n" may be a, t, c, g, other or unknown
  misc_feature (528)..(528): "n" may be a, t, c, g, other or unknown
  misc_feature (540)..(540): "n" may be a, t, c, g, other or unknown
  misc_feature (550)..(550): "n" may be a, t, c, g, other or unknown
attttttcccttgacagtactttattaattttcatccatattttacttgactaaaaatacaatgtatgaaaatttatctttaatagcattttccataagctactataacaatttattgatacatctgggattcagccaggtcttatagtatttaaatttataacccctgccatgcttagcattaagtaaatcagtatgcaagcagtatttaaggcaaagctttaagaatactttaaatttcatttgtaaatacatagatgcaagactgtttccataggaagtcacaaatcctcaaacagaaatatgtgtgttctcgatgttaccctgatcagaaatcaaacttggaagaaatatttttacattagaaaaaggactcagtataaggngaaaacaaaattnccagtgggctagacatgaacaaaagtattcattccccaaangcacattctttatacaggtttttcaaattanctcctattaatggaaggcttattcattaaatatgaaactatgcctacattaaaaccnggatttggtttnaagggcttan

SEQ ID NO: 8608 - DNA, 537 bp, Homo sapiens
  misc_feature (341)..(341): "n" may be a, t, c, g, other or unknown
  misc_feature (364)..(364): "n" may be a, t, c, g, other or unknown
  misc_feature (384)..(384): "n" may be a, t, c, g, other or unknown
  misc_feature (394)..(394): "n" may be a, t, c, g, other or unknown
  misc_feature (408)..(408): "n" may be a, t, c, g, other or unknown
  misc_feature (461)..(461): "n" may be a, t, c, g, other or unknown
  misc_feature (478)..(478): "n" may be a, t, c, g, other or unknown
  misc_feature (526)..(526): "n" may be a, t, c, g, other or unknown
atactgcaatgtacacattcataagaaacgttctaataacaattagcgcacaaaactattggtataaacatttttccaaaaagagaaaactattgcatttcgttagaaatcgcgtcctgggccgaggctcgtctttcttctctgcagttggtttggggacagaactccagcacgcagctgtccaactgcagcggctacgtgtttccatggagacaaacttggtgtctcaagttcagggcttcgaaagtcccgaatatttgtttgtcccgagagaagagttttgactttgaagaggtccaggtgggactcgctgggggtggggtgctccgggattagttcanagggaggtgtctggaagactccnggaacgggacgcagcactgntggttggacncacccggatgctgntttcttgaagtgtgcttgtgacactgacctgttgacaaactcttcacagccgnggcttgatgtgacgggnacttggcagaagtcccacatccttctggtgtggtaaacttctgggttngatttttgaaa

SEQ ID NO: 8609 - DNA, 426 bp, Homo sapiens
  misc_feature (329)..(329): "n" may be a, t, c, g, other or unknown
  misc_feature (364)..(364): "n" may be a, t, c, g, other or unknown
  misc_feature (366)..(366): "n" may be a, t, c, g, other or unknown
  misc_feature (376)..(376): "n" may be a, t, c, g, other or unknown
  misc_feature (398)..(398): "n" may be a, t, c, g, other or unknown
  misc_feature (400)..(400): "n" may be a, t, c, g, other or unknown
  misc_feature (405)..(405): "n" may be a, t, c, g, other or unknown
aatagagacaagttctcgctgtgttgcccaggctggtctcgaactcctaggttcaagtgatcctcctgccttgtcctgccgaagtgctgggattacaggcatgagccgccacgcccagctgagattacattactttgagtgtttaattccactatgacaggaagtagcctaatacatacttttttgtgttaattttctggattcatcctgatttttagtcttcctacctgagtacaacaataaaggaaatcacttcttagatacattaaaattacttctaaacttgccccccacacatgaactgttttcagtttgctatttttaatggnccatgcttatttatatagacatagcataacactgntnacactttatnggccactggcctctttcttaanantatantataaaaaaattttctatatt

SEQ ID NO: 8610 - DNA, 550 bp, Homo sapiens
  misc_feature (304)..(304): "n" may be a, t, c, g, other or unknown
  misc_feature (359)..(359): "n" may be a, t, c, g, other or unknown
  misc_feature (366)..(366): "n" may be a, t, c, g, other or unknown
  misc_feature (418)..(418): "n" may be a, t, c, g, other or unknown
  misc_feature (436)..(436): "n" may be a, t, c, g, other or unknown
  misc_feature (460)..(460): "n" may be a, t, c, g, other or unknown
  misc_feature (468)..(468): "n" may be a, t, c, g, other or unknown
  misc_feature (491)..(491): "n" may be a, t, c, g, other or unknown
  misc_feature (509)..(509): "n" may be a, t, c, g, other or unknown
  misc_feature (547)..(547): "n" may be a, t, c, g, other or unknown
  misc_feature (549)..(549): "n" may be a, t, c, g, other or unknown
aaagtccatagattttaatgaaatttctattcctgtctctgagcggctgctgtgctttgtctgggtcccccaggggacaagagtcaggctggaatgagacctctgtctgccaggcctttgtggaggcctgggaggagaaaggccaaaggctttgatgcttgggaccgatgcccggccactcagctccagacaccagggatctggcaagggggtggggcaagggccagacagaccaacagccttggggtcctggcgagagctcgccaagaccagatctgaagctggctgggccaaagcagctgangcggcagcggcagacaggtgccctgtgggcagaagccagagcctacttcggtgancaagccnttaagcttgggcttggggtgcttgacttggacaatggtgttggaactggccnttccttgggcttgactgnaactgccgtcccaacggtgggtanccactggnctcaagtcaaagtaggcttccanaagaggtgcaagcagcancactggaaaaggtgcaacccccaaagggaaccggggtntna

SEQ ID NO: 8611 - DNA, 564 bp, Homo sapiens
  misc_feature (454)..(454): "n" may be a, t, c, g, other or unknown
  misc_feature (464)..(464): "n" may be a, t, c, g, other or unknown
  misc_feature (496)..(496): "n" may be a, t, c, g, other or unknown
  misc_feature (532)..(532): "n" may be a, t, c, g, other or unknown
  misc_feature (535)..(535): "n" may be a, t, c, g, other or unknown
  misc_feature (557)..(557): "n" may be a, t, c, g, other or unknown
  misc_feature (563)..(563): "n" may be a, t, c, g, other or unknown
ccaaagaagccccattttattacagagaaaatacaaagccgtttcctcacagggaaaagtacagtttcccttctccagggtgacagatgagccttttccgaagttctcagctttctcttctatcgaaacttcccatgtcggttaaagtgtttgtagagatagcggatgcgtttattaaggttgtgcaggtcatcagcgaacattctacttccaaccattttcctctttcggatacaacgttgcaattcattccctttccaacctcgaagccatatgggccccctgatcagttctttggggtgcttttcaaagtttcccaggatcccgatgttgtcatacactccgaacatggcccttttctcgttccaacgatcaaccactttggggggcgggagagtgagccttataccgatcaatctaggcacaccaagagagaagcttctgcacgccagangcacccagtnccaaggcgcctacctgccccggataagaggtncctggcatttctctaagtctccccctttaaacaggncancaaataaccccagaagatgccnggaccng

SEQ ID NO: 8612 - DNA, 503 bp, Homo sapiens
  misc_feature (49)..(49): "n" may be a, t, c, g, other or unknown
  misc_feature (69)..(69): "n" may be a, t, c, g, other or unknown
  misc_feature (208)..(208): "n" may be a, t, c, g, other or unknown
  misc_feature (261)..(261): "n" may be a, t, c, g, other or unknown
  misc_feature (351)..(351): "n" may be a, t, c, g, other or unknown
  misc_feature (409)..(409): "n" may be a, t, c, g, other or unknown
  misc_feature (453)..(453): "n" may be a, t, c, g, other or unknown
  misc_feature (470)..(471): "n" may be a, t, c, g, other or unknown
  misc_feature (473)..(473): "n" may be a, t, c, g, other or unknown
  misc_feature (478)..(478): "n" may be a, t, c, g, other or unknown
  misc_feature (495)..(495): "n" may be a, t, c, g, other or unknown
gacaggacaaggtttattgggggtcctggaaacactggggagagggacnagggggcaaggtcgaggctnacaggggcaccccctagccaaatgcccccttcccctagggattgggaggaagacagagacagacaaaccaacagagatggagagaaagaccaacggatgctacggagagagggaaggaaaccccagtgtccaccacctnccactcagatgagttcacaggataaagaattgcgtggaccggtccacacgctncaggaaaagagaggagtgtccgccctattcactctaaggaaggtggcaggccacagcctaaaccagcccattccatgtgatgggggtgtntgcacatagatcaagtccattctactgggcaaggggatttcaggccagtctattctantgtttgggggccggggaaaatcgttaggggcgatccattcccantcggggaggggggattnnanggcanggggcattttccttggncctttttt

SEQ ID NO: 8613 - DNA, 550 bp, Homo sapiens
  misc_feature (505)..(505): "n" may be a, t, c, g, other or unknown
  misc_feature (519)..(519): "n" may be a, t, c, g, other or unknown
  misc_feature (528)..(528): "n" may be a, t, c, g, other or unknown
  misc_feature (531)..(531): "n" may be a, t, c, g, other or unknown
  misc_feature (549)..(549): "n" may be a, t, c, g, other or unknown
ggacagcatttcattttattatgtaactgtagaaagccttgatcaagataaaaatagggatgacttatcagaaactgaagaattttcttaggaaagcaaagtttactgaaggataccttcattccagccatgatgagcatctgtcttctcaggcaatcatgatgaagctccagggacagtataacccatctctcccactcatccctgagccttggtcctggactgaatgtggttagaggttgtggaaataaaaaaaagaaccaaaataagaacactctccataaaagccaagctcagagactggtcctcttttgcttaggtacaacaggagcaggaaggatcaacattcttgaaagcataccttctattcatttggctttttttgacttggggcgccagtgtagagctgagcactccactgccctttctccactcacaaatgtctgcataggtcacgtccggcactttcaagcctccttcacgtcaactcctggggcttttcggnggccatcagtaggncatataagntgnaccttgggtttactcctnt

SEQ ID NO: 8614 - DNA, 251 bp, Homo sapiens
  misc_feature (168)..(168): "n" may be a, t, c, g, other or unknown
  misc_feature (176)..(176): "n" may be a, t, c, g, other or unknown
  misc_feature (193)..(194): "n" may be a, t, c, g, other or unknown
  misc_feature (200)..(200): "n" may be a, t, c, g, other or unknown
  misc_feature (214)..(214): "n" may be a, t, c, g, other or unknown
  misc_feature (248)..(248): "n" may be a, t, c, g, other or unknown
gaagtatttttgtttttttatatacagaatacaggaaagtttctgtaaagtctaaaacattacaattactatgtacattggtactggttgggggggtgggaggagaggagggaaccaggggcaggaggaagaggagagaactggcaagagaacaaaataaggagacanaacaggtntacgacaaaaacatttnngctacnatagacaatttganaaaacgctctaccacatgtagtactgtacacggnttt

SEQ ID NO: 8615 - DNA, 560 bp, Homo sapiens
  misc_feature (77)..(77): "n" may be a, t, c, g, other or unknown
  misc_feature (221)..(221): "n" may be a, t, c, g, other or unknown
  misc_feature (466)..(466): "n" may be a, t, c, g, other or unknown
  misc_feature (469)..(469): "n" may be a, t, c, g, other or unknown
  misc_feature (512)..(512): "n" may be a, t, c, g, other or unknown
  misc_feature (518)..(518): "n" may be a, t, c, g, other or unknown
  misc_feature (533)..(533): "n" may be a, t, c, g, other or unknown
  misc_feature (543)..(543): "n" may be a, t, c, g, other or unknown
  misc_feature (554)..(554): "n" may be a, t, c, g, other or unknown
caatcaacgtgttcacacacagcatttattttgtaagattaatttttacaaaccatccacaacttgttcaaaccttnggctttatcctatctaatttcaaacaaatgcccagccttaatttattacaattatgattcgtagactttcactcaattacataaattcactctcggttgaggaaaagagagaggtggcagaggattaatccaaaggatcctggngtccactacccttcaaagccagaccctggtggggcaagtcctgccaagtcatcaggtgctgattaaatgcagggcactgggtgggaagcaaattcctaaaatgtggttctttccagaagcatcttataatctagctcaggggcttgcaggctccaactcactccggaatcacctggggagcttctgaaaccattctgatcctgaactccccctaaataaatcaaactctttgggccataaactgnaanaaaaaagtttaatcttcacaggacattctaatggggcagcccnagaggngatcccctggtctanggttttcatnaaataccttanaaattg

SEQ ID NO: 8616 - DNA, 561 bp, Homo sapiens
  misc_feature (491)..(491): "n" may be a, t, c, g, other or unknown
  misc_feature (496)..(496): "n" may be a, t, c, g, other or unknown
  misc_feature (515)..(515): "n" may be a, t, c, g, other or unknown
  misc_feature (517)..(517): "n" may be a, t, c, g, other or unknown
  misc_feature (525)..(525): "n" may be a, t, c, g, other or unknown
agtccagaatttcccaaatttatgtgaacatgggacatcatttttcatagcacacacgtgaacaagccattattctttaaacaaggtattacaaactcaaccactctggagaactgatgagcgcctaactgaaattattagactaaattcttagtaaacaatgttttctgaaccttgttcagaaatataatcactgcaaattattttccaagtgttgttctaaaaaacaatataactggacactagtaagaaagtaaggtaaattattaatccactcgcattcaattctacaaggaatgaaaccatttttaaaagtggcttagaacaaacaatttactgagcacttactatgcacccaccaggtatattccttttataatgtaatcttcaaaatgagctgtcaaactattggcccattttgtgaatgaggaaaatgaaaattaagttatataatcatgagtggcagagctgggaaatgaactcaagtctgngactntgaagacctgaaaaaggtncncctttcanatgaatggcttaactatcttatgggattacctggaa

SEQ ID NO: 8617 - DNA, 562 bp, Homo sapiens
  misc_feature (448)..(448): "n" may be a, t, c, g, other or unknown
  misc_feature (468)..(468): "n" may be a, t, c, g, other or unknown
  misc_feature (482)..(482): "n" may be a, t, c, g, other or unknown
  misc_feature (498)..(498): "n" may be a, t, c, g, other or unknown
  misc_feature (515)..(515): "n" may be a, t, c, g, other or unknown
  misc_feature (541)..(541): "n" may be a, t, c, g, other or unknown
  misc_feature (551)..(551): "n" may be a, t, c, g, other or unknown
  misc_feature (562)..(562): "n" may be a, t, c, g, other or unknown
aggcggcaggatgctggtttatttactgtaggatctccagggccatcaaagccccctcgtgggatagggagactatttacacagccagggaggagggcagccaggaggcagagaccgggtcccgtatttccctctgcccgaatgaggaggggaggggcgtcctgggtcctgcagctgtagtcttggggttcagatggaaacttcatactcccgcgtatccccagcttcatacagcgggttgctgaagtccgactccacggtgatggggctgtaggagtgggagcccgagaagccgaaaagggactttccctgaagcttggtgtagtagatgtaaacgccactgccgaggacaatgaccaagcctagaggcagcaggatggccagggccaggttccccccttccagctgccgtgatggatctgtggtctgggtcacttcagttttcggntgtccaggagctcctcatangcaactttgcagantgggggctggcttggnccactgggaagggtggnccggcacacaggtgatggtgaacttncccataactnaaagccctatn

SEQ ID NO: 8618 - DNA, 550 bp, Homo sapiens
  misc_feature (446)..(446): "n" may be a, t, c, g, other or unknown
  misc_feature (515)..(515): "n" may be a, t, c, g, other or unknown
  misc_feature (519)..(519): "n" may be a, t, c, g, other or unknown
  misc_feature (534)..(534): "n" may be a, t, c, g, other or unknown
  misc_feature (544)..(544): "n" may be a, t, c, g, other or unknown
agggtaagtcagtttattgatgtgttgtgatccatcacccagatatattaaacacaaagtacttaagtaattcaggatttcctttccagaaacaaagcaggaataaaaaccactatgacaatataaaacctttgtacatttttaggtatttttcccttcaatatttaaataaacatgatttcttctggcatgtatttaatgttaagtgaacatgattttaattagtctttttttatcgttatttcagccattataaaagccataaatgtgtttccagaaaaagtgcttttgatattattacagtattctctcataaaataggaggtacgcttgtgagtttagtactttagttgtaggcacagcttgcacatgtgtgtcgctgatgtgaaaccactgcccttttgattccatttcaaaatcttgtggaatatcaccgtgaagaacangattagagagatgactatttgcgggtcttgccttggcataagcagtgtaatgccccgacctatagtccnctgnggtcaacaacctccntttagggatnagtccc

SEQ ID NO: 8619 - DNA, 560 bp, Homo sapiens
  misc_feature (489)..(489): "n" may be a, t, c, g, other or unknown
  misc_feature (503)..(503): "n" may be a, t, c, g, other or unknown
  misc_feature (507)..(507): "n" may be a, t, c, g, other or unknown
  misc_feature (537)..(537): "n" may be a, t, c, g, other or unknown
  misc_feature (545)..(545): "n" may be a, t, c, g, other or unknown
  misc_feature (554)..(554): "n" may be a, t, c, g, other or unknown
aagtttttcttttttgagaggctcatgaaattcaaaagggaccactagctaatttcaaccatgcttcacaaaacaataatggctattttatattgcagttaccaatgtaatgcaattagtgctttaaaataatctacactcaaaaaaagagagagaaagagagagacctttggaggaaatatgcttattcaaaagcttcttggaaaagaaaatttacctgaatatcaagtcatgactgatctcaagtgtaatgtttaaaagcttcacagacatgaatattacaatcttcaggtctcaggacttttaatctgagaaagtttagagtttggtttgttttttaaattcactttctaaccaaaacaaataatagaagtactcaaattttcactatttacaactctcagcctacaatctgaaatgacacaatacaagttctcttaaactgcagcattaaagggtaggcacaccattcttctgctgctcgattgncatccactggaacncacnttgaaaatatttatggtagtaaaatgatcnctcctgtnccctcaatngccaaa

SEQ ID NO: 8620 - DNA, 528 bp, Homo sapiens
  misc_feature (428)..(428): "n" may be a, t, c, g, other or unknown
  misc_feature (430)..(430): "n" may be a, t, c, g, other or unknown
  misc_feature (490)..(490): "n" may be a, t, c, g, other or unknown
  misc_feature (512)..(512): "n" may be a, t, c, g, other or unknown
  misc_feature (526)..(526): "n" may be a, t, c, g, other or unknown
aagttgtaaaatattttttattgtaaaaacaaagtcaataaaggttgacaatgtaaatgttatctcacaacatttccccttggttcctgaatttgctagattcctatgtaccagcaaatctccattagcatttctcaggtttcatgatccttttcagatatgttggttgattttatgtatatattgcttagaaacaaaaatccacctgatattaaaacaaaccaaaaaaaatcataaaagcaagcaaatgaacaaaaaaccctagttttgttgtgcttttctttcacatttcctacagggagatttgtatatctcagatactttcaaaatctaataggtaagtaaaattagtgccttaaccaaacagtaaggataccaaagaatcctccatcacaagttactgaatcaaacttctcatgacatttgcngnatattcagatttgaagatttttaaatttagaatttaaaccaactttagactgctgatttncatattcaagactggaagttgntgcagcatataaangg

SEQ ID NO: 8621 - DNA, 534 bp, Homo sapiens
  misc_feature (466)..(466): "n" may be a, t, c, g, other or unknown
  misc_feature (494)..(494): "n" may be a, t, c, g, other or unknown
  misc_feature (497)..(497): "n" may be a, t, c, g, other or unknown
  misc_feature (501)..(501): "n" may be a, t, c, g, other or unknown
  misc_feature (529)..(529): "n" may be a, t, c, g, other or unknown
atactaaaagtctgtatttacctaatttagcagtttgaaatgaatattgtaggtaagttttacatgatcatatctgtaaaatggaacaagggatattaaatcataaaataagactttccaacatttggtctggatactgaattagtatgacacataatattctaaaactttgctttctctatgctggcttttctcaactaaatgaaagcaagatatgatttttggatgcttaaatagtagctaggtattctcttattccagaacacagaaaaaaaaagccattaaatgtgccaccataaataaaattttgttactattttaagtctaaaaataacagtaatataatcatgattcattttacatgtttctgaatttatattatcaacccagagaaaggtttatatcagacaggtaggaaacctctgacaacgacagaagaagtgaactgccaaaaccatgctgaagnggtctttaccctccgcttggcactggancanggangtgccgcacacctggcttggtcacctgnttggt

SEQ ID NO: 8622 - DNA, 520 bp, Homo sapiens
  misc_feature (31)..(31): "n" may be a, t, c, g, other or unknown
  misc_feature (86)..(86): "n" may be a, t, c, g, other or unknown
  misc_feature (100)..(100): "n" may be a, t, c, g, other or unknown
  misc_feature (129)..(129): "n" may be a, t, c, g, other or unknown
  misc_feature (158)..(158): "n" may be a, t, c, g, other or unknown
  misc_feature (186)..(186): "n" may be a, t, c, g, other or unknown
  misc_feature (257)..(257): "n" may be a, t, c, g, other or unknown
  misc_feature (269)..(269): "n" may be a, t, c, g, other or unknown
  misc_feature (291)..(291): "n" may be a, t, c, g, other or unknown
  misc_feature (321)..(321): "n" may be a, t, c, g, other or unknown
  misc_feature (337)..(337): "n" may be a, t, c, g, other or unknown
  misc_feature (341)..(341): "n" may be a, t, c, g, other or unknown
  misc_feature (383)..(383): "n" may be a, t, c, g, other or unknown
  misc_feature (385)..(385): "n" may be a, t, c, g, other or unknown
  misc_feature (387)..(387): "n" may be a, t, c, g, other or unknown
  misc_feature (406)..(406): "n" may be a, t, c, g, other or unknown
  misc_feature (467)..(467): "n" may be a, t, c, g, other or unknown
  misc_feature (477)..(477): "n" may be a, t, c, g, other or unknown
  misc_feature (510)..(510): "n" may be a, t, c, g, other or unknown
  misc_feature (517)..(517): "n" may be a, t, c, g, other or unknown
  misc_feature (520)..(520): "n" may be a, t, c, g, other or unknown
actgacaggaaaacattttaattcaaacctntaccactacccagcctgaagcaaagtttaaaaaaagaaagaaagaaagaaagacncaaaaatacaagcncaactcacattttcaaataaaggaaactnttgctaaataagtagcaattatgctgaanaatttatatgctaaagcacgaatgaatntaaaaacaccagagcagtcaaccatagctttagcactttgagtatgattaacagaatgaacttccaaaggncaattaaatgtngacacactttaaagagatattnttaagcctggtcaatgtataacagcacctnttaattcaggggtatncggnttaatttaggcataacatgcatgggataaatgtacatatatntncngaattaccacatgtcttcnaccagattactacagaaacttcatgtatcacctacccctaagaggttttggctatgtagtnttccaggttntgaaatggattaaaggaaaccttaatttttttnctttggnacn

SEQ ID NO: 8623 - DNA, 541 bp, Homo sapiens
  misc_feature (346)..(346): "n" may be a, t, c, g, other or unknown
  misc_feature (398)..(398): "n" may be a, t, c, g, other or unknown
  misc_feature (424)..(424): "n" may be a, t, c, g, other or unknown
  misc_feature (448)..(448): "n" may be a, t, c, g, other or unknown
  misc_feature (451)..(451): "n" may be a, t, c, g, other or unknown
  misc_feature (476)..(476): "n" may be a, t, c, g, other or unknown
  misc_feature (526)..(527): "n" may be a, t, c, g, other or unknown
  misc_feature (530)..(530): "n" may be a, t, c, g, other or unknown
aaaaatctctagtttatttctaacaaacaccacttgatgcttgactcacaggctttatttacatttgtctacagtatcatttccttatgaaatgaactagtacagcttagttaaaccaaatgaaatcataatcatcagaattgtctgtaaactactattagctaaattataaccttgcatttgcttagtacagccaaagttttaaatacagaaagcacaagaataaaccaatggtaacatgtagaatctagatcgtcggggcaatttagaaggtagactttcaaaaagtctgaggcacaattacaagtgagtaaaagttcttgtgcaacctacataaacgcagcanagaaacttatgacataaaacatgggaaagctcctgtaaaaaatatttatcanaatattttctacataaggatattttngctttcatttttagaatcagcctngangagaaaaaacattccttttaaagtnaaaacatatatttttggtttgggtttgcctatgaaatatcttaaaaatgnnggnaatttttattt

SEQ ID NO: 8624 - DNA, 526 bp, Homo sapiens
  misc_feature (441)..(441): "n" may be a, t, c, g, other or unknown
  misc_feature (503)..(503): "n" may be a, t, c, g, other or unknown
  misc_feature (510)..(510): "n" may be a, t, c, g, other or unknown
  misc_feature (517)..(517): "n" may be a, t, c, g, other or unknown
  misc_feature (520)..(520): "n" may be a, t, c, g, other or unknown
ccatatttttaaaatactttattttttacataatactgtcattacaaaaaaatacaaaaaaactactataaaaacattcgggggttgtcaaagtgagaaaacctaaagaccccaccccaggatctggctgaagcagtcttcccccagcttcttcactatgacctttatacaactatgggggtggggtgggatcacacaggcataaaagggctggaaattccccacacagcctccaagggtaagaaatgagtagcttcacatatcacaaaagtgggatttggaagtttgggggtggctaggccctgagttcagaggtgtggggaaaaacctgtgaccctgaatctcttggtggggaatagctgccacctgaccccaaagccctttcccttcctgatgaagctggtagatgggccctgtccccaccttttagccttaatcctnaggcccatttcctggccttcacccttggaacacttctggaaaaccagcagggaggacagaancttcagnttttganggnggaggg

SEQ ID NO: 8625 - DNA, 511 bp, Homo sapiens
  misc_feature (322)..(322): "n" may be a, t, c, g, other or unknown
  misc_feature (386)..(386): "n" may be a, t, c, g, other or unknown
  misc_feature (473)..(473): "n" may be a, t, c, g, other or unknown
  misc_feature (478)..(478): "n" may be a, t, c, g, other or unknown
  misc_feature (490)..(490): "n" may be a, t, c, g, other or unknown
  misc_feature (496)..(496): "n" may be a, t, c, g, other or unknown
  misc_feature (498)..(498): "n" may be a, t, c, g, other or unknown
  misc_feature (508)..(508): "n" may be a, t, c, g, other or unknown
  misc_feature (510)..(510): "n" may be a, t, c, g, other or unknown
cttaacactgcttttattaacaagtcagcttcatatatgaaaggctcatgcttctaagttgcaaattgtactgctactaagagtcatcgtgaatgaaaacacagcaatatttcaatataccagaatttcccaaagggtgttctttagaacacaagttccttgcagtgttactaggtgccactcaaaaaagtttctgtggtcaaattaatctggaaaacactgggctaactgacagtagatatttgttgtgtttttctctcctcacaggacatttaaattagagcctttgatgtgctcatgttcactaactttctaagatggnatgtgttttccaaacttatttcatcctagaatcctatatttagaagagcatctttggaacttgngttctttggaacacactttgggaaacactggattctattatttctacagctaactagcccaaaaggctagctatcaatggcttaatncaganggcatttaaccnggcttngntctaccagcntng

SEQ ID NO: 8626 - DNA, 530 bp, Homo sapiens
  misc_feature (226)..(226): "n" may be a, t, c, g, other or unknown
  misc_feature (318)..(318): "n" may be a, t, c, g, other or unknown
  misc_feature (464)..(464): "n" may be a, t, c, g, other or unknown
  misc_feature (475)..(475): "n" may be a, t, c, g, other or unknown
  misc_feature (477)..(477): "n" may be a, t, c, g, other or unknown
  misc_feature (489)..(489): "n" may be a, t, c, g, other or unknown
  misc_feature (505)..(505): "n" may be a, t, c, g, other or unknown
  misc_feature (517)..(517): "n" may be a, t, c, g, other or unknown
aatttcttcaaagcaacttgaacttttaataaataatcataataagttacagcaaccatttattctctgctatatgctagatattttacttgacttatttttaatctttactgtaacacatctaggcaaaatattaatatacctattttacaaaaaaggaaacacactcagcaatttttagggacccaggagccagaattccatttcttccaatttccttcaatgngttcacgatgtatcaagtaactcgttcatttagtcaagcaaccattttagctgatttagtcactgattcaactaataacatttactcattgncttagatttgggaggcatagcttgatagctgcaaggattatgttaaatgtcagtgaaataatggaatgtggattggctcatttcatcttaaagatcctgctcacagggcaccaaacattaaactaggtttaaaaattaaaatggtngacattttctngngccagaaacttngggtcaatttgggaangtttggtggggnaatccaaaacatg

SEQ ID NO: 8627 - DNA, 515 bp, Homo sapiens
  misc_feature (271)..(271): "n" may be a, t, c, g, other or unknown
  misc_feature (383)..(383): "n" may be a, t, c, g, other or unknown
  misc_feature (389)..(389): "n" may be a, t, c, g, other or unknown
  misc_feature (451)..(451): "n" may be a, t, c, g, other or unknown
  misc_feature (465)..(465): "n" may be a, t, c, g, other or unknown
  misc_feature (473)..(473): "n" may be a, t, c, g, other or unknown
  misc_feature (479)..(480): "n" may be a, t, c, g, other or unknown
  misc_feature (487)..(487): "n" may be a, t, c, g, other or unknown
  misc_feature (500)..(500): "n" may be a, t, c, g, other or unknown
gagagggagtctcgctctgtcgccaggctggagtgcagtggcgtgatctcggctcactgcaacctccacctcctgggttcaagtgattctcctgcctcagcctccctagtagttgggactacaggcatgcgccaccacgcccagctaatttttgtatttttaatagagacagggtttcaccatgttggccaggatggtctcgatctcttgaccttgtgatccacccgcctccacctcccaaagtgctgggattacaggtgtgagccaccgngcccggctaattttttgtattttttgtatttttaagttgagatggggtttcaccatgtagaccaggttggttttgaactcctgacctcaaatgatctacctgtctcagcctnccagantgctgggattacacacatgagccactgcgccggcatatgtaacattttaaatacctgacttncttaacataaaggnagacagcntaaggnngctggcncttgggaaagggntttccttttcttttt

SEQ ID NO: 8628 - DNA, 470 bp, Homo sapiens
  misc_feature (239)..(239): "n" may be a, t, c, g, other or unknown
  misc_feature (257)..(257): "n" may be a, t, c, g, other or unknown
  misc_feature (261)..(261): "n" may be a, t, c, g, other or unknown
  misc_feature (395)..(395): "n" may be a, t, c, g, other or unknown
  misc_feature (407)..(407): "n" may be a, t, c, g, other or unknown
  misc_feature (425)..(425): "n" may be a, t, c, g, other or unknown
  misc_feature (435)..(435): "n" may be a, t, c, g, other or unknown
  misc_feature (451)..(451): "n" may be a, t, c, g, other or unknown
  misc_feature (459)..(459): "n" may be a, t, c, g, other or unknown
  misc_feature (468)..(468): "n" may be a, t, c, g, other or unknown
caactatttaaaaacgtaaaaactattcttaggttgaagaccacccagaagcaggtggtgtgctagatttggcccatagtccaaccgtactttctgtgatgatggaaatgttcaatatttcctcaattgtctaatatggtaaccactagccacatgtggctactgatcatttgaaaggtggttacatggactgagaaactgttttttttttttttttgagatggagtctcgctctgtcnccccagctggagtgcagnggcnccatctcggctcactgcaagctccgcctcccgggttcacgccgttctcctgcctcagcctcccaagtagctgggactacaggcgcctggctaattttttctatttttagtggagacggggcctcaccgtattanccaggatggctngatctccttgaccttcgngatctgcccncttggccttccaaagngctgggantcccggggnta

SEQ ID NO: 8629 - DNA, 554 bp, Homo sapiens
  misc_feature (394)..(394): "n" may be a, t, c, g, other or unknown
  misc_feature (468)..(468): "n" may be a, t, c, g, other or unknown
  misc_feature (484)..(484): "n" may be a, t, c, g, other or unknown
  misc_feature (514)..(514): "n" may be a, t, c, g, other or unknown
  misc_feature (532)..(532): "n" may be a, t, c, g, other or unknown
accagaacatcacataagtttatttcagatgtaacagcaatgttaaaattgacaagtttaattcttaactgcaccaagtaaacttagccatttaagtatttttttaagttattccctccaaaaaactgagggagcttttcttttccaccaccacaccatggtttcccaatagttctctttttggaggacttttcaattgatgagtaaactgctttagatatttcagaacttcattccccaaatgaaagctaatctggacaaactatatattgcatagatttctctacagattctttgctttaaaacctaaatgcaactaacatagtgtaattttaacctatttgccccacagtaaaaactatctgtcctgaaaaatatgatggatatatcctgngattttccagttaacagaattggtctacttcaaagataattattatcatatatcaaaataccagcttaacatanggacattcttcagtcnttactgactcataggcatatgaaccttggngcccagctttttaacctnttccacaatcttcctcctcctc

SEQ ID NO: 8630 - DNA, 547 bp, Homo sapiens
  misc_feature (444)..(444): "n" may be a, t, c, g, other or unknown
  misc_feature (446)..(446): "n" may be a, t, c, g, other or unknown
  misc_feature (476)..(476): "n" may be a, t, c, g, other or unknown
  misc_feature (509)..(509): "n" may be a, t, c, g, other or unknown
  misc_feature (513)..(513): "n" may be a, t, c, g, other or unknown
  misc_feature (544)..(544): "n" may be a, t, c, g, other or unknown
  misc_feature (547)..(547): "n" may be a, t, c, g, other or unknown
gaaagtaaaatttcagttagtttatttagtccttacacttaaaaactgaagctacagacacacacatacacgcacacatacacatatacatatacgatacacacaaacaaaatagagcagttccatgaaatcagacatatacgggaatgtcttgattacccaacaaatcctctccccttccttccctcatcaaattgctatgattgaaggcccaggaagctaccaactacttagggcttttagagtcatacacatgttgcatcctgttaacttggtgttggtgctgttgctcacagtaagaaaaatggcaatatccccagagacagcaaagtattttgcatgtttatgtctgtgagttaactgtcaccacatattgcctgctgtcttcatcaatgcagctcatagtacccaaaaatgtgaaaaaatcctatccaaaacagatgngnctttttacatacaaattgggtagaacgcanagcctgatgatgaaagggtcattttttactggnaggnttaaaaaatttaaattttgaaaatcaggttnggn

SEQ ID NO: 8631 - DNA, 415 bp, Homo sapiens
  misc_feature (322)..(322): "n" may be a, t, c, g, other or unknown
  misc_feature (352)..(352): "n" may be a, t, c, g, other or unknown
  misc_feature (403)..(404): "n" may be a, t, c, g, other or unknown
  misc_feature (407)..(407): "n" may be a, t, c, g, other or unknown
  misc_feature (412)..(413): "n" may be a, t, c, g, other or unknown
caagttgctcacattttagttggaaagtcagatcatgccaaagaattctctaaaacatttgtaagtttagagcaagctaccaatgggagaaaggctcagtgaagtctactttttattatgttttccttatatggtgtcagctaataagtatttggggaataaatgtgtagatagtggtctgtttaaaagaagttacattatttggcatttattacattttatttttcttaattgattaattgcagttaaattaccttagcatgcaagagcagattttacagattttgacgtatgattaagcagcataaagcataactaatgnggttttagtggcatgctatgtattaaggcntgaaatttaaatccccccttcatcaagattttttgcagttccggggaattnnaangatcnnat

SEQ ID NO: 8632 - DNA, 514 bp, Homo sapiens
  misc_feature (107)..(107): "n" may be a, t, c, g, other or unknown
  misc_feature (173)..(173): "n" may be a, t, c, g, other or unknown
  misc_feature (220)..(220): "n" may be a, t, c, g, other or unknown
  misc_feature (256)..(256): "n" may be a, t, c, g, other or unknown
  misc_feature (403)..(403): "n" may be a, t, c, g, other or unknown
  misc_feature (411)..(411): "n" may be a, t, c, g, other or unknown
  misc_feature (414)..(414): "n" may be a, t, c, g, other or unknown
  misc_feature (423)..(423): "n" may be a, t, c, g, other or unknown
  misc_feature (444)..(444): "n" may be a, t, c, g, other or unknown
  misc_feature (464)..(464): "n" may be a, t, c, g, other or unknown
  misc_feature (509)..(509): "n" may be a, t, c, g, other or unknown
ccagttctgacacctttttaatagaaatcactgtttttaggaaacaaatagcacttttgtaatttttttttacaatgtttcttaccttgatcttaatttaagtaacnctaggaagacctcaatatcttttattttcctttttaatttaaaaaaaagttttttttccccagatncaaagatttttgcccttgcataaaaaaacagtgcccgaacgatgacncaaggactcacaaagactcacgggacctcactgacnctatgattcctactctaccatgcaaggtcttggctacccttaattggactgtcagcctgaaaaacagcttttctattccttattttagtttttgttaccaagaaagtaaaatgaacagtaaaataaaactttccttaaagaaaaaangaacaaanccnaaaattaangaaagagaaaagaaacgtctncattcaattcacacaccctngggcccggtgctggtttactcaaaaacttcccttcttataaattnagaaa

SEQ ID NO: 8633 - DNA, 527 bp, Homo sapiens
  misc_feature (361)..(361): "n" may be a, t, c, g, other or unknown
  misc_feature (426)..(426): "n" may be a, t, c, g, other or unknown
  misc_feature (447)..(447): "n" may be a, t, c, g, other or unknown
  misc_feature (450)..(450): "n" may be a, t, c, g, other or unknown
  misc_feature (480)..(480): "n" may be a, t, c, g, other or unknown
acattttcctttttttttatggcatagttctagaattgaaagtgaaaaattctgtttcagcatgttctctgcacctccaaattttcttggctattaccagtagttccttatacgcaaacatatgagaaatctctgaagagcaaattcagtttcgaaaaacagctaatgatatcgaagaaaagtaggcactggtggatactttctagaagacagtattaatacagcaatactttaggaataatgatgaatctgtttaaaggcaaaacatcactaacctaatcagatcacttagagaaataagtgattttctctgtcttatcctgagatcatatagccatttaacctatcttcaaacagacanaaatttttaaacactttctatcctttaagaaaatcttctttgcttggctaaatgacaatgttcangaaatgcctgccacagaagcntanaaaatccttggcaaccatttcagaagaaanttacccctgcataaatgggtttccagcaaccgcttcaataagctttt

SEQ ID NO: 8634 - DNA, 519 bp, Homo sapiens
  misc_feature (456)..(456): "n" may be a, t, c, g, other or unknown
  misc_feature (501)..(501): "n" may be a, t, c, g, other or unknown
atcaaacacaaatttatatcaagattaactttttcaaccagcttacaagcagacttttccctttctttgttaaaaaatgaatggtatgaaactatatgttaaagatgtttctataataccttacatttacatagcgctttacaattttcaaagtgctttcacatgccatctcatttaatcctcacaacagccctgtgaggtaggtacagcaggtattattatcctcatttcaagatgaggaaattgaggcaaagagaggttaagtgacttgcccaagatcacacagctgtaagtgctagagctaggacctgaaatcaagttttttgactccttgtccagtactcattccactgtaattactgcctcaagttatgaataatgaactgtgtatcaaaattgaaagcttactgaagttcatttcagtgatgtcttaacagtaaagttaaatgagaaatncagaacagtaggctgatggtttacttgacataaaatggtgcaaancactttggctaatacttg

SEQ ID NO: 8635 - DNA, 510 bp, Homo sapiens
  misc_feature (358)..(358): "n" may be a, t, c, g, other or unknown
gaaaccaatgcattctttattgcagactgaagcttaggggctcacccactgtgagctctgatttgggggcatctgtggctgcccacactttccaagacagacaagggcaaactctccaagcagaggagaaaacaacttccagaagctgccccttcaaaggcctgaggtgaggacctggggcagcaggcagcttggcatgcaggggttaaccagaaaggccgggtctggagggctgggcacacctaaccctcatctcctggtgactgcaggtcccactcccttcttcaggagtgccatgcagactctggaacaatctaacaggccaagtgtctcccagggtgggttagggaggaggctnaacacaggctcagatccctggaagtggcagggagagaactgagagaaacttcaccctctgctcggaggacattcccaagcctaggtccttgcttcttaaactctaaagtgcttataggaatcaacttgggggtctttgctaaaatgcagggt

SEQ ID NO: 8636 - DNA, 424 bp, Homo sapiens
  misc_feature (377)..(377): "n" may be a, t, c, g, other or unknown
  misc_feature (386)..(386): "n" may be a, t, c, g, other or unknown
  misc_feature (393)..(393): "n" may be a, t, c, g, other or unknown
  misc_feature (404)..(404): "n" may be a, t, c, g, other or unknown
  misc_feature (413)..(413): "n" may be a, t, c, g, other or unknown
  misc_feature (415)..(415): "n" may be a, t, c, g, other or unknown
  misc_feature (421)..(421): "n" may be a, t, c, g, other or unknown
gaagttagagatgacaattttgagatttattctttatcaggagatgcaaactcaaatacctccagaatgaaggcaggtaatgcaaatgaggattaagtataattaaaaaaaacagcattcatccttaataaatggcatgtaccactttgtctcagcagggatgcagtaggtaaaggtggagactgtggtgagctagaggacgtaccccctgtcttaggggccagtcattgccaaatagaagtgtgggatcagtgttaacagatcttctggtttttagagagaaactatagatattttcattttgacactttctaattattaaatgttcacaatgaattttttaagtgcttaaacactatacagacaaaaccatttgnatctatggncaacttngccttgggggnttctaattngngacttntaa

SEQ ID NO: 8637 - DNA, 518 bp, Homo sapiens
  misc_feature (30)..(30): "n" may be a, t, c, g, other or unknown
  misc_feature (466)..(466): "n" may be a, t, c, g, other or unknown
  misc_feature (485)..(485): "n" may be a, t, c, g, other or unknown
  misc_feature (508)..(508): "n" may be a, t, c, g, other or unknown
  misc_feature (514)..(514): "n" may be a, t, c, g, other or unknown
ccaaatgggcatttattatttgcacagatncataaaaatgattcccattttaaaaaccataataaaaatatacattaaccacagaagtacttactctaactggaaagaaaatgaacatggctattttcaaaacagtaataaacacaaaaggtcaacatacataaatcatgacaagtgtacatctcatttttgacaaaaataagttccatttttacattaatgcttcatcatcaggctccatattacatcctctgaccttatttacatttactatcaaatttctattagcatgtgtcactcaaaggcactcaattcagagggtaaaaagtcctgagcttaagtaggaaacaaagttcccaactaaaatttgaacataaataattctaaagatcagagaatattaaaatgtttaaaactataatatctggtccataaataattcaaaacctaataataaaggtgtcangactggtcaaagaaaagancctgttaggcagaaaaattcctnggaatnaacc

SEQ ID NO: 8638 - DNA, 524 bp, Homo sapiens
  misc_feature (427)..(427): "n" may be a, t, c, g, other or unknown
  misc_feature (442)..(442): "n" may be a, t, c, g, other or unknown
  misc_feature (471)..(471): "n" may be a, t, c, g, other or unknown
  misc_feature (482)..(482): "n" may be a, t, c, g, other or unknown
  misc_feature (492)..(492): "n" may be a, t, c, g, other or unknown
  misc_feature (510)..(510): "n" may be a, t, c, g, other or unknown
  misc_feature (522)..(522): "n" may be a, t, c, g, other or unknown
aaataggaagattttaataacagtcagtccctatagtccccttgtctagaacaattaaattattatccctcagacagtacaagacttgtcagtagactgtggggaagttgatgagttgacaccagggctagtggcatttgttttggggaagacagtgggcttgggccgtgtggctggtggtttgaccggggcagccatcttgacagacttgacaggccggaaggcgcaggcgatgtccccagcagtactggcgctgcgctggaaggcgggctcggggtccttgaggagctgggtgtgcagagggctggagggctctgacgtgggggccaccactggggaggttttgaggggctccaaggtgtccagaaccacgtcaggggtgtgtttgacactgctctgccgttctaagttcccgtagctcattcanggccgagttcattgntgcctcaatatcctgagcaatgacctcanggtccatgggnccatgggtantggaactttttgaccttnccgttggggaanct

SEQ ID NO: 8639 - DNA, 524 bp, Homo sapiens
  misc_feature (390)..(390): "n" may be a, t, c, g, other or unknown
  misc_feature (517)..(517): "n" may be a, t, c, g, other or unknown
acagatcacaggaattttaaattgcagatcagtcatgctacttggggtgatcagaaagacttgaacacttaccaagtgaataattttattaaggtcctgaaggtgagtgtccggaggtgctgggtaaaacacatcacaggtaagaaatgggaaacctacctcagcatttctgaaaggcacaatctatggaagggaaacctagcgtaataaaaccctcactggatgtacatggaaaggagtatggtgagctatttcctttttaaaggatgagaccttcataaattggcccctcggattctggtgattcccgccgcaagcgcaaatgctccagtgtgttatgaaaatggtttggtaatctgctctggttcttcactgggattcaaagattcnggaggtcttctcgaatcttttggataagctggtttaaaaacctgaattggtacccgcatcattttcctttcataaaaatagatatatctggtcagaatttctataaaaagctgcacttgtagaaganggggtcc

SEQ ID NO: 8640 - DNA, 525 bp, Homo sapiens
  misc_feature (221)..(221): "n" may be a, t, c, g, other or unknown
  misc_feature (282)..(282): "n" may be a, t, c, g, other or unknown
  misc_feature (356)..(356): "n" may be a, t, c, g, other or unknown
  misc_feature (361)..(361): "n" may be a, t, c, g, other or unknown
  misc_feature (395)..(395): "n" may be a, t, c, g, other or unknown
  misc_feature (429)..(429): "n" may be a, t, c, g, other or unknown
  misc_feature (433)..(433): "n" may be a, t, c, g, other or unknown
  misc_feature (456)..(456): "n" may be a, t, c, g, other or unknown
  misc_feature (472)..(472): "n" may be a, t, c, g, other or unknown
  misc_feature (491)..(491): "n" may be a, t, c, g, other or unknown
  misc_feature (518)..(518): "n" may be a, t, c, g, other or unknown
aacgttttcaaataatttattaggaatttaaaactgaaaataaaacctggaaaaagaagttacagatgtggagagaagagacaccggaggatggtaacttgctggcttcgaaacaccatgtaacatcttaaaaaaaaaaaaaatcccaaagcaaatcagaaaacggaattccagggtcctgagcccatggttgggcccagtggggtggaagggtccgggtntgagggagagggaagctaagtgtctcaggactcagctcaaacgtgtagaaaattaaaaatnaaaaccaataaaatgcagcttctcttttattaggaaacatttaaaaaaaaaaaacccaaaacacgaacagccgngcatntcagtaaccaagattattgcttttgggttctcanggctgatagggtaaacaccttacacaggccattnactnttcaagggtggggttttccggtnggggccatgcttgggnaaaaagctcaggcctgggncctaaaactgggggaaagggccccccnaaggggg

SEQ ID NO: 8641 - DNA, 524 bp, Homo sapiens
  misc_feature (476)..(476): "n" may be a, t, c, g, other or unknown
  misc_feature (497)..(497): "n" may be a, t, c, g, other or unknown
  misc_feature (499)..(499): "n" may be a, t, c, g, other or unknown
  misc_feature (508)..(508): "n" may be a, t, c, g, other or unknown
ggttttgaaaacacacaccttagtgtactgaaagaaaaacaatttcttttaatttggtttgttggtcccacaccccatctatcaatgtatgtgctatttacaaataagttctatacagtatttttgcagtacctttgataattcctagacctctattttcattctgtgtattaatgtgaataacagatggatattttaatatttaggcagatggtaaactttcctataggtcttgtgagacttcgtcttataggctgaacaccattcacaaaatgtaataatgcttcattccttcaggttgaggtaaagaacttgagcaactggattagcaaagctgcaaagaatgaaatgtggcctaagatgtaattatgttctctgcccttcctttgggccagggtagttttgcacttgacacaatggaaaataggccattaagcctggaaattaaatggtcttaaccccaatcttacaggacnttaataggctttcacttggcntntttaagggntttcaacaaaacctaa

SEQ ID NO: 8642 - DNA, 478 bp, Homo sapiens
  misc_feature (356)..(356): "n" may be a, t, c, g, other or unknown
  misc_feature (361)..(361): "n" may be a, t, c, g, other or unknown
  misc_feature (393)..(393): "n" may be a, t, c, g, other or unknown
  misc_feature (413)..(413): "n" may be a, t, c, g, other or unknown
  misc_feature (423)..(423): "n" may be a, t, c, g, other or unknown
  misc_feature (434)..(434): "n" may be a, t, c, g, other or unknown
  misc_feature (443)..(443): "n" may be a, t, c, g, other or unknown
  misc_feature (456)..(456): "n" may be a, t, c, g, other or unknown
  misc_feature (465)..(465): "n" may be a, t, c, g, other or unknown
ggaaacatcctagtaaaaatttattcagacaagaatcgtcaaaggatgctaaacctaggaggggtagatttgatgaggaacagaattgtcaacaaggtctcaaagtttctcctcacaaattacccactaattgcaaaaggaaaaacaataacgatacactggagaaactggacatcttacccaagtgatcaaaattagcatcaccaataagggacaaatggacattctgtgcatctggatgtatacctgcaatacatatcacttacagcatttcaaccctcactgcactaccccaatctaaccatgaggaaacatcagaaaaacccaaatagaaggatactctatcctttagctgncctgnatttttcaaatatattactattataaaaaacnaagaaaagctgaggaactgnttcagaatanaagggtattgncattccacntttggaccctagnttggaccgnggacttgaaaaaa

SEQ ID NO: 8643 - DNA, 459 bp, Homo sapiens
  misc_feature (6)..(6): "n" may be a, t, c, g, other or unknown
  misc_feature (72)..(72): "n" may be a, t, c, g, other or unknown
  misc_feature (127)..(127): "n" may be a, t, c, g, other or unknown
  misc_feature (139)..(139): "n" may be a, t, c, g, other or unknown
  misc_feature (143)..(143): "n" may be a, t, c, g, other or unknown
  misc_feature (166)..(166): "n" may be a, t, c, g, other or unknown
  misc_feature (174)..(174): "n" may be a, t, c, g, other or unknown
  misc_feature (260)..(260): "n" may be a, t, c, g, other or unknown
  misc_feature (293)..(293): "n" may be a, t, c, g, other or unknown
  misc_feature (298)..(298): "n" may be a, t, c, g, other or unknown
  misc_feature (397)..(397): "n" may be a, t, c, g, other or unknown
  misc_feature (418)..(418): "n" may be a, t, c, g, other or unknown
  misc_feature (426)..(426): "n" may be a, t, c, g, other or unknown
  misc_feature (434)..(434): "n" may be a, t, c, g, other or unknown
  misc_feature (442)..(442): "n" may be a, t, c, g, other or unknown
  misc_feature (449)..(450): "n" may be a, t, c, g, other or unknown
ccccgnttttcatctgcaaaatgaggaactaaaatctgggaaaactacagagtcgcttggagggtaagccanagggtccttgcccttggtacaccccctgaaaacaaaacctgacaaaactcaatgngcattaattagngcanaaacaaagacagattcagcaagngcaaaggngactacaattttcccttgtccttgggaagccagctccctggtcgccagtggcagggtggtgcaggctgcttgcctgacctgccagntttgggcgccacaggccactgggcaaggccagntcctntagctggaatctcggttcttctggttccgcatcagggggctgtggtggcgcaggccctccatgctgtgccgccagtgccagcagcttcggcaaaaagtntttgaaagcaaacctgatctngacagaanaaaggccnggcttganaactggnnatttgaccc

SEQ ID NO: 8644 - DNA, 534 bp, Homo sapiens
  misc_feature (432)..(432): "n" may be a, t, c, g, other or unknown
  misc_feature (471)..(471): "n" may be a, t, c, g, other or unknown
  misc_feature (482)..(482): "n" may be a, t, c, g, other or unknown
  misc_feature (490)..(490): "n" may be a, t, c, g, other or unknown
  misc_feature (517)..(518): "n" may be a, t, c, g, other or unknown
  misc_feature (533)..(534): "n" may be a, t, c, g, other or unknown
gtcatttagttattctttaatcattattactttaaaatacactaatacattcttatctacttccctccaccgacaaatattttgctaaattaaaaggatcactggaagtattatgacccccctcgtcacaggtggtcagaaccaccacagttttgtgaatgaatcagagaaggcaacatttcatcaacgaaaactcatttaggtttcaaaaggcaggatgtagtacagaatgcattattctgactgtcttctggaatagaaaaattggaaaggatgaaagaaggaagttagctccagctccactgttaccttggcaaccgtggcccaatcacaggggcagaaattaattttgtgcccgtaacataacgtggcagaggagtggggagccgtggagtggggagagaatgacggctgggtttaaatgctcagaangctagtggggaagggtccaggtcaacccgctgggtggtnaatctaccgtnccaattanccactgggcctttttcactggaaggtnngattatggagagacnn

SEQ ID NO: 8645 - DNA, 531 bp, Homo sapiens
  misc_feature (451)..(451): "n" may be a, t, c, g, other or unknown
  misc_feature (515)..(515): "n" may be a, t, c, g, other or unknown
aaatacattcaagtcagtgttaattttattactgaaaactgagtaaattataaagtgctttttctcaagaaaactacaaacagttttagaaatatatataggatatttcagggttagaagtcaaatttgtgtgttagggtacaagcttaagaactctggatgttgctgctctaacaatgcatttgtgatggtgccatgtgatactaagaagtcagtagaatcccaccagtcctactgcctcagatgagtcttgtttcagtcatgggtttacaaagtcattgagtgcttgaggacttgttttcctggaagtgattccctacttgggtatggcaagaacacatcagtagtgtaaaactgtcatctgtagtagcactccatgatcatttcctggatgaccactttaaattataactcacagatatgtggggattctaagaatggtatatgtggngaatagaacctggatccaaacataccagttctgactcaacacaatctctagttctccattttanggattaatcatatcta

SEQ ID NO: 8646 - DNA, 524 bp, Homo sapiens
  misc_feature (1)..(524): "n" may be a, t, c, g, other or unknown
nnnnnnnnnnnnnnnnnnnnnnnnnnnnnnnnnnnnnnnnnnnnnnnnnnnnnnnnnnnnnnnnnnnnnnnnnnnnnnnnnnnnnnnnnnnnnnnnnnnnnnnnnnnnnnnnnnnnnnnnnnnnnnnnnnnnnnnnnnnnnnnnnnnnnnnnnnnnnnnnnnnnnnnnnnnnnnnnnnnnnnnnnnnnnnnnnnnnnnnnnnnnnnnnnnnnnnnnnnnnnnnnnnnnnnnnnnnnnnnnnnnnnnnnnnnnnnnnnnnnnnnnnnnnnnnnnnnnnnnnnnnnnnnnnnnnnnnnnnnnnnnnnnnnnnnnnnnnnnnnnnnnnnnnnnnnnnnnnnnnnnnnnnnnnnnnnnnnnnnnnnnnnnnnnnnnnnnnnnnnnnnnnnnnnnnnnnnnnnnnnnnnnnnnnnnnnnnnnnnnnnnnnnnnnnnnnnnnnnnnnnnnnnnnnnnnnnnnnnnnnnnnnnnnnnnnnnnnnnnnnnnnnnnnnnnnnnnnnnnnnnnnnnnnnnnnnnnnnnnnnnnn

SEQ ID NO: 8647 - DNA, 532 bp, Homo sapiens
  misc_feature (409)..(409): "n" may be a, t, c, g, other or unknown
  misc_feature (421)..(421): "n" may be a, t, c, g, other or unknown
  misc_feature (480)..(480): "n" may be a, t, c, g, other or unknown
  misc_feature (506)..(506): "n" may be a, t, c, g, other or unknown
  misc_feature (524)..(524): "n" may be a, t, c, g, other or unknown
  misc_feature (532)..(532): "n" may be a, t, c, g, other or unknown
gccaatataagaatcttatttactgctttagtcaagaaggagatgttatttcacttgtgacttcctcccaagtgaatgagtatacaatttaacaaactaacacagttcagtttattaagttacaatctgtaaccacctaatgtagctcagtgtatggtggatactagatataaacaagagtagggaagtctttggcacctgcatgatgcgtgccggcttttaaattcagaaagatgagaagctacaatgcaactttttttttaatctacagataccgccaaaagaagaaatgtttatcagattttgaatgcatactggaaagttggccggtggcagcttttcacattaaatttcatcacaagtgaaacttgattacagcccaaactagacaaggcaattcaagtgcccngaccctgaagtncacgtgagactacaggagaacctgcattatggtgcttggccagccagtctctttgaggnactgcctgtaacagtcaccggttgtnggggagaaacaacttccntttttttn

SEQ ID NO: 8648 - DNA, 547 bp, Homo sapiens
  misc_feature (378)..(378): "n" may be a, t, c, g, other or unknown
  misc_feature (463)..(463): "n" may be a, t, c, g, other or unknown
  misc_feature (466)..(466): "n" may be a, t, c, g, other or unknown
  misc_feature (481)..(481): "n" may be a, t, c, g, other or unknown
  misc_feature (486)..(486): "n" may be a, t, c, g, other or unknown
  misc_feature (508)..(508): "n" may be a, t, c, g, other or unknown
gataaaggcggcacttggcatctagtactcaaacaactttatttcactagccatgagcaaaaagttgaccggctccaggggattttccatcctgccctctccctgctggtggctcccatgatttggaaataacctcatgttccacttggcagtgcctggctttgtgcacccacatggttttggcctgggtcccagtgaaaatggtcctcacctggctggggaacatggttctgagaggccccttgatctgccctggggacatgtgtggccatgctaagggccctgcccaccttcacgtgactggccacctctgccagggtgcaggcagctcctagcatggagacatccttcatggaagtgagctttcccacccacctncatacccacatttctcagaaacagagttaacagggaaccaagagtcaagaagccacagggctggtaacgtgcctacaggccaaantgngacccttacctgaanagccnggccaccaaaggtatcaggaanggaaaaaatttggcctggaatgagataggacaagaaaaa

SEQ ID NO: 8649 - DNA, 520 bp, Homo sapiens
  misc_feature (2)..(2): "n" may be a, t, c, g, other or unknown
  misc_feature (43)..(43): "n" may be a, t, c, g, other or unknown
  misc_feature (88)..(88): "n" may be a, t, c, g, other or unknown
  misc_feature (306)..(306): "n" may be a, t, c, g, other or unknown
  misc_feature (398)..(398): "n" may be a, t, c, g, other or unknown
  misc_feature (452)..(452): "n" may be a, t, c, g, other or unknown
  misc_feature (457)..(457): "n" may be a, t, c, g, other or unknown
  misc_feature (474)..(474): "n" may be a, t, c, g, other or unknown
  misc_feature (481)..(482): "n" may be a, t, c, g, other or unknown
  misc_feature (500)..(500): "n" may be a, t, c, g, other or unknown
  misc_feature (504)..(504): "n" may be a, t, c, g, other or unknown
anaaagtaggtgccccaagcttataggtggctgttaacattgntttatttcctttatacaaaaagtagaaatgacagaaaaaacactnttgacagaaacaataccactgacctgatctcatgaaggagctgagccaaatctgcccacattatggggaaagggaggttcaatcaacattagcaaatactcatgcaattgatgaaatataaaatggtatcagtggcttggtgaatgtcctgtgggtagggtgaatcaatctactcttaaaaaacatacattttcccaatcatgcttttaaacggcatnttttaaaaaaacaagttatatatacagatatcaccccaaaatgaatcttttacagtctactactataaatttaaggcatcctgatattctgntcttctgctggtgaggcattggtttcatgggtctcttttccaaaaggattgccnaaaanttccataattttccaanggcttcnngggaagaaaatttaaaangggncttccaagaaaaagtt

SEQ ID NO: 8650 - DNA, 547 bp, Homo sapiens
  misc_feature (38)..(38): "n" may be a, t, c, g, other or unknown
  misc_feature (496)..(496): "n" may be a, t, c, g, other or unknown
  misc_feature (498)..(498): "n" may be a, t, c, g, other or unknown
  misc_feature (500)..(500): "n" may be a, t, c, g, other or unknown
  misc_feature (512)..(512): "n" may be a, t, c, g, other or unknown
  misc_feature (546)..(546): "n" may be a, t, c, g, other or unknown
caacttaaaaagttatttattaaacaagttaaacacanctaaaagtatatttagaggtccaagattcaagtatttttgtcaaactttctaatggtaaggggaatgataaaaattgaacagatataaaaaatattcttaaacaaatattaaagcacatggaaaattcagaaataaaaacacaccaccatataaagaaatcaaaatatttcatatgtttttaaatgcttatggtatgagagccaaattgtctatttccaggttaataaacaatatataagctcacctttttaaaggtatcatactttgtgtcatatagaaataattttggaaacagtatgtgttgggtgtgtaaattgtccacattaagcaaaacatattttacatatgaatattttcatttatacttactggaaaacaaaacagaaaaacttataatttaaacatcttgatttgaaaatattttggatttgataagtctggttaatttccacaatgnancngccaaaggggtnttcaaagaatggttattcaaaattttttaaaaana

SEQ ID NO: 8651 - DNA, 492 bp, Homo sapiens
  misc_feature (439)..(439): "n" may be a, t, c, g, other or unknown
  misc_feature (445)..(445): "n" may be a, t, c, g, other or unknown
  misc_feature (465)..(465): "n" may be a, t, c, g, other or unknown
  misc_feature (479)..(479): "n" may be a, t, c, g, other or unknown
  misc_feature (483)..(483): "n" may be a, t, c, g, other or unknown
  misc_feature (485)..(485): "n" may be a, t, c, g, other or unknown
  misc_feature (487)..(487): "n" may be a, t, c, g, other or unknown
gttatggcaaagtaagctttatttaattggtagcaggagagtcacaacttcaaactccagaaaagatgaagtaaatttgcaatgatttcatacaccaagattcctcctacccaaagctgaagatatattttcaaggaaaggtgatggaaagaaaaatggtgctcgcccaagagattcttccatccagcaggcatatactttgtctatcatgagtcaagccctgatccaaaggcttgttaactcataattacactaagcatctctcctatgccaagtaatgtggcaagtattgtgagggaaatacaaatgccctaatgtaaaaagttcattccagtgtaggctgaccttctcaaaatggggtctggtcagattctccatgctaggctacaggaaagaaggctgaagaagcaaatttacaaatcagtttgcctaccattgngaattngagccaatgacttggcattncccgaagtccttanaccntntnaatcg

SEQ ID NO: 8652 - DNA, 533 bp, Homo sapiens
  misc_feature (348)..(348): "n" may be a, t, c, g, other or unknown
  misc_feature (363)..(363): "n" may be a, t, c, g, other or unknown
  misc_feature (410)..(410): "n" may be a, t, c, g, other or unknown
  misc_feature (414)..(414): "n" may be a, t, c, g, other or unknown
  misc_feature (433)..(433): "n" may be a, t, c, g, other or unknown
  misc_feature (436)..(436): "n" may be a, t, c, g, other or unknown
  misc_feature (467)..(467): "n" may be a, t, c, g, other or unknown
  misc_feature (475)..(475): "n" may be a, t, c, g, other or unknown
  misc_feature (508)..(508): "n" may be a, t, c, g, other or unknown
ccaatgtactataaataaacctttacttaagatcttgaaatcaaaattagtttgtatagtattcagaatcaaacctaatgacaaagcaagatgaaataaccaacagcatcatcattatcagaatagtaactaacatttatataaaagattactatgtgtcagaaactaagggctttcatttcattcaattctcataacaacctataaagtaggtactatcattatatccattttacagatgagtgaatgaaggctagaatttgggtcaccggcccaacatgacccaactattagtagtaggtagagaagcgggtctccgaacctaggtaatctggctttggaatctgngctcataaccactgngctataatgtctctgatagcagctactaattaaaaaataaaaaatgnatgntttcctaactttaatcccnccngatagggatattcttgggtcatttatggctnaaattttnaaaaaccttttccctttaacctttacctatccncaatttgggtcactggttttatggg

SEQ ID NO: 8653 - DNA, 557 bp, Homo sapiens
  misc_feature (424)..(424): "n" may be a, t, c, g, other or unknown
  misc_feature (435)..(435): "n" may be a, t, c, g, other or unknown
  misc_feature (460)..(460): "n" may be a, t, c, g, other or unknown
  misc_feature (490)..(490): "n" may be a, t, c, g, other or unknown
  misc_feature (532)..(532): "n" may be a, t, c, g, other or unknown
  misc_feature (545)..(545): "n" may be a, t, c, g, other or unknown
  misc_feature (550)..(550): "n" may be a, t, c, g, other or unknown
gacatctgtaactttaatttaatacaaattgatcataactcataaaatgggcaacattttaaataaaaatactgctggggtggcccagattctggtagttgaagggttggggtagggctgacaattccttttgcccaagggaggcccgggtggcgggggcagccattttaagaaccccctgtgtttagctcttccggctactttgggatggtgtgttgtgtcagagaccccaagtgcagaatctaggccccaggactagaaagaaaagtcaaggccggggagacatttaggctcagtcttgcagcccactcctccagttcccacctctgggcagggatagagccaaggggcaggacaaccctagatgtggactccaccctctcccgagttcttcacgattggatgctgtggcagaaaaacgcangtggggcttgnttcacccaccctaacttccttctanggagatgacattttccaaacttccttgcanccaaggttctggaactgacttaagttcccccaaccgaatctnttggaaaaattanaattngggaccg

SEQ ID NO: 8654 - DNA, 558 bp, Homo sapiens
  misc_feature (461)..(461): "n" may be a, t, c, g, other or unknown
  misc_feature (467)..(467): "n" may be a, t, c, g, other or unknown
  misc_feature (479)..(479): "n" may be a, t, c, g, other or unknown
  misc_feature (539)..(539): "n" may be a, t, c, g, other or unknown
  misc_feature (547)..(547): "n" may be a, t, c, g, other or unknown
  misc_feature (553)..(554): "n" may be a, t, c, g, other or unknown
cattctgatggctcaatgtttctgggatataaactcatcaggcatgggaaggatttccaaattttggcaatacactcaagttatggtataaaaataacattttgttttctctcttttttctcattttagacctaagagttttttgttataagacaccccagttaagaaatattgaaacataagagacttgaccatcaagggagaaaagaagccaagagtgaaaaatgctatgaaagtaactccagacctgggcggggcgggaggtaggaggaataaggagaaaaggaggcataagtggaaaggccaggggcctgtcatctcagcagctccgagacttgtcatgtttgaaagtgcaaatgtcaatggattttaaccatcttgaggttgtgatcttttaaaaagctcaatgaatgaggaagtcaattccttcaaatgcaaaatagctggctttctggctgganggttgntgggtctggggnatttctttcccatctaccttcttttccaccccaacccatttccccaagaaaggtccaaanggtgccanttttgnncatt

SEQ ID NO: 8655 - DNA, 289 bp, Homo sapiens
  misc_feature (52)..(52): "n" may be a, t, c, g, other or unknown
  misc_feature (198)..(198): "n" may be a, t, c, g, other or unknown
  misc_feature (256)..(256): "n" may be a, t, c, g, other or unknown
  misc_feature (259)..(259): "n" may be a, t, c, g, other or unknown
  misc_feature (269)..(269): "n" may be a, t, c, g, other or unknown
  misc_feature (278)..(278): "n" may be a, t, c, g, other or unknown
  misc_feature (280)..(280): "n" may be a, t, c, g, other or unknown
  misc_feature (282)..(282): "n" may be a, t, c, g, other or unknown
atttattatcttctttattaatactcacatgtaacctttgctttttacacanaagtctgctttagaagaatgcctcctcggcttatcatgcccaatggggctttttgtttctggaccacttcccctttctccacccccacccccacatccaaattactcttaacatgttcacagataccacgaatattttgtaaacangatttgggttactggaacttgatttcattaacatcccacttcaaaatggaaggcaggnggnggacagggtnagaaatacnananagaggac

SEQ ID NO: 8656 - DNA, 561 bp, Homo sapiens
  misc_feature (520)..(520): "n" may be a, t, c, g, other or unknown
  misc_feature (531)..(531): "n" may be a, t, c, g, other or unknown
cgatagtgaaaatatactttattttttaatacaatagctgccagcaatatactggtgctgatgttccaaagataaaagaaaatacatgcattctataataagctttcatttgcctgttcaagaaattataaagaaaatactaagctaattaatgataggctcaaaaaatgcagtatacttataaaaagccgctttcataaagccagtgcttactaaatgttagcatatcaaagtgggagaaacactgccattttaaagcaataaacttaaaatttcaagaaacagcctatgagaaatagcacttcctatacaaattaggtataaaaaaattaccaaaaatgtattatagtcacaatcacagtctttggagtagtacgtagaaagtctggttttgcttttgtcttttaaaaaagagtaaatacatagcaaagttttattttcagcaagttcatcctcctgttagaacacaaataattcctggtttagggcttcaattaaaaaaaaccccgaaaaacaaacnaaaacctgcanagtgctattcctcaacatggctggtgggaa

SEQ ID NO: 8657 - DNA, 534 bp, Homo sapiens
  misc_feature (34)..(34): "n" may be a, t, c, g, other or unknown
  misc_feature (95)..(95): "n" may be a, t, c, g, other or unknown
  misc_feature (116)..(116): "n" may be a, t, c, g, other or unknown
  misc_feature (124)..(124): "n" may be a, t, c, g, other or unknown
  misc_feature (167)..(167): "n" may be a, t, c, g, other or unknown
  misc_feature (169)..(169): "n" may be a, t, c, g, other or unknown
  misc_feature (172)..(172): "n" may be a, t, c, g, other or unknown
  misc_feature (280)..(280): "n" may be a, t, c, g, other or unknown
  misc_feature (298)..(298): "n" may be a, t, c, g, other or unknown
  misc_feature (333)..(333): "n" may be a, t, c, g, other or unknown
  misc_feature (354)..(354): "n" may be a, t, c, g, other or unknown
  misc_feature (360)..(360): "n" may be a, t, c, g, other or unknown
  misc_feature (454)..(454): "n" may be a, t, c, g, other or unknown
  misc_feature (482)..(482): "n" may be a, t, c, g, other or unknown
  misc_feature (498)..(498): "n" may be a, t, c, g, other or unknown
  misc_feature (503)..(503): "n" may be a, t, c, g, other or unknown
  misc_feature (524)..(524): "n" may be a, t, c, g, other or unknown
  misc_feature (529)..(529): "n" may be a, t, c, g, other or unknown
  misc_feature (533)..(533): "n" may be a, t, c, g, other or unknown
aactatttaattcactcctttattctgggatgtntattacagataacacaactcacaaatataccatcagacattgaaaactaaggccattctgngagttatttttaaaacttggngttttgcncataatgatcttaaaaaaaaatgaattaccaaaaccaagattntnttntaaaatgaaaatttaatgcaggtacaggataactttagggctatatctaatctgaagcttatcaggtagcaaaaccattttcgttttctacagcataaataacagctntaaggcaaccactacctnagcatgaagctcatttctccacgttagagtagtgnttacctgctacagtgaccagngtttanagaccatttccctttcagtagcaaaagagactttacctaagaaacacactacatactacagaatccttggaacaagaaacagaaagggagctgnaactaaggccctgaaagccattatttgnataaagaaatgtaacnatttnacaccaacaggttcctccggnggagntttnt

SEQ ID NO: 8658 - DNA, 547 bp, Homo sapiens
  misc_feature (444)..(444): "n" may be a, t, c, g, other or unknown
  misc_feature (507)..(507): "n" may be a, t, c, g, other or unknown
  misc_feature (512)..(512): "n" may be a, t, c, g, other or unknown
  misc_feature (519)..(519): "n" may be a, t, c, g, other or unknown
gttagtagcttttacttattatttatgtacttattttttgagacagtctcactctgtcacccaggctggagtgcagtggtgcaaccttgactcactacaacctcctcctcctgggttcaagtgattctcctgcctcagcctcatgagtagctgggattacaggcgtgcaccacctcgctcggctaattgtttttgttcttttttgagatggagtctcgttctatctcccaggctggagtgcagtggcacgatctcagctcaccacaatctccacctcccaggtttaagcaattctcctgcctcagcctcccaagtagctgggattacaggcatgcaccaccacacctggctaatttttgtatttttagtagaggcgaggtttcactatgttcgccaggatggtcttgaactcctgacctcaggtgttctgcccaccttggcctnccaaagtgttggggaattacaggggtgaaccaccgtgcccgggctttttggaatttttagtanaaaanggggttnaccatgttggccaagctgggcttgaacc

SEQ ID NO: 8659 - DNA, 547 bp, Homo sapiens
  misc_feature (489)..(489): "n" may be a, t, c, g, other or unknown
  misc_feature (497)..(497): "n" may be a, t, c, g, other or unknown
  misc_feature (523)..(523): "n" may be a, t, c, g, other or unknown
  misc_feature (532)..(532): "n" may be a, t, c, g, other or unknown
  misc_feature (547)..(547): "n" may be a, t, c, g, other or unknown
aatataagatttcatatttattttggtcaaaattcataaacatatgagcattttctgtataacgtgcttccttgtattgtttgatattacaacatagtcttcaaatagggtccatagggcagaaacatcaaaggactctaaccacgagtgacacactgtcttaagtggctgtcgtgtgtcatgtgctgtttggcttggggataaagcaaatcccatacaaaccaaacaactccagaaaaccccaacaatttcatgttgtcaggaagcttactttaaaagaataagcttaacaaacactgataaggctgacactctagatgcatcttcaaggaaggcctctacggaaggcacaagggagctggggctggactggctccctctgggctttgaggccaagtgtcctgcacagaaggccctgcaaaagcaaagaccaggtggcagcagcacccttgggctttcaaaagtgcaagggacaacgcatgggacccngaatggantgggaaaaggatggaatgcaagaccngaaaggttncccctctaaaactcn

SEQ ID NO: 8660 - DNA, 554 bp, Homo sapiens
  misc_feature (503)..(503): "n" may be a, t, c, g, other or unknown
  misc_feature (535)..(535): "n" may be a, t, c, g, other or unknown
  misc_feature (554)..(554): "n" may be a, t, c, g, other or unknown
ctttggttgtctacacagacacttaagtactgtatcgctgttatgcagcggcctgtggaggcccctgggggtggctgggcctgtgtcctgagccctcagccagatccagggggtgcggtgtctggtcatgtccactccaagagcagtagcaccatgtagaaggctgtgagcagggtcccctcggctgagtggcagatgtaggctcactgctctgcagccccgaggggctggccagctcagagtgcagaagagttcctctccatgggtctagtcacccatccgtctgacctggacgctgtcatagctcatccttgggcttcgattcactgcctgagagagactcttgtgcaggttcgggggggccctgctgggcatccatgggctgctcctgggagaggtccatctcttctgggctgaagagcatcttcaccaggtcatctgcctgcaccctgtcccgctcgctgtgtcgagggtccagggtgaaccacagggcgatggcacancgcttgcccctggtgacagccttcattcatgngggttttcagtgcctgaan

SEQ ID NO: 8661 - DNA, 554 bp, Homo sapiens
  misc_feature (526)..(526): "n" may be a, t, c, g, other or unknown
  misc_feature (537)..(537): "n" may be a, t, c, g, other or unknown
  misc_feature (553)..(553): "n" may be a, t, c, g, other or unknown
ggatattaatcccatggtgcaaggatttcctgcaaagtacctttaatgtgtttaaatcagcagcaagcattaggacatgctattttggccccataagttaggtgtgtagcactacacattagacaccaagtcatcccaaccaatatttatccatatgaacagataaactgaacaaaaacatagttctgataaaacctgcattcacaacctaatgtagtttaaagtaaattttttcacaattgagggctgctatttaggactgttttgttaataataaaaacaggaattatatagaagataaaacaccattttttactgctatataatgtcttgctatataaaacataccctcaacaagtcaaaatatttaaaaccagtgtttcaaataccaaaaatcacagctatgttactgttcagtaactccactcaaataaatgttagtactgcattcttgaaggaaaaaaactgcagccaaggcaagaactctgaagttttgcactcagagtttaaaagacagaccctactntgcaactgaanactgcccttttgtttna

SEQ ID NO: 8662 - DNA, 548 bp, Homo sapiens
  misc_feature (548)..(548): "n" may be a, t, c, g, other or unknown
agaaaaatctgtcaattctgtttccggtaaaatgtttacttcaaagaaatttttatataggctgaggctaatatattcaagagtataaacacttttcctttggattacctaaaaacaaacttttaaagtatcatatttcaattgactaaaaatatagccaaatctgtcacaacacaacataaagtaatggacaattatagaatattttaaattaacagtaacaagccatctacatcaaaccttatttccaactaaaaccaaacaaaagcacaacaatcccgtagtgtaccaagtgtgtatttcaatttactgtatgcaatctaacaaaaatttggtcataatttaccagatatacataaatgatttaagtagtaaaagaaaattcagcttcaagagagtaagttcatatcttgaggaaaagtaaaagtacattaagaatgtaaagccaagtccagtttctatgcaataagtgaactgtagtctaataaagcagatttaggtgatttttagatatatatcttggtctttaatatatattaatatatagn

SEQ ID NO: 8663 - DNA, 537 bp, Homo sapiens
  misc_feature (3)..(3): "n" may be a, t, c, g, other or unknown
  misc_feature (11)..(11): "n" may be a, t, c, g, other or unknown
  misc_feature (80)..(80): "n" may be a, t, c, g, other or unknown
  misc_feature (207)..(207): "n" may be a, t, c, g, other or unknown
  misc_feature (260)..(260): "n" may be a, t, c, g, other or unknown
  misc_feature (273)..(273): "n" may be a, t, c, g, other or unknown
  misc_feature (297)..(297): "n" may be a, t, c, g, other or unknown
  misc_feature (469)..(469): "n" may be a, t, c, g, other or unknown
  misc_feature (529)..(529): "n" may be a, t, c, g, other or unknown
  misc_feature (531)..(531): "n" may be a, t, c, g, other or unknown
  misc_feature (533)..(533): "n" may be a, t, c, g, other or unknown
  misc_feature (537)..(537): "n" may be a, t, c, g, other or unknown
acncagatggngtaatatatttatataataaaagatgaaaatagtcactttccataataaaaataagttctattttttgnttattttacaatatacttaatattctcttcttctttaccttcctctccagcttcatttccttcatgctgaatcaccagggggtcccacatggctgtcccaactccatcaagctggagtccgagaggnggcaggcaggcgggcaggggcttaggaacacgcgaggcagccgcactctaagngtctctccacctnttctacaaacgaggagccatccgngcactggaagacgtatttccgccgcttgctgcgggtgggctggcagcactggggcccacagcccccacgacattccatgatgggcaccttggaggctgtggcacatgatgcataacctttctggcggcggatcacctctcggactacttgtcccaggcacggattctcttgntggcagtgctcgcccgttaaaccggctggcacaaggcagtaagggctcccctgggctganangnggcn

SEQ ID NO: 8664 - DNA, 554 bp, Homo sapiens
  misc_feature (484)..(484): "n" may be a, t, c, g, other or unknown
  misc_feature (526)..(526): "n" may be a, t, c, g, other or unknown
gttttttggaaattgttttattttaaaattaccttcccaacaaaccatgaaacacttggatgttactttatggtttttcattgaaaacatactacattgtaaatggtatttcaaagtcagacatagaattgatcaaaatctaaggacaatattatgtaaggacaatattaaaaatggatagaaaaagcttcatttggtgaggttaatctaaaggatgcataaccatgtcacggtggacggataaaaaaggtgataaccttgtgcttttattcaactaaggtacttactaaaaccttaggttttatacaggtgttaagctcccacctggaaagggacagttttctatattacacctaaatttactttaaataactgaagcccaaggaaacagttgtttaaaagaacttaacagtcagatagctacataatttagtaaattaaaatcaactaagacaggtgataattggaatgtctcaaaactatnccactgggggaaaatacccctgtccccaatttggaggtggtnaagccgaccctcaggaggttgaacaatg

SEQ ID NO: 8665 - DNA, 557 bp, Homo sapiens
  misc_feature (239)..(239): "n" may be a, t, c, g, other or unknown
  misc_feature (442)..(442): "n" may be a, t, c, g, other or unknown
  misc_feature (449)..(449): "n" may be a, t, c, g, other or unknown
  misc_feature (493)..(493): "n" may be a, t, c, g, other or unknown
  misc_feature (515)..(515): "n" may be a, t, c, g, other or unknown
  misc_feature (557)..(557): "n" may be a, t, c, g, other or unknown
catgttcccgtatgctttattggaatgctgtcaggtccgcgccttccacctgggccctcacacacagcaaggagaggccccagcaccggtcccaggcccacctgcccgcacctgcagaagggaaaggccatcaccctccgtggacggggtctcggccaccacatccaccttctgaaggtggcccagacacctccacgctgctgactgcacttcccatcaaaagggactccctggggcanagtgggccgtccccctacccccgaggaaggcaccctcctgggcggggacagaccttggctccatgctgccaagtcaaggtgctggcgtggaaacaggcacatgtggaacaccacatcccactgtccaaggtggagtccacccctcctcggagcactcagcccaccagggtccaagcagccctcgggagataccacgcggccgnccacgtntcaacttggaaaaaagacacttcaaagaccccaagcttaagttntcgggggctggctttcttgggncctttgggctggctggttttcccgggggtttttaaaaacctn

SEQ ID NO: 8666 - DNA, 556 bp, Homo sapiens
agcattatgaatgaaattctttggttttaatttcacacagtttaaaatacaatatgaaatcaggctacagtatataaaaaactctccagcaaaatgatgtgccagcatcagctactaaaataaacaaacaaaaaactccgccataagaatttttttgcatttttttttaaaaaaacatcgacacttacatcgctacatctctaagctacctcagttctgatttttaaaaagcacctgcttttcctttttttcatcttgcttctaaattttcagcttttaaaaaatataaattatatgaaaatacaagttggaaaatagtcaaacacaatataacatctttttcatccctatacttctcagcttaaaaaaaaagtattcttaaaaaaaaaagttcaataactgaggcagtattcctgataattttattttaatatatatattttatatatgtatatgtatcatatatttatggttccttggaaacttctttggatgtaggtaagagttcaacaaatttatttggaccccaacaggagtaagccggatggcccaagat

SEQ ID NO: 8667 - DNA, 552 bp, Homo sapiens
  misc_feature (461)..(461): "n" may be a, t, c, g, other or unknown
  misc_feature (511)..(511): "n" may be a, t, c, g, other or unknown
  misc_feature (525)..(525): "n" may be a, t, c, g, other or unknown
  misc_feature (552)..(552): "n" may be a, t, c, g, other or unknown
aaattaaccagatctgtcttttaatagttaccagaatttagatgttaattccccagaggaaaaatgtccatggcacagtttttctggaaaagttcacatgtaggcagtgaagcttctgaagttaggcgtcaaattagtagtgacaatcttttttttaatcttgaaagtccctagttttaaagaaagtagaatccatctggggcatgtctgcatcacagggtatcactcaagagtcatcatcaggccaaaaagactctgaagggaaccaggagggtttggcccttgctgtggaaagatgctactgaaagtataagagaacaccctaatgcacgcgtcaggcacgaaaccgtaccatgccccgctaagacatgggaccagagaacacgtcaacgtcaggccgctccaggaaaaccatccacaaagacaacagaagctaacccgaggtcgacactgccatgaanagtgttggctgaaacccgcagttaccagtgctttactggacgcgaacatncctaaggacccggntgtgctggttctaagcatcctgacccn

SEQ ID NO: 8668 - DNA, 566 bp, Homo sapiens
  misc_feature (425)..(425): "n" may be a, t, c, g, other or unknown
  misc_feature (436)..(436): "n" may be a, t, c, g, other or unknown
  misc_feature (497)..(497): "n" may be a, t, c, g, other or unknown
  misc_feature (530)..(530): "n" may be a, t, c, g, other or unknown
  misc_feature (545)..(545): "n" may be a, t, c, g, other or unknown
  misc_feature (565)..(565): "n" may be a, t, c, g, other or unknown
attttagtattccattagtttaattccatgtactttaatgttccattagtaacatttaattaagtttataaggaagaaagaacacgagagagagaacaaatcccattttatgaacaagcgtgcgctagaagcagggactgtcaaaggagacactgaacagtgcagggaggattcatttccccaccatatctctgggcaagcaagtgtggaggcagaagacatacagtaatgcaaaaggcatcattatcacagaatttctccatgtgtgaatgagaaagtctttccatggatataagtatacaataaatcacagtaatctaataagcaaaactgctaagaaaaaggcaaatttaaaaagaaataaaagttcaaaaaatttttaaagcttaaatatgtatttaatgaatttttaaaaaatttattgngcttctcctgnttataaaaagtttggttcttggaaaggaaacaaattggaattgtacaggactttatcttgnaaatttaccattaaaggctttatcctaaggcanttccttcaaaaggtntctaataaaggacttgaaant

SEQ ID NO: 8669 - DNA, 553 bp, Homo sapiens
  misc_feature (515)..(515): "n" may be a, t, c, g, other or unknown
  misc_feature (527)..(527): "n" may be a, t, c, g, other or unknown
  misc_feature (535)..(535): "n" may be a, t, c, g, other or unknown
agaattccactcaatctttaatcaagtagggagaagtccccacttaaaaaaaaaaaatatctgcagtttgaagggcaaagggaacagttaaaaaaagaggaaaactttatactcgcccctcccccacagaggttttccaaacctgttgtagcttgactaaaatgttcagaatgtatgattttaaaggcaggtctctttatacaaagaaactgctggcattcttgactagtgaagaattatggcagaaaggcccattcttctgagtctcaaacatggtccaagaaagcatattctgattgtagcaactgaccagtcaatccagagttccacttacaaaacccctgccctgttggctttttgtttccatttccttccctgagaaaagggcaatgtgtggtccaagctggagagctcaaaggcttaagtctttcccctaaatatatgatatcccctcctcctgctccattgaattggcacttgatgagcagaagtcaagtgtaagaaggctgatctgnggcagtcattcncaagaganccctgggcttttttgggg

SEQ ID NO: 8670 - DNA, 527 bp, Homo sapiens
  misc_feature (479)..(479): "n" may be a, t, c, g, other or unknown
  misc_feature (481)..(481): "n" may be a, t, c, g, other or unknown
  misc_feature (492)..(492): "n" may be a, t, c, g, other or unknown
  misc_feature (505)..(505): "n" may be a, t, c, g, other or unknown
  misc_feature (512)..(512): "n" may be a, t, c, g, other or unknown
  misc_feature (515)..(515): "n" may be a, t, c, g, other or unknown
  misc_feature (519)..(519): "n" may be a, t, c, g, other or unknown
gcactaatgctgcttttaatggcggcgcaatagagaagtacaaggttttactagcttgagctactagaaggtgtaaaaggtgcccgctgacactaccaagtagcctcttaatagaaatgtagaaaatatacaggacagggtggagatgagctcttgaatttagtagggtgaaagagttaactgccaacccggcactatcattgtacttgtttggagaaaatctgttttgttctggtgatgatggttttatcttcccttttagttgggtgggaagtaacagaaaatttgtttccccaaaagtttgacattttcttgttaatacacgtttcatttcagtacgatgccaactgttaagcctgcaggaatcctcctgggtatttctgaattgtgctgtgtgcatgtgtgtttgaaagctcaaacagcttgtcttcttacagcatcgagttgtttgctttattgttagacacaatattagcagngnatcctttccgnattccctaccatngaacccnttnaganctaaaatc

SEQ ID NO: 8671 - DNA, 504 bp, Homo sapiens
  misc_feature (433)..(433): "n" may be a, t, c, g, other or unknown
  misc_feature (443)..(443): "n" may be a, t, c, g, other or unknown
  misc_feature (468)..(468): "n" may be a, t, c, g, other or unknown
  misc_feature (479)..(480): "n" may be a, t, c, g, other or unknown
  misc_feature (491)..(491): "n" may be a, t, c, g, other or unknown
  misc_feature (494)..(494): "n" may be a, t, c, g, other or unknown
caatattcaattattaactttaatgtgcaaataaatagaaaaggaaaactacattcaaaacagctgcaaaggaaggacaagccccagaacagaaattcctcaagaacggaaaagaggcgctccctagaagcatgcggggatgggagtactgggaggaggggctcggcggggtctccggctgcacccggggcccaggtggctctgcccgagacggccgtgggcctggtacaggaatcttgatggcaagttcccttcttagaaaaccaggatgtgtacaaagtgcctgtgtgacacttggggagcgggggtggggagcccaggaggacgggtcagcatcggaatcgcccagcctggagtcaaaggcatcaggagcctccaggttccacaggaaacttctagaaacacatctcactttctggaaactttgagtccnactgttgcangatggcaagggtggcgggtattttnggcctactggnntcaagggcccnggncaagggcttt

SEQ ID NO: 8672 - DNA, 539 bp, Homo sapiens
  misc_feature (520)..(520): "n" may be a, t, c, g, other or unknown
  misc_feature (525)..(525): "n" may be a, t, c, g, other or unknown
  misc_feature (535)..(535): "n" may be a, t, c, g, other or unknown
cattcaatgcattgtttattgagtactaactagctttgggcccaggctctgggttagcagcatgcgtgaaacaatcagaaacaatcatgagcgcctgcccacatggggcttacagtctggcagggcaagactgtagacacagaaataaatatccgattataagctgtgattagaggcatgatggaaaagagcaaggcttcctgagagaaacagggcgagcacaggaaaacctctctgagacagtgacatgaacttgaaacttgaagggtaaacaggagtgggcaagacaaaaggggaaagaaggaatgttccaggcagagagaaagagaaaagacccaggcacggtatagagccgaggacatctgaggaagaaagggccgccggggttggggccctctgggtgactgggagaggaaggcgccggaatggatccagattaaatcggatgctgtgtgccctgtggaaacatggggtggtccttttaacgcacttgggttgtaagccaaaggaatgacctggnttaanttgacctttnaaag

SEQ ID NO: 8673 - DNA, 539 bp, Homo sapiens
  misc_feature (476)..(476): "n" may be a, t, c, g, other or unknown
  misc_feature (495)..(495): "n" may be a, t, c, g, other or unknown
  misc_feature (501)..(501): "n" may be a, t, c, g, other or unknown
  misc_feature (503)..(503): "n" may be a, t, c, g, other or unknown
  misc_feature (526)..(526): "n" may be a, t, c, g, other or unknown
  misc_feature (530)..(530): "n" may be a, t, c, g, other or unknown
  misc_feature (536)..(536): "n" may be a, t, c, g, other or unknown
cttgagacatagccttcactctgtcgcccaggctggagtgcagtggggtgatctcggctcactgcaagctctgcctcccgggttcatgccattctcctgtctcagcctcccgagtagctgggactacaggcgcctgccaccacgtctggctaattttttgtatttttttagtagcgacagggtttcaccgtgttagccagatggtcttgatctcctagccttgtgatccacccgcctcggcctcccaaagtgctgggattaccgcgcccggccgaaagtgttttaaatctttgtatacatgtattttggtgtaagaaagcactcaatcctaatgagtatgccccaacatgacttgtttggttataaaatataagtatgtttaaatttaatgtgaaacccttaagtaacaacatatataaacattaactcaaacagatgtcaaagctttgcaacactgagttacacaaaagcctaantaggtagacaaggatgggnaggctnangtgggaaggacacttgagttcangganatcaanaac

SEQ ID NO: 8674 - DNA, 522 bp, Homo sapiens
  misc_feature (105)..(105): "n" may be a, t, c, g, other or unknown
  misc_feature (132)..(132): "n" may be a, t, c, g, other or unknown
  misc_feature (146)..(146): "n" may be a, t, c, g, other or unknown
  misc_feature (267)..(267): "n" may be a, t, c, g, other or unknown
  misc_feature (518)..(518): "n" may be a, t, c, g, other or unknown
gaatcttaaatcatcatttttattttaaggctaacattgcatatactaattaactgatgatgctgatcagatgatgtctgaatttttgaggctatatagtaaggnggttagaagtgcaggttctggcctcanactctttggttcanatatcacctgtacaagttatgtgacattggtcaagtcatgtaacctatttaaaacctagtttcttcatctataattggggataataacagtaactatgtcataaagttgtatgtacatganattgcctgtaaagtgagcaacaatgcctgcacatgataaattataataattattacatgttaataattattatcttcataatcttctaatggtctgaatcatattctcttatattttgaaaaacgataatgataacccatgtaaaacaaactcagataaccagaaaattcaattaaccaaacacagtcttaagctatacttcaatgatgactgctaacattctaagattctccacatagtagagactactntgag

SEQ ID NO: 8675 - DNA, 351 bp, Homo sapiens
  misc_feature (77)..(77): "n" may be a, t, c, g, other or unknown
  misc_feature (128)..(128): "n" may be a, t, c, g, other or unknown
  misc_feature (149)..(149): "n" may be a, t, c, g, other or unknown
  misc_feature (218)..(218): "n" may be a, t, c, g, other or unknown
  misc_feature (266)..(266): "n" may be a, t, c, g, other or unknown
  misc_feature (271)..(271): "n" may be a, t, c, g, other or unknown
  misc_feature (276)..(276): "n" may be a, t, c, g, other or unknown
  misc_feature (280)..(280): "n" may be a, t, c, g, other or unknown
  misc_feature (304)..(304): "n" may be a, t, c, g, other or unknown
  misc_feature (325)..(325): "n" may be a, t, c, g, other or unknown
  misc_feature (327)..(327): "n" may be a, t, c, g, other or unknown
catcttctaggaatgtttttcttatttaaaaaataatactgattttctgggaaaaacaaaaaaacaagccagagaanactgcccttcaaaccaaaatggtaagaaaggcagctatgaacatggggaanacaagtgtgaacatgaggaanacagggatgaaggtgtgaaaacagatgtgaggataagaagacaggtgtaaaggtgagaaagaggccggncatggtggctcacgcctgtaatcccagcactgtgggaggccaaggcanatggntcatntgangtcaagagttcgagaccagcctgnccaacatggcaaaaccccgtntntactaaaaatacaaaattagccgg

SEQ ID NO: 8676 - DNA, 526 bp, Homo sapiens
  misc_feature (484)..(484): "n" may be a, t, c, g, other or unknown
  misc_feature (526)..(526): "n" may be a, t, c, g, other or unknown
gtcagtttacacatacatcatgttaatattagaccaaggcacaaaacgtttagtgcataaacccagtttcttttaagatttagcattttattttagtctcttatcttagtttggaccacttgtacccagtactctacctactacagactatttaacttacccaacaaaatcaaaagaggttgctgaccagatttataggggacataactgtttatattatcaaagtgtttgcataaccaaaagtacaataataaagatgaaaatgcctcctatttcttttagaaaataatacttaataagcttgctgcatctttgatgtttttactactactgcatgacaatgaatatctgatagaaaaaagaaatgtatacttgaattatgatagcccatccatcacagtttaatctaaaaatgaaatttctacagaaacaggaactattttgacaaagaaaaaaaaaatccctcatccaaacttctttgtantggtaaaggctgcaaattgcagcgtttagaaacctccctttn

SEQ ID NO: 8677 - DNA, 528 bp, Homo sapiens
  misc_feature (520)..(520): "n" may be a, t, c, g, other or unknown
gaggaggatactttcatttttattttatatcgtgaggtattgtttggattgttacaatgaacttgcatttcttttgtaatgaagaaaataatacagaggaaataacaacaactaaacctttggcctggattatcatcggctggaaattcatgttggatgcaagtttttattgataacaagttattttttggtttatatgcaaaaaatgttcattgaatgcctcctatttggctggcactgcctaggcactttcacaggtatttcatcctaatcctcacaacagccctatgaggtaatcattggtcccagtttacagaagccttgggtgggagattattgcttgatatacttctatttgccacacatttttgttggcaagacgttcgtatcggctggtgattcactggtcaagagctctcattggccaggagttcctatttgttgctgtaagattcaaataatcaaaatactagaatttttccccccaagaatgatgggaccaatggcataagaagtaaanggaaggaa

SEQ ID NO: 8678 - DNA, 522 bp, Homo sapiens
  misc_feature (481)..(481): "n" may be a, t, c, g, other or unknown
ctccatgttcatttttatttaaagactcagaaacacaggcatcatggtttgtcatcactgacaagtcttccaaaatcacacgctgacatttgtgtctaacaaaaacacttgggatagggtgtgtgtgtttgtgtgtgtgaactgtgcaaagtacaaaggatctcccagtcggctgagcctgttttgaagtgcccggcctggcatcaccccatgaggatgccaggagagcacccgtggccgccatcctctctgcctccctctgggcagaggcccctggtggcctgcagtcctgtcccctcggtgtccactgacttcagccatggctgtggactctaccatgctcctcaaaggaaatctctgtggccccccaaggccactacatggctaagatgtgtacatcatggggccaggatgaaacataagggttagtttcatcttaaccgccaaacatgtgtaccctttgaggcaagatggcctgaanaaaggctaattctgctcctgctcttctctgcgagcttcatc

SEQ ID NO: 8679 - DNA, 525 bp, Homo sapiens
  misc_feature (1)..(525): "n" may be a, t, c, g, other or unknown
nnnnnnnnnnnnnnnnnnnnnnnnnnnnnnnnnnnnnnnnnnnnnnnnnnnnnnnnnnnnnnnnnnnnnnnnnnnnnnnnnnnnnnnnnnnnnnnnnnnnnnnnnnnnnnnnnnnnnnnnnnnnnnnnnnnnnnnnnnnnnnnnnnnnnnnnnnnnnnnnnnnnnnnnnnnnnnnnnnnnnnnnnnnnnnnnnnnnnnnnnnnnnnnnnnnnnnnnnnnnnnnnnnnnnnnnnnnnnnnnnnnnnnnnnnnnnnnnnnnnnnnnnnnnnnnnnnnnnnnnnnnnnnnnnnnnnnnnnnnnnnnnnnnnnnnnnnnnnnnnnnnnnnnnnnnnnnnnnnnnnnnnnnnnnnnnnnnnnnnnnnnnnnnnnnnnnnnnnnnnnnnnnnnnnnnnnnnnnnnnnnnnnnnnnnnnnnnnnnnnnnnnnnnnnnnnnnnnnnnnnnnnnnnnnnnnnnnnnnnnnnnnnnnnnnnnnnnnnnnnnnnnnnnnnnnnnnnnnnnnnnnnnnnnnnnnnnnnnnnnnnnnn

SEQ ID NO: 8680 - DNA, 537 bp, Homo sapiens
  misc_feature (521)..(521): "n" may be a, t, c, g, other or unknown
  misc_feature (527)..(527): "n" may be a, t, c, g, other or unknown
gatagtaggttattttgctttattgtggttgtatatctggatataaaacttttaaagctttcttgaataaaaatcattattttgcagtccataatttacttgcccactgaatgtctgaaccagtgttctctttttgtgtttttctgctctattttattttacaaatggcacataccatcagagtaggcacagtctgacactgcactcattatgagagacttattcagaaaaaaagtgtaaggaataaaatattagcagtcaaatcctttggttcatcttttcaaaaaagatcaaccgatataattacaaatcattgataattcatctttttggttaaaaacaaatccaccaggtagattactgattaaaatgcaacactgctttaaaacaccacattcctattctcatcacactgttcaaagatgccattgtttacaactgattggacatgacacaggatacagtaaggcacaagtggacggtcaaataaaaacaaatactttaggacttggttttctgcncaaatnctaaaatatg

SEQ ID NO: 8681 - DNA, 530 bp, Homo sapiens
aagtgagacactcaagttgtcgctgcattttaataaacatagcacacaatgtgttgctacacaaacaccattcataaacctgagtcacaggtttcagatgggagctggggacgtgtataaatagcctgtgtatgttaaacagtagaaaagaaaagaagtttggggaataaggtcaaaatcatcgtgcccaatttaaacatcataaaaatctcagccttgtcattatttacaacccccagcataactcccacccaaaagagaatgccaaacggaaaattctaaataagatgatgtcctcacgtcgacctaaacagtacaaatgatgcagcatcataaaacaaagttataattatgttgtctcacttcctggctgccggatgcccacggtacagagcagccactccacaggattttctgagctctgagctgtctggggtttttgtaagaacatagctttgactagcattgaccaattgattgcatttaaagactctgtgatggtttgaggtggcaaaagaagaattccactt

SEQ ID NO: 8682 - DNA, 534 bp, Homo sapiens
  misc_feature (480)..(480): "n" may be a, t, c, g, other or unknown
  misc_feature (492)..(492): "n" may be a, t, c, g, other or unknown
  misc_feature (509)..(509): "n" may be a, t, c, g, other or unknown
ctaaatcaagtccattttatttgaaattttccacatgccacacatgtacatgaaaattcccatccagaatgtagtttgctacagtgaacaccaatgtcaggagcaggcatcaccgtgagacgccacgggggcaggtcagcgggacggggacagggaggttggtcatcgaaaggcaggtgatgcatgtcgggtcatttagcacctggtcatgagatacggcgagacccccaggtccagggaaaggtctccccttaaaaccacgtggagctctgctgtctctgggcagtctcacgtggacaggcaatgctcagaaggtggcgaaggggctggagggagataccaccgacgggctcagggggaggggcacgcacacacacaggcacgcacatgcttgcccatgaacaccccccgggcacacacacacccttgcacactccccaccctccctccaccccagacacatcagcacaagcggtccangcttctggcttnactccccgggaggcttntgtggccaggggttcccatggcggg

SEQ ID NO: 8683 - DNA, 504 bp, Homo sapiens
  misc_feature (3)..(3): "n" may be a, t, c, g, other or unknown
  misc_feature (41)..(41): "n" may be a, t, c, g, other or unknown
  misc_feature (168)..(168): "n" may be a, t, c, g, other or unknown
  misc_feature (221)..(221): "n" may be a, t, c, g, other or unknown
  misc_feature (248)..(248): "n" may be a, t, c, g, other or unknown
  misc_feature (263)..(263): "n" may be a, t, c, g, other or unknown
  misc_feature (287)..(287): "n" may be a, t, c, g, other or unknown
  misc_feature (333)..(333): "n" may be a, t, c, g, other or unknown
  misc_feature (384)..(384): "n" may be a, t, c, g, other or unknown
  misc_feature (399)..(399): "n" may be a, t, c, g, other or unknown
  misc_feature (504)..(504): "n" may be a, t, c, g, other or unknown
ganacggaatttcgctcttgttgcccgggctggaatgcaanggcacaatctcagctcactgcagcgtctgcttcccaggttcaagcaattctcctgtctcagcctcctgagtagctgggattacaggcacatgccaccacacctggctaatttttgtatttttagtanaatcgaggtttcatcatgttggtcaggctggtctcaaactcctgacttcaggngatccgcccgcctcggcctcccaaagngctgggattacaggngtgagccaccatgcccggcctaanaaatacttttaagtatattttcattagctagaattgcccaatctgngtaggtataaattacttggtatagggagagagaaagcctatcttacctgtngctttcttacttggnggtaacatccagcagttagtctatttataaacataattactttttcacatatgaaccataaaatatttaactttctggtctatatggttggctaccgctggatcn

SEQ ID NO: 8684 - DNA, 520 bp, Homo sapiens
  misc_feature (477)..(477): "n" may be a, t, c, g, other or unknown
atctatttctttttgctctttatctggagagattccctcaactttattttccagactgtataccaaatacttttagcagtcttattttattttcaaagagatcttcttattctcagtcttctctttcttttcttgctttttaagagacagggtctcactctgtcccccaggctggagtgcagtggcaccatcatggctcactgaagccttgaactcctgggctcaagtgatcttcccacttcagcctcccaagtagctaggaccacaggcacatgccaccatgcttggctaatttttaaaaattattttgtagagacgggatgttgccatcttgcctaggctggtcttgaactcctgagttttccgtttctttgtagtatcctgtttttcatcttaaatacacctcaaatctctctggagatggaattaaaattaagttattctttccacattggctttgtttccctcagagtttgncatattttcaaggcccctaattctacctcggggactttcttat

SEQ ID NO: 8685 - DNA, 526 bp, Homo sapiens
  misc_feature (502)..(502): "n" may be a, t, c, g, other or unknown
ataatttcaaaggatactttttattctgctttagtttaaggtgacaagaagctatttaagtgattacatttgaccaaatgtagcactaatagccattgtaatcttctccgccaacaaaataagacaatttagaaacattgttttacttgtcttcacactttggaggtagaaatcatgaaacattaatctcatgattaccataattatgctctcaaacagcccaagtgaaagaacaatcattctcacaaaatggtgccataatggttaaagcttaatgtcttgctaatgatcaagatgtatacacaacataaaataaatagaattgcttgttgtctgctgaagttcttggcaatgctaaggtaagttatcattttactctttccagttctcaatagccagccctcaaagagcaaggggtggtaggacaacaggaatgagtggaaatggcttctctggcggatccctcctaactgcagtcactcagtctagcaggctcaacttncactgggtcttctggtggaccttg

SEQ ID NO: 8686 - DNA, 514 bp, Homo sapiens
  misc_feature (56)..(56): "n" may be a, t, c, g, other or unknown
  misc_feature (82)..(82): "n" may be a, t, c, g, other or unknown
  misc_feature (122)..(122): "n" may be a, t, c, g, other or unknown
  misc_feature (494)..(494): "n" may be a, t, c, g, other or unknown
  misc_feature (513)..(513): "n" may be a, t, c, g, other or unknown
agagatttaacttttgctctgattttccaattataaggtcaaacattattctaggngtttctgtgagggtgttttatatganattgacatttaaatcaatcagtgaactctgagtaatgcanactgtcctcctcgatgttagtgggcttgatccagtcaggtgaaggtctgaagagaaaaaaagaccgtcctcttcccagaacaagagaatcctccaacagatacctttggactggaccttgcaccatcagctttcctgggtttccagcctcctgcctcacactccagcttttggacttgttagacttaataataacaacacaagccaatccttttaaggaagtttgtctggagaatcttgacaaacacaaacatctactgagagttcctgtccaagttttgctcacaccctagcaagaggcttctggcttaccagttgggagtgtgaggttctttgcttgtaagacctgatccaccagcggtacaccagcttntggcccagggcaagaacang

SEQ ID NO: 8687 - DNA, 512 bp, Homo sapiens
  misc_feature (25)..(25): "n" may be a, t, c, g, other or unknown
  misc_feature (348)..(348): "n" may be a, t, c, g, other or unknown
  misc_feature (365)..(365): "n" may be a, t, c, g, other or unknown
  misc_feature (460)..(460): "n" may be a, t, c, g, other or unknown
  misc_feature (466)..(466): "n" may be a, t, c, g, other or unknown
agcagtgcaaaaattttatttctgnttcccctccccaccactttacaagatgtaaaattttacttaatccaccgtattctctttttttaattatctgttatcagtcatgtcaaatgtgaggaaaaaaacactaatcaattaaaaatatccgtccctcttccccactgctacagcaaatttaggataaatctacagcattcacttactttagctggttctgatactgaggaatacttttttatttgagaatcaacacctaaagacttggctaattgtacagcatttgaatcatcactgataagtgttccaagagccacaagaagtctaaaagtggcttctaggtcttgnactacttccaagattgngctaattagtgacaaacattgggctttcccttcaatgttatggtctttatgaaaacaaacagaatagttcagggccaatgtagccagagcaatgngaatgntcttattgctccctgatttcagttctattgcatgggacatcagtga

SEQ ID NO: 8688 - DNA, 480 bp, Homo sapiens
  misc_feature (437)..(437): "n" may be a, t, c, g, other or unknown
  misc_feature (441)..(441): "n" may be a, t, c, g, other or unknown
  misc_feature (462)..(462): "n" may be a, t, c, g, other or unknown
  misc_feature (472)..(472): "n" may be a, t, c, g, other or unknown
  misc_feature (474)..(474): "n" may be a, t, c, g, other or unknown
  misc_feature (478)..(478): "n" may be a, t, c, g, other or unknown
  misc_feature (480)..(480): "n" may be a, t, c, g, other or unknown
aacaggacacttaatttgctaaactttattttatacatacacgtttacatttactagtcatggtgtcaacttgttaacacaacgaagccctaatggacccgttttgaaattagaagctggacagttacaggctttggtctcttcaagaatccaattcacccctgggtttcgcttggcacacaccccaggagaacgtcgatgcacacagctgtgtagctgcaaacggaaaccactctcttttctctcgtatttttcagtcagactcactcaggattttgaaatgaatcatcacgagaaatttgttttaaagttgaatcactgagaacatctaacaactgttcacattctttatcacaaaaactgaagtcggaaaagacgccctgaaaacttgcaagggctaatactctatgatagaatattactactgttcaccatgntaanacatttacttactaccatacncctgaacagncncggnan

SEQ ID NO: 8689 - DNA, 502 bp, Homo sapiens
  misc_feature (255)..(255): "n" may be a, t, c, g, other or unknown
  misc_feature (427)..(427): "n" may be a, t, c, g, other or unknown
  misc_feature (436)..(436): "n" may be a, t, c, g, other or unknown
  misc_feature (446)..(446): "n" may be a, t, c, g, other or unknown
  misc_feature (466)..(466): "n" may be a, t, c, g, other or unknown
  misc_feature (473)..(473): "n" may be a, t, c, g, other or unknown
  misc_feature (489)..(489): "n" may be a, t, c, g, other or unknown
  misc_feature (502)..(502): "n" may be a, t, c, g, other or unknown
cctcttttaaaaactctatttggtgcgtgcccacggtgctgcgtcccgtcagacatacctgtatagatctctctatttatatatatatatatataaaaggttctttagcagttaaatagattccaatatgaacgtctcccaggacaaagctgcgtctcgcctctgggtcacacgcatctgtgcggctggggtgtatgtgccgcgtcacagcagtaccatataaatacgttgatttgaacgcagtttccctgtggnggtaaaaacacattcctgacaagtgacaagcagaagagtccggcagctgcagcgcctcactcggctgggacctcgtacttgaagatgacgctgaagagccggccgccagcccgctcggccagccacgcgttcttgatgacggccagcttggaggttttcgaacgcaaggctngctgggaanttggggtganaggaacgggccatggccttnatgaccnccaaatccggccaagnttccggacaatgn

SEQ ID NO: 8690 - DNA, 468 bp, Homo sapiens
  misc_feature (64)..(64): "n" may be a, t, c, g, other or unknown
  misc_feature (138)..(138): "n" may be a, t, c, g, other or unknown
  misc_feature (438)..(438): "n" may be a, t, c, g, other or unknown
  misc_feature (442)..(442): "n" may be a, t, c, g, other or unknown
  misc_feature (453)..(454): "n" may be a, t, c, g, other or unknown
  misc_feature (461)..(461): "n" may be a, t, c, g, other or unknown
  misc_feature (465)..(466): "n" may be a, t, c, g, other or unknown
gatagccaaaagcaatttattatagtttagcctcaaaaaaataaaaataaaaaaattatccagnggttatgaggagtctaggaaaacctgtcccagtaatgccaacttggaggtgaagggctgactggggcagctganaagtgggaccttctgtttggcaggcttcctctcccttgcctggtcatggttttctggtgagaagagtgttcctggccttgctggaggttcccatggccccgaactaacagtgtttttctgaaatttcgacctgcaccgtttgagagagtagaattccctcatcaagtcctccacctcccactgctcttccttcagcctctggcagcagtgcagggcggcagggtcgatggggtgagcttctgtgttgaagatgtaccccccagcccccaggatgcactccccatagggggtgatcaccgngtcnaaggtggaccnnttggtgnggannaa

SEQ ID NO: 8691 - DNA, 523 bp, Homo sapiens
aattgctaagaattttatgtagcaagtttgtttattcagtaacataatcacaaaatagaaatatcacattcacagaagtggaaataaagagcataaaatatttttaaaacaggaaagcaatgggatcactttcaagagcctcaaagaaaacctttaatttacaatgctacgctttcatgattaataggattaatgtgtggtttttctttgataaaagtagtcatgattttttagtattacatacattcattgcatatgacagacactctgataaaaatgtactgttctaattacttaattgttttggctcatttaacaccttgtttaaatagctttaagacatataagaggcaaataattatatatacttaaggataaaattttcagatatttatccaaacacacatttacccattaaattagaacaccaactgcttaatatgtaaaactagtttgaaatcatgactcttgattaaatacatacttcaacatctctcatgagacttcccaacttcaaaaatga

SEQ ID NO: 8692 - DNA, 530 bp, Homo sapiens
  misc_feature (449)..(449): "n" may be a, t, c, g, other or unknown
  misc_feature (452)..(452): "n" may be a, t, c, g, other or unknown
  misc_feature (480)..(480): "n" may be a, t, c, g, other or unknown
  misc_feature (482)..(482): "n" may be a, t, c, g, other or unknown
  misc_feature (486)..(486): "n" may be a, t, c, g, other or unknown
  misc_feature (494)..(494): "n" may be a, t, c, g, other or unknown
  misc_feature (513)..(513): "n" may be a, t, c, g, other or unknown
aagttttcatggtttaaacatttattgtaagtcctagatgaaacatactgaaaagattatttttgctttaatcctaatatgctaagaaaagttcattggcacaaatatccagaggtattttacagtttcatttacctttggtggcaaagagtattttgctaaccgtatggatacagtcagatagtttccaatgcacagctttatgctaaagagaattcaaatgtgtctcttttttttgctaaaaaagggatgtaaaaagtccaatatgaaacagaacgagtgcaacacgaaatacaaaatatgcctatcatgtaggcttttgaacagttaatagctctacgtgttatctataaacattttttactagtaacatcactattgtataaatattaaaaacaaaaatgacattaaaaaaatagcatatgaactttacaaaaatggctactttnagncttcctaactaaaatcggaattcaaatncncaancaaatttncctacctaatcaaaccccnccaccggaccggttttt

SEQ ID NO: 8693 - DNA, 498 bp, Homo sapiens
  misc_feature (481)..(481): "n" may be a, t, c, g, other or unknown
  misc_feature (494)..(494): "n" may be a, t, c, g, other or unknown
  misc_feature (498)..(498): "n" may be a, t, c, g, other or unknown
aacagaaaaaagtcaaatgacaattttaatagactttaaaacagtgtacaagtaaaaaacactggttttgtatttcaaaagttgaaggaagatatccagtcattaaacagtctacaaaacatatgccagtaaattacataaaagactatgtacaatataaaaagagctgaaaacagtcttcactgtaaaaataatttaaaacaaacttttcaatttaaaatatcatctatagcacacaaacatcatgcaaatggaaaactaaatatactgcattctttagtgtagccaaataaattcagattgagacatcttataagtagggaaatggccattcaatacgatttttttctctggcagtaatggtcctagctgggtgttttatgcataaagaacagctatatttcaaaccctttttattgtaataaatactaaagcaacagaggaatactttattaatttaggagtgatgttcaaaaatggnctgaaaaataaangctn

SEQ ID NO: 8694 - DNA, 518 bp, Homo sapiens
  misc_feature (504)..(504): "n" may be a, t, c, g, other or unknown
  misc_feature (506)..(506): "n" may be a, t, c, g, other or unknown
  misc_feature (514)..(515): "n" may be a, t, c, g, other or unknown
  misc_feature (518)..(518): "n" may be a, t, c, g, other or unknown
caaataccatactatacccaattttagtcaatttgtaaattataaattatattatttgtgctacagtttgtgacatttaaatcttattagaagataagcaccaaacctattaaaataaaaaatagataaaatgctgtggttttcccagcagcaggatattgtgtacgtcctgtaggctgtaaacttatgctcccttctcctgaaacaatgtttttgataaacttgcccttctcccttgaaacttttcctgaaaacagacttttgctttaactgtagtttcggaaaatgtacaaaagagcaaaactgcccctctcggcgggacggccgcatgttacagaaaggcttcgtctctgctgctgatgccaccacgagccctgcccagcgctcaccaggagggcgggctgcggcccccggggctctggggagggtctcactcagagggtaaaaagctccacagaagagtcaccccagagcacctgtcggagaccctgcgtcccttccctnanggggctgnnaan

SEQ ID NO: 8695 - DNA, 531 bp, Homo sapiens; identical to SEQ ID NO: 8234
  misc_feature (1)..(531): "n" may be a, t, c, g, other or unknown

SEQ ID NO: 8696 - DNA, 536 bp, Homo sapiens
  misc_feature (481)..(481): "n" may be a, t, c, g, other or unknown
  misc_feature (484)..(484): "n" may be a, t, c, g, other or unknown
  misc_feature (503)..(504): "n" may be a, t, c, g, other or unknown
  misc_feature (522)..(523): "n" may be a, t, c, g, other or unknown
gatataggagatttggcttgtattgtgcaaggcttgacataatgggactactaggcttggggattctttcatgagaatttcactaagaaaacaatagttttagtctcaatcccttcatagttggaagcataatgttcctgaaccctccactcccagatatagacaaatatttcttcttccaaagcagtaaagaggtctagatgagctgctggccatttaggggtgagggaggcatttgagggcactgggcctggtcaaggagtaataggggtattcccaggagctactaaaggctggctgctgagctcctgaacagggttgactggtggggatccctcagggccgagaccaggtggcgaacccgccgctgctgttgcagccaatagagcatctccactttgtcactcttcatcttgtccaggtagggccgccccttgaaagaatcactggcttcgcccaaagattaactctatctccttangangggaacccaagaagactcnnttaagttgaactttctgnngaaaaggctttcg

SEQ ID NO: 8697 - DNA, 507 bp, Homo sapiens; identical to SEQ ID NO: 6020
  misc_feature (1)..(507): "n" may be a, t, c, g, other or unknown

SEQ ID NO: 8698 - DNA, 513 bp, Homo sapiens
  misc_feature (82)..(82): "n" may be a, t, c, g, other or unknown
  misc_feature (245)..(245): "n" may be a, t, c, g, other or unknown
  misc_feature (380)..(380): "n" may be a, t, c, g, other or unknown
  misc_feature (397)..(397): "n" may be a, t, c, g, other or unknown
aaaaaaacaaagcaaaccctgggatcaactttattgctgatggctgaagcctcctcctccctatccccttggtctttcaggnggtccaaagcccctccaggatagcacagtgcttaggctctgctgggccagaggcaagggagacaatctatctcccgagcctgccctggcccagtcctttccctgcccctaccccaccctattgcacatcaaatcatgtaaacatggctatggggatggcccanaacagcagtgaggcagattgatgtgtaaacagatttgggatcaggggctagacccagtcacccagccctaccccatgctgaggccacagttaagtatggaaaagcaggaggtcctggtcccaaactctggctcanattatgcaatagtgcanatggctctgctcccctctgccacccaccctctcagattccaggtcctgaggtccaagtagccttgggcttccctccaggcctaggcagcagatggcagtgtccagttttttccttc

SEQ ID NO: 8699 - DNA, 434 bp, Homo sapiens
  misc_feature (395)..(396): "n" may be a, t, c, g, other or unknown
  misc_feature (416)..(416): "n" may be a, t, c, g, other or unknown
  misc_feature (427)..(427): "n" may be a, t, c, g, other or unknown
  misc_feature (431)..(432): "n" may be a, t, c, g, other or unknown
  misc_feature (434)..(434): "n" may be a, t, c, g, other or unknown
agtttttttctctttatttcttatggataaaatgcgacatacatattctacttaacaatgaaagctgatgggacagaagaatcaatattagcttttgagatgggcaaagacataaaacattggcgttttctagtgtcatgatttgtcaaattagttttagaaaatggtaaatgtctgacagaaaaaaaatttttaattaaggtgtatgtaagtgtgtaaaactgttaaaaatgcttgaaaacaaacattttaatcccatgacatattatttttatttgtggaaaacagctaaaaactgcctgtcagagaaactatttaatcctttaacataaagtcttttaaggcacataaacatttatgaagaacagttgaaatatgctcgctaggaagaaggnncattttaactcatatgagcnttcagtcaagngaanncn

SEQ ID NO: 8700 - DNA, 584 bp, Homo sapiens
  misc_feature (466)..(466): "n" may be a, t, c, g, other or unknown
  misc_feature (541)..(541): "n" may be a, t, c, g, other or unknown
  misc_feature (571)..(571): "n" may be a, t, c, g, other or unknown
aaagtttattcatgaatggtttaatttccctttaaagctagaaaataaagatcatttaccttctgatcttcgtttttccaaatggtaataagcattgatccttccctctaataaaggtgaaatttttaaaatctcagtgaataggaatgtgcaaagctctaagaaaactattacttgaatgtctctaaagtggtagaagatcacaagttgggaataccctcaaaaactatatttttaccctactgttaaaacttgttttcaaagtggtgtaatctgaaagatcacagttcaaaagtaattcccataccaaataatatcaactttaggtgaacatctaagtatttaagagtattatttttcttggctgggtgcggcagctcacacctgtaatcccagcactttgggaggccgaggcaggcggattcaggagtttgagcccagcctgaccaacatggtgaaaccttgnctctactaaaaatacaaaaattacccgggcttgttggctcacacctgtaatcccagcttctcaggcggctgaccntgagaatcctttgaacccaggaggcggaantgcatgaggggaa

SEQ ID NO: 8701 - DNA, 588 bp, Homo sapiens
  misc_feature (425)..(425): "n" may be a, t, c, g, other or unknown
  misc_feature (461)..(461): "n" may be a, t, c, g, other or unknown
  misc_feature (535)..(535): "n" may be a, t, c, g, other or unknown
  misc_feature (571)..(572): "n" may be a, t, c, g, other or unknown
  misc_feature (574)..(574): "n" may be a, t, c, g, other or unknown
  misc_feature (582)..(582): "n" may be a, t, c, g, other or unknown
  misc_feature (587)..(587): "n" may be a, t, c, g, other or unknown
gctgagaaaaggcaatgtatattatagttctgtggtagtactgataacattcaagtcattcttaggcaccagtcttacgtatatgaagtcactttttcattccattgtacaaaactcatattttgagaaaaatctaatagctaatagtctccaacaccatatgatcataatcctttagcttaagtagagatctacttattaaatgaggcaccatcaacctaaggaaagataagctgtaagagaatgaagacagaggtatatcaagtaacaagaacattcttccttatcaggataaaatgtttatcagtattcaaataaaatatcttaaatggaaagagacaggaaagaacatggttaaatcacagaaaatgaagaaagggagaagctgatcatgatcttgtgcaacattatgacagcactaaggnattaccgtatccaatacaaggatacttaatagaccnaagaatttaaaatcccagggaactggaataccagccccaaagaagcccctctttgtgggggtcacaccccaaanggcatcaccaatttggaaattttaaatttagagacnncnggtttttnttggng

SEQ ID NO: 8702 - DNA, 587 bp, Homo sapiens
  misc_feature (550)..(550): "n" may be a, t, c, g, other or unknown
  misc_feature (565)..(565): "n" may be a, t, c, g, other or unknown
  misc_feature (587)..(587): "n" may be a, t, c, g, other or unknown
gcaaccatagtgtgaacgttcagcattgcatactgaaaaactttgaatctcatgtaagaaggaactgggctagagacaggagccaagatttattaccatttctaagttttatgagttctattgttttcctacctttattaccagcgttagctgtaatgaggattctagaaaaaagagctggaaaaaagaagcatcccctaactcccacaatgtagcacttcagttctggcctctttaggattggggcagtgtctcatctctttattgtgtattcgtagacagtaagagggagtctcacttactacttggaaaagttttaaagacctaatacttttgtgtgtgtgtgggaactaggccacaaaagtgctttatgaaagagtttccttacgatcatgtccggattcaaatttcaagtagtttgcatgatcttcatgtaatatctgggacacaccttcataattgacaagccttttttttatataataataagaatggctaaatggagtgagggatatcattcattccgccccatgaccttatcttttcaggngggaaatcaatggcnaaaggaaatggtctttccaggn

SEQ ID NO: 8703 - DNA, 578 bp, Homo sapiens
  misc_feature (432)..(432): "n" may be a, t, c, g, other or unknown
  misc_feature (474)..(474): "n" may be a, t, c, g, other or unknown
  misc_feature (485)..(486): "n" may be a, t, c, g, other or unknown
  misc_feature (544)..(544): "n" may be a, t, c, g, other or unknown
  misc_feature (562)..(562): "n" may be a, t, c, g, other or unknown
  misc_feature (564)..(564): "n" may be a, t, c, g, other or unknown
  misc_feature (574)..(574): "n" may be a, t, c, g, other or unknown
  misc_feature (578)..(578): "n" may be a, t, c, g, other or unknown
aagcttctcaaaacactttttaattctccatttttcccatcaagaccaaagttgtacaaacaggtacaaaatcccccaccttcagggtgtgaggcatcactgtgtgtggtcaaagtcccatctcctcccctttccctttccacgagttttcaagatgtggcccagtcagtgcattgctgccttctatgacctatgaaccatgggcagcaagaggactggtgaccgggggacatggtgaggtccagtgtgccaggaacatggtaagtgcccacattgcgggggagggaacaattcagagacaggctcagctggaggccgcacagaggagaaatgtcactctgtcccatcttccctgcattcagctgagctcagaccaagtgagcacctaagaatcatttacccccaaaggatgtttcaagtgagatgcaatgntctctaaccattattctcttagaaattaagggtggcggggcnggaatcaaacnnatgtttgaaatggctttattcctcctagtggctaatgctggtcttgggtttatttgcngaaataaaccaaaatggnantaaaccaccntcan

SEQ ID NO: 8704 - DNA, 505 bp, Homo sapiens
  misc_feature (466)..(466): "n" may be a, t, c, g, other or unknown
  misc_feature (468)..(468): "n" may be a, t, c, g, other or unknown
  misc_feature (481)..(481): "n" may be a, t, c, g, other or unknown
  misc_feature (484)..(484): "n" may be a, t, c, g, other or unknown
  misc_feature (488)..(488): "n" may be a, t, c, g, other or unknown
  misc_feature (491)..(491): "n" may be a, t, c, g, other or unknown
  misc_feature (497)..(497): "n" may be a, t, c, g, other or unknown
gcttcaggcgcttttattaggttccactgcagggctggggtcaatgtaatgcaaatccaagcccagtgatgcacacctgtgagccgaaacagagccgaagcaggagcacctgtgtcccaggagcagctggttggagggagccagggccaggccccacctcctctcgggaccaggagactggcagccgctgtgttcacctgggcaggtgtgcacccagtcacccccactggattatggtgctggtagcatgagagggtgtgtccacaccaagggcaggtgaagatgcgaggtggggctgagacctccttcccacaagaggaggtggctgagcctcccagggcctgaactctcacagcagggctcacccccaagcctgtatgcttagctctgactctctttggacaataaaataaagtgcattactgaacaaagagtaactcaaaaccagaatcagacaaatcgccangnttttccttagctnaangacnaangaaacntgaatgat

SEQ ID NO: 8705 - DNA, 584 bp, Homo sapiens
  misc_feature (495)..(495): "n" may be a, t, c, g, other or unknown
  misc_feature (504)..(504): "n" may be a, t, c, g, other or unknown
  misc_feature (559)..(559): "n" may be a, t, c, g, other or unknown
  misc_feature (566)..(566): "n" may be a, t, c, g, other or unknown
  misc_feature (583)..(583): "n" may be a, t, c, g, other or unknown
gggggaggcaggccatttattgaagaactgcttgcagacatggacacacacagccatggtaaccagacgccaccctggggccagggagcacccagaaacagccctgggctgccagcccaggcctggacatttgcccaccacgggtggagggcctctcttggcatcaaccatccacgacctcctacggcaccatctctcctgccaagttgcccatgggggtctccaggaagaaaaccagccttgggggattccaaggcccagggagggtgggaagctgcccacgccctcaggctgtgcccagtctcatgctcaccatttctttctatggccaaagggaagtcgctggacgagggaggtccctctgctgggatgagcagcacagcacggctggggccccaggtcacagaaatgggtgcagggatcctgggacctgggctggatgggcacccgctttgggatttcctctggttaacctgtgtatggtccaaggaacantgtaggaangggcttggcattgggtggggcttgcatgtccgggctttttcgtaacccaaccaanatcttcnggaggaacagaggagang

SEQ ID NO: 8706 - DNA, 529 bp, Homo sapiens
  misc_feature (441)..(441): "n" may be a, t, c, g, other or unknown
  misc_feature (461)..(461): "n" may be a, t, c, g, other or unknown
  misc_feature (489)..(489): "n" may be a, t, c, g, other or unknown
  misc_feature (515)..(515): "n" may be a, t, c, g, other or unknown
  misc_feature (529)..(529): "n" may be a, t, c, g, other or unknown
ggtttcctctgtcacttttaattaagacacaagttgagtaagcagcctccacaggctgtattcccaggcccccgcccaccctgacctttggcccagaagctactgcttcagtgtgtggggtggaggagtgagactgggtccacagtgacattattgctgacctcttctgtgtgaggaaaaaggccacgagaccctttgtggggccagccctgagtgctcctctcccaagttttaaggcagggagggggaaataactgtacagcccttttagcccccagctctggagtggcagacagcaatgaggccacatccctggagctgcccgggggaagtgggtgaggaaccaaagccgtggtccctgtagagcaactgtggggaggggagggccagtcccctgctcagtcctgaccacataagccttggtcacaggtgtaggtgganagggcactggcggacactgncctaaggtgcatcctgaggcatttaggngggcccctatttaggccatgcttttnattggccttgaccn

SEQ ID NO: 8707 - DNA, 582 bp, Homo sapiens
  misc_feature (519)..(519): "n" may be a, t, c, g, other or unknown
  misc_feature (578)..(578): "n" may be a, t, c, g, other or unknown
atgtaaaaaagaattgtattcttttacatagatcaacacaaaacagtacattgcctttgtatgttaaatgctcattatgctgagtgacaattctaagagcaaagacatgtagttatctaaattttatgggtcctcaattactgcagatagacagtacagtaagagacagtacagtaagaaataaaaaggctgaaaggaatgttttggacattataggaggcctaactttgggtggtgtagatacagatcaaaatgaattctcaaaccagagatgggctttgtggaatgggcctaaagtagtgacaaggtagtcacagacttctggaggagggtacttgggctggtgtctacctggcatatttaggaacattccataacgagatgtaatatcagcacaattgattatttagcccaaggtctcagtcagttgatggctacaagtgttaagtaccacaagccccacctctatctctgtatgtttagagtgcaaatattttccccatgcttctcgtcccctantcactgccaccccccttcggccttccctattcttacaggacttaacagctggcacctanaact

SEQ ID NO: 8708 - DNA, 584 bp, Homo sapiens
  misc_feature (523)..(523): "n" may be a, t, c, g, other or unknown
  misc_feature (556)..(556): "n" may be a, t, c, g, other or unknown
  misc_feature (575)..(575): "n" may be a, t, c, g, other or unknown
ccttcattttgtttttattatagcatgtttgcttaatttacagcaagcagaaaataagctgggtcttgttttgatccaaacattgatgttttaaaggttgtacacaatatttgttaaaaagaacatataaaaatacctttttagaagcctctataagaaagaaaatacaaagtttaaccccacaactttcctctttgctagaactgtaaactactgctacagttttaaatagactttttgttgtttaaactatacatccaggaaaatctaaaaaaattaaagaaacgtgcatataaacgattgcatagcagaacatgaacattaactgcaaacagtaaagaaatgaaagttagaaatactatcaaatatacaaaggttctagaatcaatcctttaaacacattccacaaacagtatttaaaatccatcgttgtattctttacaggcaaagcctagattactaaaaccgaaattgaaaaaagtaatcctctaaaagggaatcgtttgccataattcttacttgnatctgtaagcagcaatctgagattttaaaaganctactttttattctgaaangaaatggac

SEQ ID NO: 8709 - DNA, 569 bp, Homo sapiens
  misc_feature (564)..(564): "n" may be a, t, c, g, other or unknown
gagatggagtttcgctcttgctgcccaagctggagtgcaatggcgcaatctcagctcactgcaacctctgcctcccaggttcaagcgattctcctgcctcagcctcccaagcagctgggattacaggcgcccgccaccacgcctggctaattttgtatttttagtagagatggggtttctccatgttggtcaggctggtcttgaactcccaacctcaggtgatcctcctgcttcagcctcccaaagtgctgggattacaagcgtgggccaccacgccaagcggtgaatgcccatttagttgtattcataattcccgtgccatgtgttcgaattgaattagcaatatgccgaatattaatagtattcaaatgcttgttattgcttgttcgttcaataaaaatctgattgttgagattatagaggtatcgggacacaaatatatgaatgtttctcataatttctaaaacatcaaggccctgttccaaagtctgactgggaagatgtgcctctgcataaccagccataacgctgagcagcttaagttctcatctcactataagtggnccagc

SEQ ID NO: 8710 - DNA, 557 bp, Homo sapiens
  misc_feature (228)..(228): "n" may be a, t, c, g, other or unknown
  misc_feature (265)..(265): "n" may be a, t, c, g, other or unknown
  misc_feature (480)..(480): "n" may be a, t, c, g, other or unknown
  misc_feature (520)..(520): "n" may be a, t, c, g, other or unknown
  misc_feature (546)..(546): "n" may be a, t, c, g, other or unknown
gaggagcaaacgcggctcatttattagaatatgcaaaagagaggactttcctccacaaatacagattgctgcttctcagtttctatcaagagcaagacaacagttgaaaactgtattcctgagaagaagcaaaaaagttatcagtttacaaacaaggataacaggtgatttcaacaaaagataagaaacttttttttccaagaatcaaaatttcaagtattattccanatgacatggcaaagctagcacaggcggaagccaaggngcccctcaggctctgtagggtcttggaggaagggcccgggcagcatgagggagcggcgcgtcctgggacctgcctccagccctgggcttggggccgtggtcactcacacaagggagcagcacgtcctgggacctgcgtccagccccaggctcggggcccgcggtcactcacacaagggagcacatgtcctgggacctgcgtccagccccagcttngggccggggcacttaccggtaacaaggacgataacttggnggccccttgagggtacaagttttggncttggaaggtt

SEQ ID NO: 8711 - DNA, 514 bp, Homo sapiens
  misc_feature (494)..(494): "n" may be a, t, c, g, other or unknown
  misc_feature (499)..(499): "n" may be a, t, c, g, other or unknown
  misc_feature (501)..(501): "n" may be a, t, c, g, other or unknown
  misc_feature (503)..(504): "n" may be a, t, c, g, other or unknown
  misc_feature (509)..(509): "n" may be a, t, c, g, other or unknown
  misc_feature (512)..(512): "n" may be a, t, c, g, other or unknown
cagagaatggcactttatttttaagacttgatttttttgccatgattatctaccaattcttccatgatggtgtcatcctcttcaacagtgaccaggaccttcttgcccactagattaaagatgtcttcaggaggatagcctttgggctcacccaccttcacggtgagcatgtccattgttagaatggtgccttccggaattttcactttggccaccacagacttgcccagcttctcattgcaggccatctcacagggcagcagctgcttggttggggagcccagggcacgctccacaagacgcactgaccgcaccagctcggccagttctccaggctccagcgaggccgagtggtcactccccttccaggtcttgtccaaagttatgtgacgttccaacaccttggtccccagagccactgcggccacagatatcgctatgcctgtttcatgcccagaataccctatgggaatgtcaggaaagagcttctgatnttccnanannacccncangt

SEQ ID NO: 8712 - DNA, 581 bp, Homo sapiens
  misc_feature (474)..(474): "n" may be a, t, c, g, other or unknown
  misc_feature (483)..(483): "n" may be a, t, c, g, other or unknown
  misc_feature (516)..(516): "n" may be a, t, c, g, other or unknown
  misc_feature (525)..(525): "n" may be a, t, c, g, other or unknown
  misc_feature (534)..(534): "n" may be a, t, c, g, other or unknown
  misc_feature (542)..(542): "n" may be a, t, c, g, other or unknown
  misc_feature (558)..(558): "n" may be a, t, c, g, other or unknown
  misc_feature (581)..(581): "n" may be a, t, c, g, other or unknown
agggtctgcgaagtttttaatgttcaaggggctgtccgttttgaaaggtgaaaaggaattaacatatttaggtccactcatagggaggaggaaaaagaaattctggcatagcacaggggtcaggaaactatggcccaccacctgtcgttgtcagtagtttccctggagcccagccatgcaaatggttgacatgctgccgatggccgctctgcagaatcgctgggactaagaccacaggtccagaaagcttcaaatggttactatcgggccctccacagaagtctgcccactctccatacagcatatgatgaaatacactgcattatactgaatattgaaaaaaaatatactgcagctactgaaaaataaacacaaagtgtatatacaaacagggaaagatgttcaagaaatcatgaagaaagttttattttaaactctgcctggcttctgagggccacaaggtcccgtcaattnggttcctanggttccatggagaaaggaattgaagtctttggnaaaattganccttgggangggtaacnaggactttgggcacantggttaacggggtcccacccggn

SEQ ID NO: 8713 - DNA, 440 bp, Homo sapiens
  misc_feature (152)..(152): "n" may be a, t, c, g, other or unknown
  misc_feature (248)..(248): "n" may be a, t, c, g, other or unknown
  misc_feature (387)..(387): "n" may be a, t, c, g, other or unknown
  misc_feature (396)..(396): "n" may be a, t, c, g, other or unknown
  misc_feature (408)..(408): "n" may be a, t, c, g, other or unknown
  misc_feature (412)..(412): "n" may be a, t, c, g, other or unknown
  misc_feature (415)..(415): "n" may be a, t, c, g, other or unknown
  misc_feature (418)..(418): "n" may be a, t, c, g, other or unknown
  misc_feature (427)..(427): "n" may be a, t, c, g, other or unknown
acagctgggccaccgggggtgacatcacgtattggtaggtccatgatgcccccctgagccacaaaaccagcaagtttttattagggattttaaaaggggaggggtgtatgaacagggagtaggtcacaaagatcacatgcttcaaagggcanaaggcagagcaaagatgacatgcttctgaagaaacaggaccagagcaaaatcagaaactcctgataagggtctatgttcagcggtgcatgtattgncttgataaacatcttaacagaaaacagggttcagagcaaagaaccggcctgacctcaaatttaccaggactggggtttcccaatcctagtaagcctgagggtactgcaggagaccagggcgtatctcagtccttatctnaaccacatnggacagacactnccanagnggncgtttatanacctcccccagga

SEQ ID NO: 8714 - DNA, 440 bp, Homo sapiens
  misc_feature (62)..(62): "n" may be a, t, c, g, other or unknown
  misc_feature (99)..(99): "n" may be a, t, c, g, other or unknown
  misc_feature (276)..(276): "n" may be a, t, c, g, other or unknown
  misc_feature (363)..(363): "n" may be a, t, c, g, other or unknown
  misc_feature (387)..(387): "n" may be a, t, c, g, other or unknown
  misc_feature (403)..(403): "n" may be a, t, c, g, other or unknown
  misc_feature (417)..(417): "n" may be a, t, c, g, other or unknown
  misc_feature (423)..(423): "n" may be a, t, c, g, other or unknown
  misc_feature (432)..(432): "n" may be a, t, c, g, other or unknown
  misc_feature (435)..(435): "n" may be a, t, c, g, other or unknown
ccatgaaaaagattccactttattttatttattattgttattgttatttttacaaacaatanatttgctgcaacatgctctggctcatattattgaatnaaaaaatttaacacatttcaaaaatatcaaaaatacactataatgagtcttaagactacaatacgacaatgattgcacaaaaccgtaagatatgagcccactgtctggatgacatccattggcaacagtgagagaaaaccctatagcatctgggagaagtgcatgaaatttagaatncaaggaacttatgtgtgactgactgatcaccaaatgaggcaaacagagcaggattgactgtagctgctttttctcaatctaggaagngcttaccccaactatggggcaaangtcactaactggaaanattaacttgccttnatgatngggagtcgnaangcctc

SEQ ID NO: 8715 - DNA, 554 bp, Homo sapiens
  misc_feature (43)..(43): "n" may be a, t, c, g, other or unknown
  misc_feature (406)..(406): "n" may be a, t, c, g, other or unknown
  misc_feature (457)..(457): "n" may be a, t, c, g, other or unknown
  misc_feature (515)..(515): "n" may be a, t, c, g, other or unknown
  misc_feature (534)..(534): "n" may be a, t, c, g, other or unknown
  misc_feature (549)..(549): "n" may be a, t, c, g, other or unknown
  misc_feature (554)..(554): "n" may be a, t, c, g, other or unknown
ataataaagaatatggtaattttaatgacaaaaattgtattgngaaatagcgcactctatactgagatgaatgaggggaaaaaagtcaaaactcctttcaaaactatattcaaagcatcagaaaaaatttttttttctttttacaaagttatgtataagtcatagggaccaccaaatactgaaatatgaagactctatgaccaaagttcaaaactgattttaaggaactgtgtgaagcaagacaggaaaatttgtatttaacactctatagaacttcacagtaaagctggaatttagagactaatggcttaacaggagtactgccaacaaggcctttcctttctcagaatcatctcctaatattcgtataccattgacaagttgtaacagcagacttagactttgngttttcttaagatggggcttaataaggtgcacaaatatgctgatatcctgnattatgagcatgtaaattattctcaggggttaagaaaatcccgaaaagaatgtaagtntctcagtccacggcttgcntcatcaacaaaaggncaggn

SEQ ID NO: 8716 - DNA, 582 bp, Homo sapiens
  misc_feature (537)..(537): "n" may be a, t, c, g, other or unknown
  misc_feature (540)..(540): "n" may be a, t, c, g, other or unknown
  misc_feature (552)..(552): "n" may be a, t, c, g, other or unknown
aaaaaaacaggacccagtttactactgaagctgcagcgaggttacagaggcgtcttggggctcagtccctgagctccgggacgcccaactgggagtggggcctccactctcctacgtacagacacccccatagggaaacgctcacatgctgtcctgctgggacgctgcaggcctggccgttctgtggccgcatccgcgtccgggtccctgtgtcctggctgggcgagccggggagggggctgattcctgggagcggttcagcagcgagttctgaatgtcttccaggacttcacggaagagctcctctcgggacttcatgccgtccaggtagaccacttccacaccgttggcctccatctcctgcctatacttctggtacatgggccacacgtggccatcgaagaggccggggggatcagggactgtgtagttgcgggtacttctcctccacttgcactcttcatacgggacggtcaggaagtaccggcggctgtacaagtccaccaggggcttgtaactgtagagcaggaagccttncangaagaagatttnggtgtccgaggccttggctgacctgacccc

SEQ ID NO: 8717 - DNA, 567 bp, Homo sapiens
  misc_feature (130)..(130): "n" may be a, t, c, g, other or unknown
  misc_feature (299)..(299): "n" may be a, t, c, g, other or unknown
  misc_feature (319)..(319): "n" may be a, t, c, g, other or unknown
  misc_feature (375)..(375): "n" may be a, t, c, g, other or unknown
  misc_feature (465)..(465): "n" may be a, t, c, g, other or unknown
  misc_feature (477)..(477): "n" may be a, t, c, g, other or unknown
  misc_feature (479)..(479): "n" may be a, t, c, g, other or unknown
  misc_feature (508)..(508): "n" may be a, t, c, g, other or unknown
  misc_feature (524)..(524): "n" may be a, t, c, g, other or unknown
  misc_feature (544)..(544): "n" may be a, t, c, g, other or unknown
  misc_feature (564)..(564): "n" may be a, t, c, g, other or unknown
aaaattatccaaatgtgaacttactggaaagagaaaaaacaagtttaaagaagaaatttttcataggcttcttgtttagtagcacaggccaaaggcctttgtcgtcgtcttgcagggtccttataaatgngtaagacagacagcatttactattgagtcctacagggaaacacacagaagcaattcattgcttgggagtgaaactatcaactaatcttacgactactggttctccaagtcccctaatgaagaaaattttaacctcatgatcatttcaagggaatttctttttcaactgncacatataaacttggtaacncaggaccaatatacatgttctgagttttaaaaatatactccacctaaactatctgnctagtttaatctttctagttatcatttaacctaaaatgagagaccaaatcttatttccattaaaaaaaatgaaaaaaaggcccaatgganctttttgaaagngngtaaaccctggggcttaaaccaatccggnttatcaacccctttgnccaaaaaaacggttggcctnttggattaaaaatggccccnccc

SEQ ID NO: 8718 - DNA, 577 bp, Homo sapiens
  misc_feature (505)..(505): "n" may be a, t, c, g, other or unknown
  misc_feature (560)..(560): "n" may be a, t, c, g, other or unknown
  misc_feature (577)..(577): "n" may be a, t, c, g, other or unknown
agttttctatcaaccgagaatgtttttattaccccatcaatcctgaaggatcatttcaccaaataggaatttggagttgacagagttttgttttgaggcagtcttgctctgttgcccaggctggagtgcagtggcaggatcttggctcactgcaacctccacctcccgggttcaagtaattctcgtgcctcagcctcccaagtagctgagattacaggcatgtgccaccatgcctggctaatttttgtatttttagtagagacagggttttgccatgttggtcaggctggtctcaaactcctgacttcaagtgatctgcccaccttggtctcccaaagtgctgggattacaggtgtgagccaccgtgcccagccacaagttgatagttcttctggcactaaaagaacttgtctcacttccttctggcctccatggtttccagagagaaatccactgtcatctgagttacttttccctctagttaagatttcacttctttcttganctttcaacttttttctggctttaagttttcaaaaatctggcctatcatggacttnttggggttacttacttn

SEQ ID NO: 8719 - DNA, 562 bp, Homo sapiens
  misc_feature (484)..(484): "n" may be a, t, c, g, other or unknown
  misc_feature (498)..(498): "n" may be a, t, c, g, other or unknown
  misc_feature (523)..(523): "n" may be a, t, c, g, other or unknown
  misc_feature (527)..(527): "n" may be a, t, c, g, other or unknown
  misc_feature (538)..(538): "n" may be a, t, c, g, other or unknown
  misc_feature (542)..(542): "n" may be a, t, c, g, other or unknown
  misc_feature (553)..(553): "n" may be a, t, c, g, other or unknown
caactttttgcaaagcagcatagcaacaatcgtgattgtagcacttgcctgaggttgtggtcacaaccaacgtagtaaacatcatttgcatatcagtaagaaaaagaaaacaggaggagatgagttcttacaaaacaaagcagattctagagatttcactgtgtctgcattgctccttccacgcaagttctcccttagctgaccgcaatcttgttttcttccaggaagtgaggaaactggtgtttgggaacgccgtcagtagcacttggtttttccacatctgcactgatacccgactgggagccatccatcttggagacagtggcgttattcacaacggaggtggcccccaaggaaaccgggagggtaggaacccccccactctggatcacagagatctcattggtcttcacggccagaccgccattgagcatgctggtgtactggttccacacaacagggtccacattcactgaaggggccnggaattccttgggnaagaattttgggactctttttccgncccnacctaacaaancctnggggtcttganggccacttc

SEQ ID NO: 8720 - DNA, 575 bp, Homo sapiens
  misc_feature (11)..(11): "n" may be a, t, c, g, other or unknown
  misc_feature (39)..(39): "n" may be a, t, c, g, other or unknown
  misc_feature (81)..(81): "n" may be a, t, c, g, other or unknown
  misc_feature (91)..(91): "n" may be a, t, c, g, other or unknown
  misc_feature (103)..(103): "n" may be a, t, c, g, other or unknown
  misc_feature (113)..(113): "n" may be a, t, c, g, other or unknown
  misc_feature (189)..(189): "n" may be a, t, c, g, other or unknown
  misc_feature (191)..(191): "n" may be a, t, c, g, other or unknown
  misc_feature (215)..(215): "n" may be a, t, c, g, other or unknown
  misc_feature (268)..(268): "n" may be a, t, c, g, other or unknown
  misc_feature (296)..(296): "n" may be a, t, c, g, other or unknown
  misc_feature (303)..(303): "n" may be a, t, c, g, other or unknown
  misc_feature (419)..(419): "n" may be a, t, c, g, other or unknown
  misc_feature (436)..(436): "n" may be a, t, c, g, other or unknown
  misc_feature (528)..(528): "n" may be a, t, c, g, other or unknown
caggtttgcanagtggaagtttaatgggaccatcaccgngataccccatcacagcagtcccaggctggaggccccaggctntggccgcctntcccagcatggngggcctgganagagcaccagcaccacctcccactttccctggggtattgctttgcccctgtgcctcccaccccaggaagctacaananacaggctgtcctgtccccacactntccctgggtcctgggactccctgttctgaggggctaaggttgcctggggccanagggccctccccagggacaaccatcctntccctgngtcccctgccccccacactgagggaatgtctgtgtccttgttcctctgccaggggccaactgaggctgccaaccccaggggcggggtgcaagggctgtgcggggagggtggctcanatccctgcaaggaggcntgctgcagggacagcacaccttgggccccccggcagacattaaggccaatgtggcggcaccaataggcttgttgggcccttgccccggggcnggaacttggaagggcttggattccggggcttggcccaatttaatttt

SEQ ID NO: 8721 - DNA, 475 bp, Homo sapiens
  misc_feature (116)..(116): "n" may be a, t, c, g, other or unknown
  misc_feature (151)..(151): "n" may be a, t, c, g, other or unknown
  misc_feature (167)..(167): "n" may be a, t, c, g, other or unknown
  misc_feature (418)..(418): "n" may be a, t, c, g, other or unknown
  misc_feature (428)..(428): "n" may be a, t, c, g, other or unknown
  misc_feature (455)..(456): "n" may be a, t, c, g, other or unknown
  misc_feature (461)..(461): "n" may be a, t, c, g, other or unknown
  misc_feature (471)..(471): "n" may be a, t, c, g, other or unknown
  misc_feature (473)..(473): "n" may be a, t, c, g, other or unknown
ctctaaacttctcttctcacttcatttcatccatttgatcttcaattactgataccttttcttccacttgattgaatcagctactgaagcttgggcatgcatcacatagttctcgngccatggttttcagctccatcgggtcatttaaggncttctctacactgttnattctagttagccattttgtcaaatcttttttcaaggtttttagcttctttgtgatgggttcgaacatcctcctttagcttggagaagtttgttattaccgatcatctaaagccttcttctctcagctcgtcaaagtaaaagtccagctttgttccattgctggcgaggagctgcgttcctttggaggagaagaggcgctctgatgtttaaaattttcagcttttctgctctggtttctccccatctttgnggttttatcnacttttggcctttgatgatggtgatgnncaaangggttttggngngg

SEQ ID NO: 8722 - DNA, 532 bp, Homo sapiens
  misc_feature (452)..(452): "n" may be a, t, c, g, other or unknown
  misc_feature (499)..(499): "n" may be a, t, c, g, other or unknown
  misc_feature (508)..(508): "n" may be a, t, c, g, other or unknown
  misc_feature (512)..(512): "n" may be a, t, c, g, other or unknown
  misc_feature (515)..(515): "n" may be a, t, c, g, other or unknown
  misc_feature (522)..(522): "n" may be a, t, c, g, other or unknown
  misc_feature (527)..(527): "n" may be a, t, c, g, other or unknown
ccttcttttacctttatattgatatttaaaagaaaaagaacatgatggatacgggaatgggggaagggacaacggttctacgattaacaacaggaactgataggaaccagaagctccaaggatttaaaaaaaaataaaatatatatttatacatttatatatatatatatatatcacgttatgtatgtgagtcccagacaagcaggaagcagcagcaagaagcaactagcacacagaaacacccgtgcgtgtgcactacacattcaagcaaagccattcctctagctaggacgcagcaatccccaccctcccacctacgggcaaaagagaacagctgaaaacaaacttccctctttaagggccactcagtaatttttgtcctcttggccaggaaaaagaaagaaaaacaaaacaaaacagaaaaggtcgatcttgccttgaaagcggccagnggctatttctctctctgccaaagcaggacacgtattcttacacaganggccacatngtgnccntacaatncttanacagt

SEQ ID NO: 8723 - DNA, 569 bp, Homo sapiens
  misc_feature (57)..(57): "n" may be a, t, c, g, other or unknown
  misc_feature (230)..(230): "n" may be a, t, c, g, other or unknown
  misc_feature (232)..(232): "n" may be a, t, c, g, other or unknown
  misc_feature (373)..(373): "n" may be a, t, c, g, other or unknown
  misc_feature (397)..(397): "n" may be a, t, c, g, other or unknown
  misc_feature (445)..(445): "n" may be a, t, c, g, other or unknown
  misc_feature (466)..(466): "n" may be a, t, c, g, other or unknown
  misc_feature (468)..(468): "n" may be a, t, c, g, other or unknown
  misc_feature (484)..(484): "n" may be a, t, c, g, other or unknown
  misc_feature (518)..(518): "n" may be a, t, c, g, other or unknown
  misc_feature (530)..(530): "n" may be a, t, c, g, other or unknown
  misc_feature (541)..(541): "n" may be a, t, c, g, other or unknown
agtaataaaagaatcatttactattttcactgagtttacagtgttgggtactactgnttacatcattttaatgaaagtatttataaaaacatctgcaatagttcatatcagaaaacaaagtttctctcaataaagaccttaaaaaataaatttttatcttcattaactccctttctgggaatgggaatgaaataacatgcttctgtttaaaaaaaaaaaaaaaaaaaaancncaaaatttaataccctaattaggtttctggaaaaaaagactaccctagcaataatttttaacattctacatttcatctatttctaaagacactccctttacaaaatcttttagttttatatattaggacaatcaggtttanagtctcacataaataaaatagccncattagaaggcatactgaagaatcaaatgggttagccacattggctgntccattcacggattctctaananccgttgggaggagccntataaactggtcacgttagctaagtaaaagggcnatctgaccatgntctacacctgngctttacaaaatccgatttggggcccgg

SEQ ID NO: 8724 - DNA, 461 bp, Homo sapiens
  misc_feature (1)..(461): "n" may be a, t, c, g, other or unknown
nnnnnnnnnnnnnnnnnnnnnnnnnnnnnnnnnnnnnnnnnnnnnnnnnnnnnnnnnnnnnnnnnnnnnnnnnnnnnnnnnnnnnnnnnnnnnnnnnnnnnnnnnnnnnnnnnnnnnnnnnnnnnnnnnnnnnnnnnnnnnnnnnnnnnnnnnnnnnnnnnnnnnnnnnnnnnnnnnnnnnnnnnnnnnnnnnnnnnnnnnnnnnnnnnnnnnnnnnnnnnnnnnnnnnnnnnnnnnnnnnnnnnnnnnnnnnnnnnnnnnnnnnnnnnnnnnnnnnnnnnnnnnnnnnnnnnnnnnnnnnnnnnnnnnnnnnnnnnnnnnnnnnnnnnnnnnnnnnnnnnnnnnnnnnnnnnnnnnnnnnnnnnnnnnnnnnnnnnnnnnnnnnnnnnnnnnnnnnnnnnnnnnnnnnnnnnnnnnnnnnnnnnnnnnnnnnnnnnnnnnnnnnnnnnnnnnnnnnnnnn

SEQ ID NO: 8725 - DNA, 576 bp, Homo sapiens; identical to SEQ ID NO: 7622
  misc_feature (1)..(576): "n" may be a, t, c, g, other or unknown

SEQ ID NO: 8726 - DNA, 563 bp, Homo sapiens
  misc_feature (345)..(345): "n" may be a, t, c, g, other or unknown
  misc_feature (356)..(356): "n" may be a, t, c, g, other or unknown
  misc_feature (488)..(488): "n" may be a, t, c, g, other or unknown
  misc_feature (502)..(502): "n" may be a, t, c, g, other or unknown
  misc_feature (536)..(536): "n" may be a, t, c, g, other or unknown
  misc_feature (553)..(554): "n" may be a, t, c, g, other or unknown
  misc_feature (556)..(556): "n" may be a, t, c, g, other or unknown
  misc_feature (562)..(562): "n" may be a, t, c, g, other or unknown
acttcacacattttgatttattgaataccactgggataatacaaatttaataattggaacattatttcataaccattttttaaaattaaattttatctcattcagccattcagccagttttttttttttacattttattaataccaaagtgaaaaatggcctgtgcttatactacaaggatctcatatgaatgcagtcctgattgttcgacacagcaagaaaattcactttcacagtcaacaagtcatcttactcagtagaacacaaagtaaatggtttataactccaatatttgcaaggaaaatacagtacaaattactaaaaaatactaaaatatagaattgngttcaggcatntccactacatcaatcgcagcagtaacctgaaatttgaaacttttaataaaaagttcttaaatataaattatatggcaaatgtcagtacattgcttttttcagtctctttttcagtgttttgcagtagaacanggttcctacccttnaccttccttaggtttaaaaaacccaaaccacaantctgtggggagtccttnncnttatgng

SEQ ID NO: 8727 - DNA, 568 bp, Homo sapiens; identical to SEQ ID NO: 5581
  misc_feature (1)..(568): "n" may be a, t, c, g, other or unknown

SEQ ID NO: 8728 - DNA, 563 bp, Homo sapiens
  misc_feature (89)..(89): "n" may be a, t, c, g, other or unknown
  misc_feature (102)..(102): "n" may be a, t, c, g, other or unknown
  misc_feature (112)..(112): "n" may be a, t, c, g, other or unknown
  misc_feature (140)..(140): "n" may be a, t, c, g, other or unknown
  misc_feature (175)..(175): "n" may be a, t, c, g, other or unknown
  misc_feature (193)..(193): "n" may be a, t, c, g, other or unknown
  misc_feature (240)..(240): "n" may be a, t, c, g, other or unknown
  misc_feature (248)..(248): "n" may be a, t, c, g, other or unknown
  misc_feature (277)..(277): "n" may be a, t, c, g, other or unknown
  misc_feature (300)..(300): "n" may be a, t, c, g, other or unknown
  misc_feature (436)..(436): "n" may be a, t, c, g, other or unknown
  misc_feature (471)..(471): "n" may be a, t, c, g, other or unknown
  misc_feature (517)..(517): "n" may be a, t, c, g, other or unknown
  misc_feature (525)..(525): "n" may be a, t, c, g, other or unknown
  misc_feature (537)..(537): "n" may be a, t, c, g, other or unknown
cacattatataaaaagtgtgcatttaatcttcaaaatagtcaaggctctaatcaggttaggttttccatagttttaagcaggactttgnggttttagtgaanaagtcatggngcaattgaaatcactgtaagaaataagngacttttaaaacaaacacagacacacacactcctnttaagagtaatatatacncaacacagcagctacatgggtgttcaggcaaagggtgcatgaacganaagccctntgctccctgcccgatgagaaagtccccanaaaggattcagcagcagcaagtntacagcacaaacatggatggcattgtccctgaaaacacacagttaggtggacctacaggagacattggagcctagacatgtgggaaagggctcagttcagtacattctactgcatacacttgaaatattacagtgngttttttctccagactattataaataatttttcgngctttctgaaaaaaataaaactgaacttttagtctgcgataaaggngacccttnttttaagcaagntactacatttgcaggatttgggggga

SEQ ID NO: 8729 - DNA, 575 bp, Homo sapiens
  misc_feature (553)..(553): "n" may be a, t, c, g, other or unknown
  misc_feature (566)..(566): "n" may be a, t, c, g, other or unknown
  misc_feature (575)..(575): "n" may be a, t, c, g, other or unknown
cttttgattattgaagtgcatttaatattgtgagaggtctttgaaaaccccatcttgagcagcttgattatatatcagatttcagtctatcttggttaagatcatttggtaacatttgtatgtcaaatacatagtgaatatatctatagatctcctcagccttctgatgagttacttgtgcatacatggagatttcttgaagtgagctgttagccatccttttcacagatgaaaactggtgacacatatttaatgcagttatataacttatattgggaatacttaaataaaactggagtgcctcacttttattactattcaccactgttggaacatgaataccaacattctttctttgttccactaaagacagttcctttagcaaatctgcggtttcttcttggcaggaactgaaaagaattcggattccagcgccaattaaggtagtcagcaggctgtcatagctctttgtctcctaaacatccttgatgtgtctcctgtttttctctgtccttttcccaatcacacatattctttcaaacttactctgcangtgccggaactgntcaatggan

SEQ ID NO: 8730 - DNA, 579 bp, Homo sapiens
  misc_feature (501)..(501): "n" may be a, t, c, g, other or unknown
  misc_feature (551)..(551): "n" may be a, t, c, g, other or unknown
  misc_feature (561)..(561): "n" may be a, t, c, g, other or unknown
  misc_feature (564)..(564): "n" may be a, t, c, g, other or unknown
gtgggcactgcatcactttatttctttggttttcaaacgttactctcgaacaaggcaaattcagtctcccacctgcctggccgctttgtgatctctcactgaagatgggcctccagctccgagaaggcgctcagcagaaaggtggaatccccaactgacagccaggctggccgaggactgcagggtcccagcaggtggatcaagcacccacaagcagagactctgggccataatctgcaaacagagcctgcatctcccagccttgccccacctggtcccacactccttgcaggggacaggccagcccctcagtgatctccagtgcctcaagatctccggtgcctcagtgccatcctttagaggccagctgtggttctttctatacatccctgctgctgctcctgctgacctggcaccttctcccttggggatgccaggcacaagctgctgatcagctctacatttgattttctttctttttttttttctaagagatgaggnctcactacattgcccaaggtggctctaactcctaacctcaagtgatcctnctggcttggnctnccaacgctaggatac

SEQ ID NO: 8731 - DNA, 580 bp, Homo sapiens
  misc_feature (515)..(515): "n" may be a, t, c, g, other or unknown
  misc_feature (552)..(552): "n" may be a, t, c, g, other or unknown
  misc_feature (554)..(554): "n" may be a, t, c, g, other or unknown
  misc_feature (556)..(556): "n" may be a, t, c, g, other or unknown
  misc_feature (573)..(573): "n" may be a, t, c, g, other or unknown
  misc_feature (576)..(576): "n" may be a, t, c, g, other or unknown
acagcataacagggtttgtttactgtgccacatcatgggtgtttttaaaacggaatataaatacatggttagggatagcatttttaggagaacaagtgaccaaaaactaagttacctcttttcaggtcagccaaaaaacgtgaagggaaagtggactttatacaacttagacatttatgtagatagcacagcagactcatgttcaagccagccacctgaaacattataagtccgtcgagggggacagcaatctatggtccatggactgaatccagcctacttttgtatggctctgagctaagaatcgttttaatattttttaaaggttgttaaaagcaaataacaaagaatacatgatgactctattcttgttctcatgtgtgaaccatatattatagcctgcaaagtctaaaatacttataaaccggccctttacagaaaaagtttgcagacccttcttttacaccagtgctgtagataattctggcagtacaactgcaagtctaagataatgntcattcattcccatcataaatgtaacattctaaatangngncttctgatgtcatctgncanaatt

SEQ ID NO: 8732 - DNA, 575 bp, Homo sapiens
  misc_feature (532)..(532): "n" may be a, t, c, g, other or unknown
  misc_feature (548)..(548): "n" may be a, t, c, g, other or unknown
gaaatacaaaggacttttattactgcacagtcatcttacaaattgttaaagcaggatgtctgttttaaaaattgaaagccttacttataaggagagcttgcctatatgatactactttcagtgttaccaaaaggcttatgagcctaaatctatcctcatattaatgggcacactttaggcactttttccaagaagtgcaaacctgttccttggaaaagataacccactaatccattagttttttcgctttgaaaaagcagagagctgatggaaaggccttaattggagaaagcaatccagggctgctgggtggaggctggagaatcccaggtggaaggctgggcatgagccatacactaggtgtctcaactggtgaggtcaatcaagtgggagaacagaccaaaaaaacttgaggacgccctaaagagataatctgcctcctattgccttcagctgcctttctgaggatgttcttaaatcacctatgtaggttagacccaggaaagcttaaaggagacaactggaggaaganggtatcaataatttanaagtaggctgggcatggtggctcaccc

SEQ ID NO: 8733 - DNA, 537 bp, Homo sapiens
  misc_feature (493)..(493): "n" may be a, t, c, g, other or unknown
  misc_feature (509)..(509): "n" may be a, t, c, g, other or unknown
  misc_feature (514)..(514): "n" may be a, t, c, g, other or unknown
  misc_feature (529)..(529): "n" may be a, t, c, g, other or unknown
  misc_feature (531)..(532): "n" may be a, t, c, g, other or unknown
  misc_feature (536)..(536): "n" may be a, t, c, g, other or unknown
aatcaaattgagtattaatctttaatgcatttttttttctcatttgtaaaaagacatgaatgaagttttgaggttcgtgagatttcatcttttcttgaatggtcacttaaagtccaacttgacaatgaactgctctgaaaacgtaatatgatatataattgcagaagcaggtagagtataaagatgatgactagatggtttctgaagaaatcaagagaatggtaagaaagtgagagtgacagctttaaggagatatatactacatgtgactaaaataagcttaaatgatactctctactcacagagtgccttttgaatttttaccagaattcattcattaattttaacttaataagacacagcaagagcagtattaggtctaaattacctttaaaaatttggctgcagacattaaatgattacaaaacactatgatcatcttctgaaggtattctacacatcttaatatggctactgacatcctagcaaatgncaaagtgcagataacnagctnacttaaaactaactntnnaacng

SEQ ID NO: 8734 - DNA, 572 bp, Homo sapiens
  misc_feature (293)..(293): "n" may be a, t, c, g, other or unknown
  misc_feature (553)..(553): "n" may be a, t, c, g, other or unknown
  misc_feature (563)..(563): "n" may be a, t, c, g, other or unknown
  misc_feature (570)..(570): "n" may be a, t, c, g, other or unknown
  misc_feature (572)..(572): "n" may be a, t, c, g, other or unknown
actttcattagtgctcatttattatttatgtagaaaagtttaaaatgctcccaatgagttcatcagttatcaagctcacatgagttaggcccactctcctttggtttttcatctcataataagtcagcaaaagttgacatttatcttactagacatttcccattagccctaactgaaacagatatcaaacaccctagattctcttcagtgcaaagtatctggagtcacagcaattttagagacaagctagtgcaatctagtaattttcatagtcgcagaaaactgaggcctanaagtgatttgtacatgtgagcagctagaaccaggacaagaactccagaacctgggaccacgtgagagtaaaaagaaagggcaccgagtacaggaacaacaactgacacatttcaggtggaaaaaacaagtcacataactgaaaaccaaaatcacagttacataactattttatattagcttcctacatataaagtataaaaactcagctatacatggtatgaaattgtacaaacttacacttggttatgcctaaaattgnataaggcccncttatcngn

SEQ ID NO: 8735 - DNA, 581 bp, Homo sapiens
  misc_feature (581)..(581): "n" may be a, t, c, g, other or unknown
gtctctgggtagtcacgctagggctggcaggggaggaggcagaggaaaggcagggagaagagaaaacatcactgaaaaagaaggtgtcggggaggtacaccctgattctgaccagcccagcccacacagagggtctgaaaggttctcagccttctccatcacccaccctgcggcctctgaaaagaggggcccatctcagacacaaaagcagatactcccaaccttatggggaaagctaacggaggaatactcacagcaccgtggcacgggacggcccttggcttcagagccgggctggcaccgtttgtaaacattagacctggtgatgtctggggatggaggaggagagggatgcccagcctggaccatcaggtttgatgaaagagacagggtggggcccctcaaggcctgggaaatgtctattagctatgggaaagaggctgacaggttcatggtgggggttgcccaggaaggtgtggacaaggtctgaatctacctgactatgtatttgcacgacttcagtgctacctttggaagtggccaggcttctgaggaactccactggcctggggtaatgaacn

SEQ ID NO: 8736 - DNA, 574 bp, Homo sapiens
  misc_feature (558)..(558): "n" may be a, t, c, g, other or unknown
agttgataaaaactttatttaaaacatgtaaagaatcatatagttcaaaactgcaaaaataaaagacaatttcttgtaacttaaaaataaagtatatatctagaaaccaccacattaacatctactatttatagtacaatctccaattcaaagctaatctttgtatttctgtattttgcaacttttgagctagaatcttcctccctatccaactatactgttatgtaaccccattgttttaacatttaacaatacaacttgggtattctctgacaagcaagaatatatactattgatcacttctatacacaaaataaaaacagttcaaatgactagaaactaattttacaaaagaaaaaaaaacaggttagtaaaacatttcttttgaaaacaatgggtgaattagtattctgaattgagctagagcacatttttgcttgaagactctccatattaggcactatgcatttatatagtcagaacatttgcaaaatgcttttcccggttattaggactcacaacacctgggcgctgggggaatagccggactacctcagnttacacagggagaacc

SEQ ID NO: 8737 - DNA, 573 bp, Homo sapiens
  misc_feature (442)..(442): "n" may be a, t, c, g, other or unknown
  misc_feature (524)..(524): "n" may be a, t, c, g, other or unknown
  misc_feature (551)..(551): "n" may be a, t, c, g, other or unknown
  misc_feature (559)..(559): "n" may be a, t, c, g, other or unknown
gagacagggtctcattctgtcgcccaggctggagtgtggtggcacaatcttggctcactgcctggaccttccaggctcaggagattctcccacctcagcctcctgagtagctggaactacaggcatgtgccaccacaccaggctaattttttttgtagagctggggtttccccatgttgcccagattggacttgaattcctgggttcaagcaatctgctgagccaaagtgttgggattatgggtgtgagccaccacacccagccttttttaatttataaaatagagacagggtcctgctctgtcacccaggctggagtgcagtggcacaatcttggctcactgcagcctcgacctcttgggttcaagcaatcctcccacctcagcctcccaagtagctgggactacaggggtgtgccactatgcttggctaattttttttgncgttggtgctttttttgtagagatgaagtctcgcccaggctagtctaagaactcccaggcacaagtgaatgctcctgcctangccttctaaatgttgggaataatggcntgagccanttgggccatctgct

SEQ ID NO: 8738 - DNA, 571 bp, Homo sapiens
  misc_feature (480)..(480): "n" may be a, t, c, g, other or unknown
  misc_feature (539)..(539): "n" may be a, t, c, g, other or unknown
  misc_feature (563)..(563): "n" may be a, t, c, g, other or unknown
  misc_feature (565)..(565): "n" may be a, t, c, g, other or unknown
ggaaggccatatcctttattaaaatcgccacaaatacaaaagcatcactgaactaaaaatacatcatatacgtatattctcatattcttagaaacttatcacaggtttattggctttccatcttatcacatgtcatatctcgaaaacattaaatagaaacaaaagtctccatgcaattttcagatgaaaaacattctgtgcattttcaacttgtgtgttttcgtttagatggttgaaagggtttgctaacaactgtttcccaatttaggctttctggccatgggagtgacatgtcctgtgtcatgtagaatttgatagcttgtaatgtccatttaaatttcaagtgtatcttgccttctctgtagcaagagccagcctgcggatattggatatacaaccagctgcagcttcctggagatcctggtcaggggacccaaccatatccagtagaagctttactgcccattctcatgcatgggngatgcagttatcggcgcttctggaaagtggtacaaggcctgactgtcgcccgatgcccnttggggcattggattcagataccncntagtgg

SEQ ID NO: 8739 - DNA, 576 bp, Homo sapiens
  misc_feature (576)..(576): "n" may be a, t, c, g, other or unknown
actgaaagaaaaacaatttcttttaatttggtttgttggtcccacaccccatctatcaatgtatgtgctatttacaaataagttctatacagtatttttgcagtacctttgataattcctagacctctattttcattctgtgtattaatgtgaataacagatggatattttaatatttaaggcagatggtaaactttcctataggtcttgtgagacttcgtcttataggctgaacaccattcacaaaatgtaataatgcttcattccttcaggttgaggtaaagaacttgagcaactggattagcaaagctgcaaagaatgaaatgtggcctaagatgtaattatgttctctgcccttcctttgggccagggtagttttgcacttgacacaatggaaaataggccataaagcctgaaaataaaatgttctaaaccccaatctcacagcactttagtaggcttttcactaggcatctttaaagtattttcaacaaaatactaattaagctaccacttcaaaagagcttcaaggaaaagctctgctttcttataaaatcttttgagacagagtttccn

SEQ ID NO: 8740 - DNA, 378 bp, Homo sapiens
  misc_feature (236)..(236): "n" may be a, t, c, g, other or unknown
  misc_feature (253)..(253): "n" may be a, t, c, g, other or unknown
  misc_feature (257)..(257): "n" may be a, t, c, g, other or unknown
  misc_feature (316)..(316): "n" may be a, t, c, g, other or unknown
  misc_feature (344)..(344): "n" may be a, t, c, g, other or unknown
  misc_feature (361)..(361): "n" may be a, t, c, g, other or unknown
  misc_feature (366)..(367): "n" may be a, t, c, g, other or unknown
  misc_feature (373)..(373): "n" may be a, t, c, g, other or unknown
  misc_feature (375)..(375): "n" may be a, t, c, g, other or unknown
ggtacacgttacctcatttattctcacaacatgcctgtgaggtagggaggggcagggactgtccccgttttacagaggaggaagttgaggcacacagaggtcaagtgacttgcccaaggtcacagacggcggccaagctggaaatgggccccggagcagacccttggttcacctggggacggggggggggtcccccctgcagcaagcgccagccaagaggatgtctcggatgccanagaggcgcatacacagnatanagcatcccctcatgtactgagctggcttcggggctgacccctgccctcccctaccccgncctgcaggcccgggccattgcagttcanggctcgtgacaccctgngagtnngatgcngnggc

SEQ ID NO: 8741 - DNA, 582 bp, Homo sapiens
  misc_feature (530)..(530): "n" may be a, t, c, g, other or unknown
  misc_feature (536)..(536): "n" may be a, t, c, g, other or unknown
  misc_feature (569)..(569): "n" may be a, t, c, g, other or unknown
gcaaaacaatcagaaaacatttattatactgaaatgtgtacatcctactattaaaaaaacaaagtagcaaatttgctggtgccaaaatttatttagcctgtttcactgggacaaactcacgttcaatgccactcagtataatttcaagtctgataagcatctaagtatttttactccgcttctaaaacctgatgaggaattcaaaataagcacacggcattaaatgacatttattgttccataaatcttgagacccaaaaaggaatgctaaatagacaagcaaaacttttaaaacaaacgagataaactcacttctttccccagtgactggtacagaaaacatgtggtcacacgaaagcaaagggaaaaagtcagaaaggaaaactctctgcctataggatctataggagttacagatattttcaaatcgatgatgaaaatagatcgtgcttctttgtagcaaataattaaccccctttatgaataaaacataaaatgtcaaagcttttactcactggaagtaagtttgncttctngggagagattcaaaactcaaaattactcatttnctatttttggccg

SEQ ID NO: 8742 - DNA, 572 bp, Homo sapiens
  misc_feature (515)..(515): "n" may be a, t, c, g, other or unknown
  misc_feature (525)..(525): "n" may be a, t, c, g, other or unknown
  misc_feature (555)..(555): "n" may be a, t, c, g, other or unknown
  misc_feature (561)..(561): "n" may be a, t, c, g, other or unknown
  misc_feature (571)..(571): "n" may be a, t, c, g, other or unknown
gaaagggaaaaaaaatttattaggtccaggaatcaaagatgacttgatagaattatgaatacatgcagaattggatggttagaaatgaaatcaatctatttaggtccagcctaaggttctgatagccaatcagtagacacaatcagagtagtagtattcctaagaaaccaggataaatctccaatgtgcatgagtttaatgaaccagatagattattgtatcgccaatatccacccttatcccattctcagtcagatgaattttcttgctcatgaggtccacattgaaaacagcatgctcagaaatgggggtcttctcggtgtactcctttcccaggacagggactcgtcgaggccccaacagtggatcatcaaatctcatcagtttcactttggaaaggtctttaattcctcgattcattttcattaaacgcctgattatggaatcacagttatctccttgcctgatttcaattttggttgagaagtggccattgggatggctggggattcccngagaaaccgncacaccaggtctattcttaaaaccttaagngggttncaggacagcng

SEQ ID NO: 8743 - DNA, 571 bp, Homo sapiens
  misc_feature (505)..(505): "n" may be a, t, c, g, other or unknown
  misc_feature (529)..(529): "n" may be a, t, c, g, other or unknown
  misc_feature (560)..(560): "n" may be a, t, c, g, other or unknown
  misc_feature (566)..(566): "n" may be a, t, c, g, other or unknown
gaattcaagggtatactttattaccatgatataatggttaatcatgtgtttccataaaatgcttctcttccactgttctttgaacaaacattaaattcattttccctgacaggggtagacaggtgtcataatccctatttccaacagggaatacagaagcaagggagttttcaacactgtactaaaggagtgtgcacagggcagaagcagctggaactcggtgatgcttctaactcctaggccagcacatctgcaccaggaaagaggagcaggagtccctctcgtctcttacttccaggtcccggaggagccacgttttactaaagccagtccctttgctgcactttttcaccagcaacttcagcaaatcggtctgaaggaaagtagcacggatctcctcaaaaccgtgagcctttagtgttttatacaatcctttcagggccagggacaggacccaagttgcttctactgcctcgggacaatggctgccatgctgcttttgcanaaagtgactggcgataaaggcaantgctgggaagactggcttaactggggcccanagtcancacac

SEQ ID NO: 8744 - DNA, 569 bp, Homo sapiens
  misc_feature (502)..(502): "n" may be a, t, c, g, other or unknown
  misc_feature (558)..(558): "n" may be a, t, c, g, other or unknown
aaaaaaaaccatgaatcatttattctttggttgtctacacagacacttaagtactgtatcgctgttatgcagcggcctgtggaggcccctgggggtggctgggcctgtgtcctgagccctcagccagatccagggggtgcggtgtctggtcatgtccactccaagagcagtagcaccatgtagaaggctgtgagcagggtcccctcggctgagtggcagatgtaggctcactgctctgcagccccgaggggctggccagctcagagtgcagaagagttcctctccatgggtctagtcacccatccgtctgacctggacgctgtcatagctcatccttgggcttcgattcactgcctgagagagactcttgtgcaggttcgggggggccctgctgggcatccaggggctgctcctgggagaggtccatctcttctgggctgaagagcatcttcaccaggtcatctgcctgcaccctgtcccgctcgctgtgtcgagggtccanggtgaaccacagggcgatggcacaacgctgcccctggtgacagccttacttcatgngggtttcagtg

SEQ ID NO: 8745 - DNA, 563 bp, Homo sapiens
  misc_feature (54)..(54): "n" may be a, t, c, g, other or unknown
  misc_feature (513)..(513): "n" may be a, t, c, g, other or unknown
  misc_feature (523)..(523): "n" may be a, t, c, g, other or unknown
gagaggaatgaagcgactgcctttattgcatagaccttttcaattgctttttanattggggacggaggacgcgcatgagacgaacaggggatatgaatttccccgcccccacccgcggggagaggaacattagtgcaaatcctagcgccggccccggggaacctgcccctcctgggctgattggccagctaaatgggggcaccggagtggatggggcgaggctgcgggccctgaccggccgactcactgaggcctaccccagccagtacattccaggtcctgtcattgggcgacgcgtaaaatagactccgccctcagccatcctggccgggtaggagcaggtggcaagcgtcaggactgagccctgccccgtaagggcggccccagatcagacgccaggccccgccctcattgatcaggcactaccctcgggacgagcccatttctctttaaccgtgacgacgcccaccttcagcatcacgtctggtcccatgaaacgagcgcaatcctganacggggccanggcccctggcaccacaactttacagccaggccacacccct

SEQ ID NO: 8746 - DNA, 575 bp, Homo sapiens
acacttactaagaaaaacaaaaatttacttcaaattgtagtataggcttttcaatcacaaaaagaaagaaaagaacagtgatctgacagtggtcacatcctgtgcaaaaaacttgatacaaaaatgatagcacatggtatctgagctgcttacattacaagaaaaaggaaatacagtagctgaaatatggcactcctgggaatcaacttctaaaccaaatagaatgcctttgaaatgattaaatttatttgtgtattagtaagaaagccccaccaccataaatagtacaatatttaaaaataaaaaaaaatacatctatctaagatagatagtgtatttgtactgttagacttctttaagtgcagaaggtggttcaggttttgcctttttaattaaataactgaccatatgctttataaagtttcactcaatcacaaaagccaatttaaatcaaggaatatgatatcaaagttgcataatttcatttgggactggcagcaggttaaagtcttaagctttaacattaatggtcattttaggcaatggaatagttaaaaagtctcaaatctcatatc

SEQ ID NO: 8747 - DNA, 567 bp, Homo sapiens
  misc_feature (197)..(197): "n" may be a, t, c, g, other or unknown
  misc_feature (523)..(523): "n" may be a, t, c, g, other or unknown
  misc_feature (553)..(553): "n" may be a, t, c, g, other or unknown
  misc_feature (565)..(565): "n" may be a, t, c, g, other or unknown
aaaattgcaatgaaaaaaattttaaatccttaccaaaacagagaaagaaaaaacaaaatgcttaccaagcccacaatatagctttcaagatatttagattaaactctaacctattgtatcttaagcacataataaggcacataataagaaattaagtaaatacacagtaattctgagtaagtattagagattatagnggtacaaaaaacccttgagattaatttttttctaaaagaagaccttaccaaaaataacttttaaaaaatctgtcaaaccatatgatagacctgaatattttccttaagactgtaaactttttttctgaaaacaattataaaaaagtagtttataagtaggattatttttctttaaaattttccaagatcatattacttgacaaataagtgtcattttgaaatttaaaacatgattttttcctaataaaattattagttattctgacatcttattaacagatcttagttgaattccacttaattccctggggaagctgagacactgnattttccaatagtcttaaaaggtaaagacnggcttttttaangg

SEQ ID NO: 8748 - DNA, 582 bp, Homo sapiens
  misc_feature (1)..(582): "n" may be a, t, c, g, other or unknown
nnnnnnnnnnnnnnnnnnnnnnnnnnnnnnnnnnnnnnnnnnnnnnnnnnnnnnnnnnnnnnnnnnnnnnnnnnnnnnnnnnnnnnnnnnnnnnnnnnnnnnnnnnnnnnnnnnnnnnnnnnnnnnnnnnnnnnnnnnnnnnnnnnnnnnnnnnnnnnnnnnnnnnnnnnnnnnnnnnnnnnnnnnnnnnnnnnnnnnnnnnnnnnnnnnnnnnnnnnnnnnnnnnnnnnnnnnnnnnnnnnnnnnnnnnnnnnnnnnnnnnnnnnnnnnnnnnnnnnnnnnnnnnnnnnnnnnnnnnnnnnnnnnnnnnnnnnnnnnnnnnnnnnnnnnnnnnnnnnnnnnnnnnnnnnnnnnnnnnnnnnnnnnnnnnnnnnnnnnnnnnnnnnnnnnnnnnnnnnnnnnnnnnnnnnnnnnnnnnnnnnnnnnnnnnnnnnnnnnnnnnnnnnnnnnnnnnnnnnnnnnnnnnnnnnnnnnnnnnnnnnnnnnnnnnnnnnnnnnnnnnnnnnnnnnnnnnnnnnnnnnnnnnnnnnnnnnnnnnnnnnnnnnnnnnnnnnnnnnnnnnnnnnnnnnnnnnnnnnnnnn

SEQ ID NO: 8749 - DNA, 561 bp, Homo sapiens
  misc_feature (427)..(427): "n" may be a, t, c, g, other or unknown
  misc_feature (516)..(516): "n" may be a, t, c, g, other or unknown
  misc_feature (554)..(554): "n" may be a, t, c, g, other or unknown
  misc_feature (560)..(560): "n" may be a, t, c, g, other or unknown
gagatagggtcttgctctatcacccaggctggagtgcagcggtacgatctttgctcaccactacctccgcctcctgggttcaagcaattctcctgcctcagcctcccgagtagctaggattacaggtgtgcgccaccatgcccggctagtttttgcatttttagtagagacagggtttcaccaggttggccaggctggtcttgaactcctgacctcaagtgatctgcctgcctgggcttcccaaagtgctgggattacaggcctgagccaccaagcctggccaccttttggctttttggacagaactctttcaattgtaagtcagaaaaccaacacaaacaggcttaatcaaaataacaacaggaatctgtctcacataattgagacatctaaacagtgttactagatctttgattctcttggctgnttcctttggtgcttcattcttgctggctttctctaagtagtaggaaaagatggcaccgggaagtcccatgattatgtgacccttacagnttcagatcaaaacagaaagcctttctggaacccttganaacaang

SEQ ID NO: 8750 - DNA, 492 bp, Homo sapiens
  misc_feature (418)..(418): "n" may be a, t, c, g, other or unknown
  misc_feature (431)..(431): "n" may be a, t, c, g, other or unknown
  misc_feature (441)..(441): "n" may be a, t, c, g, other or unknown
  misc_feature (444)..(444): "n" may be a, t, c, g, other or unknown
  misc_feature (466)..(466): "n" may be a, t, c, g, other or unknown
  misc_feature (484)..(484): "n" may be a, t, c, g, other or unknown
  misc_feature (492)..(492): "n" may be a, t, c, g, other or unknown
gagacagagtttcactcttgttgcccaggctggagtgcagtggcacaatctcggctcactgcaacctccgcctcctgggttcaaccaattctcctgccccagcctcctgagtagctgggattacaggcatgtgccaccacgcccagctaattttgtatttttagtagagatggggtttctccatgtttgtcaggctggtgtttaactcctgacctcaggtgatccgcctgccttggcctcccaagtgctgggattacaggcgtgagccaccatgcccggctgcaatcacgtatgagtttttctaaaaaaaccgaaacactggaaacatggatgcatcttaaagactttatgctaagtgaaaccagtcacaaaaggacaaatactgaatgattccacttacatgagaaatatgagtagngaagttgatgatngagacaaaangtntggctgttgctaggggaagggnaggtggggagttattgtnaatgggcn

SEQ ID NO: 8751 - DNA, 565 bp, Homo sapiens
  misc_feature (476)..(476): "n" may be a, t, c, g, other or unknown
  misc_feature (498)..(498): "n" may be a, t, c, g, other or unknown
  misc_feature (502)..(502): "n" may be a, t, c, g, other or unknown
  misc_feature (530)..(530): "n" may be a, t, c, g, other or unknown
  misc_feature (543)..(543): "n" may be a, t, c, g, other or unknown
  misc_feature (564)..(564): "n" may be a, t, c, g, other or unknown
gtaaaaaactggctttatttgtcacttattcaccttatctcagttatgccattttggcgtccacagtgacagtcccctggaagctggggtcagcccccacccacccaccgtgaccatcacccacagggcgtgagtgtgggccttgcagggcccagccgatggttacaggctgcaggcgggactatggggctcctcctgaggcctggtgccttccagccccctgcccaccagcttgggtacagctgcctgcctgccagaggccaagcattcccaagcgtgggctgggggaggccctgcccctctgtagcagcagagcagacagggcagtgggagaaccatgtgggtaggagggcatcaggtctcaagagcctctcccctgctcaggactgggtctagacaaggccacgtgtgatagggtggtaagccctgggccatatggaggagcctggggcccatcttgggtcttgcttgctganttgctgggtggctttaggcaantccnttttgtccttgggcactctggttcctgnttagcacttgcancaaggctcaaaatgtgccctnt

SEQ ID NO: 8752 - DNA, 562 bp, Homo sapiens
  misc_feature (491)..(491): "n" may be a, t, c, g, other or unknown
  misc_feature (555)..(555): "n" may be a, t, c, g, other or unknown
  misc_feature (558)..(558): "n" may be a, t, c, g, other or unknown
gtttgaaaagtatataacagatttctttattattatttacaatcaagttctgttggccaacataatgaaataaataaaagatgtgccctggcctgtgaatttcaactctccttgacttaagttctctgaagggcaaattggaaagcggtgatcaggcagggaagagagggcaggtggaggccaggaccatcggtgggaaggccacctgactcctctctcaccagctctaacactcacatccccaaatgtccagagaacaagcatggaagaaaaaaaataaagtgcaaatttaaaagtgataaaaagggtgtttcgcacacccaatgaactaaaactttatacgtaggtaaaatagtaaagataaatgtttttccttggccttcatcacaacccctgaaacggaaagatggcgctgctgtgcttctgagcctaggcttcttgcactaaagcaccaagggcatcgcacacaggcttggcagaagggccatggncagaatcaccaccttcagacaagattgttgaggctcgaatccttggcacccccaacttcagtgngcnccac

SEQ ID NO: 8753 - DNA, 560 bp, Homo sapiens
  misc_feature (89)..(89): "n" may be a, t, c, g, other or unknown
  misc_feature (188)..(188): "n" may be a, t, c, g, other or unknown
  misc_feature (192)..(192): "n" may be a, t, c, g, other or unknown
  misc_feature (533)..(533): "n" may be a, t, c, g, other or unknown
  misc_feature (544)..(544): "n" may be a, t, c, g, other or unknown
  misc_feature (548)..(548): "n" may be a, t, c, g, other or unknown
ccaggtgtggatttttattttcacaaaaagacaacaatgtcttccccacatacaagtatttacaaaacccaactgattcacccatctanaacctgggtttttttccacttctcaacatagttgggaacatggaaacattaatacccacacaattcccagagatggaatttatccatcaaacaaacagngcanattacctaaaagtgcacttacctgcacaactcggtctaagaaccttgtgaaacaaacctcatggccaaggtttcatgaatctatttggtttcataccatgcaaacctgaacaagtgtgctgctacactaaactgaaaatcggttctcattttacaattaaaaaggttctcaacactttagcaactatacagaatatgaaggtttatttcaaaaaagattacatttttttaaaccaggatacacagatgcacttaatgtaacagtaccttctgcaaaaatagggtacataatactcagaaatgcatggaccaatcttattctctaaaaattgaccgcttaanacttcttaagngtanacagccttcaaa

SEQ ID NO: 8754 - DNA, 542 bp, Homo sapiens
  misc_feature (450)..(450): "n" may be a, t, c, g, other or unknown
  misc_feature (455)..(455): "n" may be a, t, c, g, other or unknown
  misc_feature (476)..(476): "n" may be a, t, c, g, other or unknown
  misc_feature (490)..(490): "n" may be a, t, c, g, other or unknown
  misc_feature (513)..(513): "n" may be a, t, c, g, other or unknown
  misc_feature (522)..(522): "n" may be a, t, c, g, other or unknown
  misc_feature (540)..(540): "n" may be a, t, c, g, other or unknown
gcagaaggttaggtgtttatttgcactgcttttataccgtctaccaggttaaaaaaaaaaaacagagactcttttgaaggcatagattttagatatcaacctcagactgtggcatttgggatttccagagcatgtcgttgaggcacttttgtacccagaggcacatggaatttaccaggctgtggagatgatgtgctctcgggatgctgctgccagtagcctggtgaggtagggaagacagcagtggacgcacagtcagggcccagtacacagcccgcctgcctttcgtgtgattgtccagcaggtggcacctgttccctcctgccacccaccttataattgcttccctcttgagcaccttcagccagaggtgggtgggaaggggaaggacgtgcactgggttctgctatgtgccagcatctttggtataaggagccattccctgcccanggcangcagccagtacccaccggggnttgggaacattggnggggctccattggcccatgcttntcctgcttntattagtagggaatcgangg

SEQ ID NO: 8755 - DNA, 567 bp, Homo sapiens
agaggtgtcatgtttactttttatttaggagtacaaactgagacaaaatcatccttccagttagtgaggttttgagggatcatactaaagagaagacaggaaaacaccagtaatggtgaaggtcttgagaaaaggacaggacccgcagatagcgagagatcagaggaggccctaatttctttcctcatttcctttccaaatatcccaaatgtgcaatgcatcacctgagacagaaggcagaaagcatcaagctctctgtttatcccaattcaatgacaaccagaacttattttttttgagatggggtctcgttctgtcgcccaggctggagtgcagtggggcattcatggctcatcgcagcctccaactctcagtctcaagcaaccctcctacgtcagtgtcctgagtagctggaactacaggcatgcaccaccacacttggctcatttttaaaaaatttcttgtagagacaggatcttgctacattgcccaggcttgagtgccgtggtgcattcacagctcaccgaagctcaaactcttgggctcaagcgaaccttctgcttaagc

SEQ ID NO: 8756 - DNA, 535 bp, Homo sapiens
  misc_feature (501)..(501): "n" may be a, t, c, g, other or unknown
  misc_feature (505)..(505): "n" may be a, t, c, g, other or unknown
  misc_feature (508)..(508): "n" may be a, t, c, g, other or unknown
  misc_feature (522)..(522): "n" may be a, t, c, g, other or unknown
  misc_feature (526)..(526): "n" may be a, t, c, g, other or unknown
  misc_feature (528)..(528): "n" may be a, t, c, g, other or unknown
  misc_feature (534)..(534): "n" may be a, t, c, g, other or unknown
caatgctgaaaggaacttttaatatcttaacttgacccaaattatattattatttataaaagttatataaatgcaggctgattgttttaaaagagtcaaaaagccaaatataagtaaagcactagaaataaattcagttgtaaaaaattgacatcattattctaaatgttatgtggaatcacaggaagaaacatcattgcaatcattattcaaagtaatattaaagataacataagagatgtttggtcttaaatgtcaatttgaatgtatagtgtctacaataatagatcaaagagaaagtaagtatatctgtaataaaaacaagaaaaaatgagttgcaaatactgtattctacaatgaaagaagaatgcagattaaggataaaacagtcttaccaactaggcccctttaaggatcatttttcagggtagctaaaaggagtaacaataaagctctacacatataactaaaatgttgcaattaatctagtccagcactttnattnganagttctcaaatcanagtncnaatatnt

SEQ ID NO: 8757 - DNA, 562 bp, Homo sapiens
  misc_feature (391)..(391): "n" may be a, t, c, g, other or unknown
  misc_feature (423)..(423): "n" may be a, t, c, g, other or unknown
  misc_feature (475)..(475): "n" may be a, t, c, g, other or unknown
  misc_feature (506)..(506): "n" may be a, t, c, g, other or unknown
  misc_feature (522)..(522): "n" may be a, t, c, g, other or unknown
  misc_feature (532)..(532): "n" may be a, t, c, g, other or unknown
  misc_feature (558)..(558): "n" may be a, t, c, g, other or unknown
gagtttaagttaaacacccatatgaatttattaaatccagactgtgttaaagggcggcggtctaggagggggagtgtggtagggggacgagggacaagatgatgaacggccgtgggcatcccgtaggggggcccggccccacccccgcccaacccaccccctcggcaacgctgcatcagcttcaccatgattcccagtggtgctgggctggcagggcgagatggctggaaacacagagggacagagggacagacagcgcctccacaaacaaaccctggcctgccccggcccctacgtcacacgctgggccctgacctgaggcgggcctcccaccgccccggcctgatctgtccagggaaagggcgacagggaggggaggcgagggggccgngacgcaggggtagtggtcgccaggacccggancaggtgaggaccatctcgactaatcctttttcttgtcctctgctgcttttgnaggggcttcctgggcttcgttgcaaactggncccttgggtgggcttngtgggcaggnacctggaggcctcctccttggtggcngggg

SEQ ID NO: 8758 - DNA, 562 bp, Homo sapiens
  misc_feature (515)..(515): "n" may be a, t, c, g, other or unknown
  misc_feature (517)..(517): "n" may be a, t, c, g, other or unknown
aaataaaccaaatgcttggtggagaagttgagcaggggagatgggcagtagaggttgccaagacagggcagggggtctggatgaggctgtccgatgcctgccagccacagtgatggtgcatggagggaaggaggagcagagagagaagataggcgtggcctccgggatgcccattctttttgcagagagcagcggcagtgggtccaggggtcctggaggggctggaagggggcagctggctggacatccagaagctttttcttccctcggccacgcctgcctggcggcctccagtccttagcctccgctccctctctctctccagatgcccgccccactccgtgtccatagcagtgacacagccacttccccagctccgtgtaattcccaagggagcagtgaaccccaccatctcaaagctgaagagctgctggccacacacatcctctacggtttctccttcttctgaacgccggctttgctggccctggaatcttggaaaataaactcaggangngaaaagttgacttggttcttgggggttttgtttctggcaggcagg

SEQ ID NO: 8759 - DNA, 636 bp, Homo sapiens
  misc_feature (611)..(611): "n" may be a, t, c, g, other or unknown
  misc_feature (620)..(620): "n" may be a, t, c, g, other or unknown
  misc_feature (631)..(631): "n" may be a, t, c, g, other or unknown
ttgagatgcatgctttgcatacttctgcctgctggggagcctggggactttccacacctggttgctgactaattgagatgcatgctttgcatacttctgcctgctggggagcctggggactttccacaccctaactgacacacattccacagccaagcttgcaggtggcacttttcggggaaatgtgcgcggaacccctatttgtttatttttctaaatacattcaaatatgtatccgctcatgagacaataaccctgataaatgcttcaataatattgaaaaaggaagagtatgagtattcaacatttccgtgtcgcccttattcccttttttgcggcattttgccttcctgtttttgctcacccagaaacgctggtgaaagtaaaagatgctgaagatcagttgggtgcacgagtgggttacatcgaactggatctcaacagcggtaagatccttgagagttttcgccccgaagaacgttttccaatgatgagcacttttaaaggtctgctatgtggcgcggtatatccctattgacgccgggcaagagcactcggcgccgatacactattttaaaatgactgggtgagtctaccagccagaaaacatntacggtggnatgacgtaganaattt

SEQ ID NO: 8760 - DNA, 610 bp, Homo sapiens
  misc_feature (19)..(19): "n" may be a, t, c, g, other or unknown
  misc_feature (458)..(458): "n" may be a, t, c, g, other or unknown
  misc_feature (471)..(471): "n" may be a, t, c, g, other or unknown
  misc_feature (539)..(539): "n" may be a, t, c, g, other or unknown
  misc_feature (579)..(579): "n" may be a, t, c, g, other or unknown
  misc_feature (593)..(593): "n" may be a, t, c, g, other or unknown
gagacagagtctcactctntcaccaaggctggagtgcagtggtgtgatctcagctcgctgaaacctccacctcctgggctcaagtgattctcctgcctcagcctcccaagtagctgggattacaggcaggtgccaccatgcctggctaatttttgttttagtagagatggggtttcaccatgttggccagggtggtctcaaactccagtgatccacccacctcagcctcccaaagtgctgagattacaggcatgagccaccacgcctggccccaaactgactcttgaccaaagaatctgatttggcaaaccaaatcttagtgcagtgttcgctcctcgtccccttacccagaacatgattcagatcctaacataaacacaaaaacaggtcagggaaccaaaacactgtggtcttgctattatacaaaatattgagataatgttcacgattcattctgntttcagcaattgngacaattttgaacttctctcgaacttcgaaacacttcatttcctactaaatcccaaacgtgtaaacangcttcaccagtgggacttggtttgggttggtttttttganaaggaatctcgctntgtacccagcttggagg

SEQ ID NO: 8761 - DNA, 457 bp, Homo sapiens
  misc_feature (1)..(457): "n" may be a, t, c, g, other or unknown
nnnnnnnnnnnnnnnnnnnnnnnnnnnnnnnnnnnnnnnnnnnnnnnnnnnnnnnnnnnnnnnnnnnnnnnnnnnnnnnnnnnnnnnnnnnnnnnnnnnnnnnnnnnnnnnnnnnnnnnnnnnnnnnnnnnnnnnnnnnnnnnnnnnnnnnnnnnnnnnnnnnnnnnnnnnnnnnnnnnnnnnnnnnnnnnnnnnnnnnnnnnnnnnnnnnnnnnnnnnnnnnnnnnnnnnnnnnnnnnnnnnnnnnnnnnnnnnnnnnnnnnnnnnnnnnnnnnnnnnnnnnnnnnnnnnnnnnnnnnnnnnnnnnnnnnnnnnnnnnnnnnnnnnnnnnnnnnnnnnnnnnnnnnnnnnnnnnnnnnnnnnnnnnnnnnnnnnnnnnnnnnnnnnnnnnnnnnnnnnnnnnnnnnnnnnnnnnnnnnnnnnnnnnnnnnnnnnnnnnnnnnnnnnnnnnnnnnnn

SEQ ID NO: 8762 - DNA, 612 bp, Homo sapiens
  misc_feature (460)..(460): "n" may be a, t, c, g, other or unknown
  misc_feature (490)..(490): "n" may be a, t, c, g, other or unknown
  misc_feature (565)..(565): "n" may be a, t, c, g, other or unknown
  misc_feature (570)..(570): "n" may be a, t, c, g, other or unknown
atctttggaaaatttaatttggaccatattttcttcctctttctgaaaacatcaaatatccccatacagtttgggttccacagcttacaaaggggcagtgggtttcccgcagttacatactgtacccaactttctatagaaagataaaacattttccaaccttgcttttgagtatttcctaaaaaatgctttaaagtttccttacaataaatggcaagtaaaacaaagtaaggctttttttttctccttttcccctttttatgtactgcatgttcgaggaataaggaaggaagactagttccatcagagtactagtaatcctagtaccctggggattactgctggatcctcccaggtatacccctattattgaggccctgatgcacccctgcactgaggaacctgagaagggtaagtactaaacagtctgtcatagccacgtgggactgtcacagcacangtgggactgggagtcgccagttcttctcgngctcacaggagtaacaaaggaactaggactaaaccttaccagaggcttccacgtggactacagtccacacgttantttgngggccttacaatgccctttttgacccaatgattactggaaaa

SEQ ID NO: 8763 - DNA, 612 bp, Homo sapiens
  misc_feature (453)..(453): "n" may be a, t, c, g, other or unknown
  misc_feature (538)..(538): "n" may be a, t, c, g, other or unknown
  misc_feature (571)..(571): "n" may be a, t, c, g, other or unknown
  misc_feature (595)..(595): "n" may be a, t, c, g, other or unknown
agtttgtaggaaaagtttatttaatggggagactaagacgatgcaagatggttactagaaaaacatctttcagtctggataaatacacaacaaaggatcatagctgaaataccagtgaccatcacaataggaaaggtggtcagcttgtggaattttccttttggtaaccttaagaagtcattttagcagtactaaccatacagtatatgtcaggcactgtaataaactctttacaagtggtacttcatttagtcttcacgacactgaggtagatactattaaatgtccccattttacaagtaaaaaaattgaggttagagaggccacagaaggtacctgaggtttgggaagtgtagaaccaggatttaaatctggaactcctaggcaaaaaaaagtgttttaacaatcacaatatacagctttacattagtaaaattttgaatttggttttgntcattggtcactatgcatgttttaaaatgtgagggttatagcttatctggtaggacaaactctttaacttctaattgatggctanccaacatatcttcaaaaatactattataatatncctaatttcaacaccaaacacctntccaaaaaactaattct

SEQ ID NO: 8764 - DNA, 616 bp, Homo sapiens
  misc_feature (552)..(552): "n" may be a, t, c, g, other or unknown
  misc_feature (558)..(558): "n" may be a, t, c, g, other or unknown
  misc_feature (570)..(570): "n" may be a, t, c, g, other or unknown
  misc_feature (594)..(594): "n" may be a, t, c, g, other or unknown
cagaccagctagatatttttattaatgatatataacctctttaaaacatgtatatttaccaaaagcattctgatatggcgttcctctagtgtgactttttgcatgtaaattaatacagcctttttgaccttccatacagtcaggttcctcttcagtgtggatgtttcctaacgaccaagttcaagggctttccaacatctctttcactcatgggacttctcaatgtgtgctttgacatgttcccaaagtggaagctaaaaacaaagaagaatctccacacattttacattcataagatttttcacacttgtgagatcacagctgaatattaaggtataaggcagagcgaaaggtttcaacacattccttacagccagaggacgtgcatttatatccaatgtgctcacaagctcagtaaggcccgaggaaaataatgaaagcttttccaccttcctcacattcatagcatttctctccagcatgagttcaaacagactcagtaagatgtaagcatcgacaggtttctaccgtcaagttggttcctaggatgcncagacncatgaatagtanggctatggaaggagcccagatttncacatcctaaatcaaggctcct

SEQ ID NO: 8765 - DNA, 589 bp, Homo sapiens
  misc_feature (302)..(302): "n" may be a, t, c, g, other or unknown
  misc_feature (498)..(498): "n" may be a, t, c, g, other or unknown
  misc_feature (523)..(523): "n" may be a, t, c, g, other or unknown
  misc_feature (542)..(542): "n" may be a, t, c, g, other or unknown
  misc_feature (545)..(545): "n" may be a, t, c, g, other or unknown
  misc_feature (558)..(558): "n" may be a, t, c, g, other or unknown
  misc_feature (565)..(565): "n" may be a, t, c, g, other or unknown
  misc_feature (567)..(567): "n" may be a, t, c, g, other or unknown
acagcataacagggtttgtttactgtgccacatcatgggtgtttttaaaacgaaatataaatatatggttagggatagcatttttaggagaacaagtgaccaaaaactaagttacctcttttcaggtcagccaaaaaacgtgaagggaaagtggactttatacaacttagacatttatgtagatagcacagcagactcatgttcaagccagccacctgaaacattataagtccgtcgagggggacagcaatctatggtccatggactgaatccagcctacttttgtatggctctgagctaanaatcgttttaatattttttaaaggttgttaaaagcaaataacaaagaatacatgatgactctattcttggtctcatgtgtgaaccatatattatagcctgcaaagtctaaaatatttataaaccggccctttacagaaaaagtttgcagacccttcttttacaccagtgctgtagataattctggcagacaactgnaagctaagataatggtcattcattnccatcataatgtacatctnaanaggggcttctgangcactgncnaattcttttaacttttcttcat

SEQ ID NO: 8766 - DNA, 614 bp, Homo sapiens
  misc_feature (556)..(556): "n" may be a, t, c, g, other or unknown
  misc_feature (588)..(588): "n" may be a, t, c, g, other or unknown
  misc_feature (603)..(603): "n" may be a, t, c, g, other or unknown
  misc_feature (610)..(610): "n" may be a, t, c, g, other or unknown
atatcttataggatttatcacaaaatgttactgcccagtgcatttttgcaaacaataacaattcactgagagtaataacattcacatatgtaattagagtttaaaaatgtaaaaaacttagggtaacaaacactttaaacttattttttagacattcaataagcccattctcccacaaactgtttgattacaaagaagcacaatgggttaactgtggcaaaacataagaaataaggcaggggaggcagatacagacttgagaacataaggatatccaaacaattttgtcaatatcaaaagacaaaatcaaaacatcttttataatataaaacaaatccatataattaaatactaattaggtgaaagattatagggtatataacatttattttctctacataaatttgcatatcttaaatttaatgcaaaacatcatgtttcaacttcaacttaacatcataacatgtagttcttggtgagtctagatgtaatggaatgaatatttaaatagacttcaaagatcctgtcaggttttaattggtattggtgcttaagncttaatgctttctttattatggactaagccantttagaaccaaatcncaccacnccct

SEQ ID NO: 8767 - DNA, 611 bp, Homo sapiens
  misc_feature (519)..(519): "n" may be a, t, c, g, other or unknown
  misc_feature (540)..(540): "n" may be a, t, c, g, other or unknown
  misc_feature (545)..(545): "n" may be a, t, c, g, other or unknown
  misc_feature (588)..(588): "n" may be a, t, c, g, other or unknown
  misc_feature (597)..(597): "n" may be a, t, c, g, other or unknown
  misc_feature (604)..(604): "n" may be a, t, c, g, other or unknown
cttttaaaaagtgatatattaaacttatatacaggataattagcaaaatgtagaaagggaaaacaatgtacaaaagacagataaaaaccatcactctcgacggatagtcacaatccaaaaatagtataaaccttaacaaaccctctctaaaccaggtcatattcacatctccccccaagttttgtcagtgagaataaaatatactgaactagtgagctcagtctttctttaaaataggcttgactttggaacatgaaccttggatagatttttaaacatgggagggacaaacaggaaaaccattctatctatccacttaattagtactaattaacggaacaaagttattaaatagctctcagtgctaagtcaagccattattcagaggcctttttgtttttctgctggtttcggggtgagttctttaacaagcttcttatcctgaggtcattccagtagattctgccatattctcaaattcaaatggcgtgattccagttgcaaatttgctcatgtcangtatagggctatgaattttantgggnccgtgaaggctggtgctgcagaaaagactttggttgcccatgntgatgccangttgggncaactgc

SEQ ID NO: 8768 - DNA, 613 bp, Homo sapiens
  misc_feature (540)..(540): "n" may be a, t, c, g, other or unknown
  misc_feature (542)..(542): "n" may be a, t, c, g, other or unknown
  misc_feature (592)..(592): "n" may be a, t, c, g, other or unknown
  misc_feature (610)..(610): "n" may be a, t, c, g, other or unknown
aactttctgctctatattgtttgtttaccgctgtatctcccacagcttgaacagtaccaaggtaccgtagtaggtgctcaataaatgactattgaataaatgaacatatccaacaaatgttctcaatgtaaaggatcagagatgccacatgttctccttgatgggagagacccttccacatgggaatgatgggaaggagttgtactcctggatgttcagtaactgcttctaggagaaaaggtagagtcctatcactaagccgcagatatttatttgtgtgtggctagaatgggatgttttgaatcttctgttacaaccttgggaacgtggctgttatttcaatttatgagccagaaattttcacatcccgaaactgcccagagttccaccagcctgggtatagtatttgttataatctagtcgtaacagtagttgagccaaatctgagttgatctgatgattccgaacactggagagaatcttgaacaggagtgaagactggcggctaaagcccttcacgagaatgctcactgggccggntncacgctcatccagtggcctaggtctgactgccagcgaacaaaactgtgcngagactaggattcattcngcg

SEQ ID NO: 8769 - DNA, 618 bp, Homo sapiens
  misc_feature (578)..(578): "n" may be a, t, c, g, other or unknown
  misc_feature (603)..(603): "n" may be a, t, c, g, other or unknown
  misc_feature (607)..(607): "n" may be a, t, c, g, other or unknown
  misc_feature (609)..(609): "n" may be a, t, c, g, other or unknown
  misc_feature (612)..(612): "n" may be a, t, c, g, other or unknown
  misc_feature (616)..(616): "n" may be a, t, c, g, other or unknown
ctttaaggttcattaatttttttttttcctgattacaaaagcaaaacctcatttttttggtctttgaagaccatggagtatgacttctaagagcaaacattaacatcagatttgtatgtctcactacaaaaagaacccatcactgatgtaagacctactcatgatactgaagtagattttttaaattaaaaaataaaagtagtcatttaaaatggaggaattgtagatgagtatggaaaaatccattcacaaagttcactatttgcattttctaaaagaattttatgtaataaaatagaaaactaatgatttatagagatgtgcataaactcaagagaggaatatggaagggaaaactgtgttatattcccatttaaatttaaaaaaaaaaagataaaacacttgaaatctgtgtttcacatattagaaaaaaataaattcaaatgattctaattccattagcttgttaatgtctccatctctaagatgctgccaagatagcacacaactttcctctgaatatgcacctaacttcagggtaaaaagaccccagtcctcactcgggaccgaacacgttnccagagaaatcagaaggaattatgnaaancntancccntc

SEQ ID NO: 8770 - DNA, 614 bp, Homo sapiens
  misc_feature (517)..(517): "n" may be a, t, c, g, other or unknown
  misc_feature (595)..(595): "n" may be a, t, c, g, other or unknown
  misc_feature (598)..(598): "n" may be a, t, c, g, other or unknown
gtcatgaaaaaatttgatgttgtttattgcaaatacaatttaaacaagttttttttagtgtttgtacacaatttgtcaatttttcaatattcaattttctgtacaggtacttttgggacaattcttatagttacataatgtgaattcatcaaaatgcagttaagaaacttacaggaatatatacacttgaacccaagacccaaacctgacattatatacaacctatttacaaatacatatggacagacaatatatgtacatagattatcataaatattgaaaaataggttagctttaatggattaatgttgttctataaataacattacagttgtaactgaaacatccacggaagacagtaatgcaaaatgaggtgacaagacagtggttttaatactgaagactgctcattaatgggaattcattgttcaggaacctcaaggtagacaagatagctcccagaaaatcatccattggaattttccctaggcacttgattttgaaccttaaatagccngaggattggaggagcttcctcacttaattgctgtagagaaaagaaatttttttccattcttcttggtggcacagtatnttnttccatcaaaaaaaaa

SEQ ID NO: 8771 - DNA, 584 bp, Homo sapiens
  misc_feature (1)..(584): "n" may be a, t, c, g, other or unknown
nnnnnnnnnnnnnnnnnnnnnnnnnnnnnnnnnnnnnnnnnnnnnnnnnnnnnnnnnnnnnnnnnnnnnnnnnnnnnnnnnnnnnnnnnnnnnnnnnnnnnnnnnnnnnnnnnnnnnnnnnnnnnnnnnnnnnnnnnnnnnnnnnnnnnnnnnnnnnnnnnnnnnnnnnnnnnnnnnnnnnnnnnnnnnnnnnnnnnnnnnnnnnnnnnnnnnnnnnnnnnnnnnnnnnnnnnnnnnnnnnnnnnnnnnnnnnnnnnnnnnnnnnnnnnnnnnnnnnnnnnnnnnnnnnnnnnnnnnnnnnnnnnnnnnnnnnnnnnnnnnnnnnnnnnnnnnnnnnnnnnnnnnnnnnnnnnnnnnnnnnnnnnnnnnnnnnnnnnnnnnnnnnnnnnnnnnnnnnnnnnnnnnnnnnnnnnnnnnnnnnnnnnnnnnnnnnnnnnnnnnnnnnnnnnnnnnnnnnnnnnnnnnnnnnnnnnnnnnnnnnnnnnnnnnnnnnnnnnnnnnnnnnnnnnnnnnnnnnnnnnnnnnnnnnnnnnnnnnnnnnnnnnnnnnnnnnnnnnnnnnnnnnnnnnnnnnnnnnnnnnnnn

SEQ ID NO: 8772 - DNA, 531 bp, Homo sapiens
  misc_feature (45)..(45): "n" may be a, t, c, g, other or unknown
  misc_feature (121)..(121): "n" may be a, t, c, g, other or unknown
  misc_feature (248)..(248): "n" may be a, t, c, g, other or unknown
  misc_feature (436)..(436): "n" may be a, t, c, g, other or unknown
  misc_feature (438)..(438): "n" may be a, t, c, g, other or unknown
  misc_feature (449)..(449): "n" may be a, t, c, g, other or unknown
  misc_feature (468)..(469): "n" may be a, t, c, g, other or unknown
  misc_feature (471)..(471): "n" may be a, t, c, g, other or unknown
  misc_feature (480)..(480): "n" may be a, t, c, g, other or unknown
ccagattttttttttattcagtacagatgcaaagtagtagctcanaggctctgggtaatagcattcctgagattgatgacatccattacctcactagtccaacttctccagactaacgcanacttttctcttcccttggcctttcctctcctcgccattgggccaattccttcgatttctcatttcccttgaagttagggccattcacagtttcatggtcaaagccagttccaggttcaatagtctgngatttatccaggctctgaggtatgcaccgcttctgttttgctcgttcctccaagagctagtttggccagaaaggggatgctttataccatagaacacatccaccttctagaacctgctctagaaggccaggccctcagattccacatggttggagttctggccaagtctggagctttcttcacacttngnttttaaaactntgggttcaaaaaaaactgnncntggtgaganaagaccgggtcaaaccgaggcccctggaggacctttggaaccttggaagct

SEQ ID NO: 8773 - DNA, 589 bp, Homo sapiens
  misc_feature (10)..(10): "n" may be a, t, c, g, other or unknown
  misc_feature (45)..(45): "n" may be a, t, c, g, other or unknown
  misc_feature (85)..(85): "n" may be a, t, c, g, other or unknown
  misc_feature (151)..(151): "n" may be a, t, c, g, other or unknown
  misc_feature (427)..(427): "n" may be a, t, c, g, other or unknown
  misc_feature (482)..(482): "n" may be a, t, c, g, other or unknown
  misc_feature (523)..(524): "n" may be a, t, c, g, other or unknown
  misc_feature (561)..(561): "n" may be a, t, c, g, other or unknown
  misc_feature (564)..(564): "n" may be a, t, c, g, other or unknown
  misc_feature (579)..(579): "n" may be a, t, c, g, other or unknown
  misc_feature (581)..(581): "n" may be a, t, c, g, other or unknown
  misc_feature (587)..(587): "n" may be a, t, c, g, other or unknown
gacggattgngaaactttattgataaagaattccgttccaaaggngtattccagtcacatttaccctacataaaataccaacatnttcttattgcaaaaacagaaactccggccgttgtattgatgctgacttaagagaaatagaagcctntatataaggcaagagtccataccagaagaattcgaccaatatgagatacctccaaaaaaatcaactcaataacctactttatatgtaagagacccaaaaaagtcagcttttgtgggaagttgatatgcagtttattgaacaaacagagtgtacagtaactaaacgaactgtgtatttccaaaggaattaagaccgcatatctggattcacacctaaaagcacatagaaaattaaaccaaagaagggcaagttttgactaaaatcacttgggcccangttattctataagaagattctcactggcatttgatagtaacttatcaccttttgngcgagcttgggaccagctgctcaggaactggttctgcttanngcgggatgcccaatgggcagcttaaagacttattggnaanttagaatagaagttntncccccngg

SEQ ID NO: 8774 - DNA, 613 bp, Homo sapiens
  misc_feature (492)..(492): "n" may be a, t, c, g, other or unknown
  misc_feature (502)..(502): "n" may be a, t, c, g, other or unknown
  misc_feature (522)..(522): "n" may be a, t, c, g, other or unknown
  misc_feature (545)..(545): "n" may be a, t, c, g, other or unknown
  misc_feature (556)..(556): "n" may be a, t, c, g, other or unknown
gtttgttttgttttgcagcagacaatatcattcagcttgtgctcagtttccctataagggtaagaaaagtttccatcaggtagccacttgtttttatactgaaagactaatctgctccaaaatgctcccaagtagaaatgacaggactcaaaatccctttctaaagcccaacagctaactttttctgactaatctctagcttcattgaaactggctaccaagattgcatttcaggctaacaattggcttcttagttaaggcatcacaactgaaaatggttatttcaacaatggatgctgtggatgaaggaataccaacaaacttctaagaactctcatcaaaaactaaagcaatttgctttgccccagtggcaggcagaaggaatttagcccattatctcacaaactaggaaaggatttttgaattctgaactagcagtctgcacttgtcacagtaactatatgtataagctggatcattttgatattcagngactttttgnagtttagaatatatatctgnagcatactttaatcatccttganatgtgggcttnctatttggaaaaatttttttatttttcccaagacccccggcccccccccttacctta

SEQ ID NO: 8775 - DNA, 444 bp, Homo sapiens
  misc_feature (406)..(406): "n" may be a, t, c, g, other or unknown
  misc_feature (418)..(418): "n" may be a, t, c, g, other or unknown
  misc_feature (428)..(428): "n" may be a, t, c, g, other or unknown
  misc_feature (430)..(431): "n" may be a, t, c, g, other or unknown
  misc_feature (436)..(436): "n" may be a, t, c, g, other or unknown
  misc_feature (444)..(444): "n" may be a, t, c, g, other or unknown
acagcatccagagtacttttattgccagaatccagatacagcctgctcagagccccatgtggggccactcaggaacaaggggagacagatgccaggcatgtatgcaacagagaaaatccagctgcacagaaaccctgtgggagagcagctcagtccagcctgaaggcgtctttgggaaccccacctagaggctgtacccttttctcggcctgtggccagtcacccacttagagcctactgccatgaaggcagccctgactctccatgcctgctgccacagggagatccatggagcaccctggggcagacagaaagcccctaggggggcctcaggggacccctggctctctcagggtcccattcaagtttctgggctagtcccagcactaagctgggtgctggccanggtggatagganccccatcctnanncctgngctgaccn

SEQ ID NO: 8776 - DNA, 547 bp, Homo sapiens
  misc_feature (442)..(442): "n" may be a, t, c, g, other or unknown
  misc_feature (509)..(509): "n" may be a, t, c, g, other or unknown
  misc_feature (515)..(515): "n" may be a, t, c, g, other or unknown
catatttcatttccattttattacatgttcacattatttcctgaaatcatcttagaaccttttgtttttgcaaaattttagaggtccaggccctgtgatagctatgtgatgttttttccagcacataaagcaaattcatgatgtgaaagaggcaaatgacaatagttaaagtatgtcttattttgtaataggatttttttaataaaaaattattgtggaacaaggtacattaaatttggcttgcaattaggaaatatgggagccggacttgaagagcgtgtgattgagtccccacatctaactgatgaggaaacaggctcagatgggtctattgatgggtccacttgctagaagcaaaactggaactagaaaccacgccctggcttctaggcagcaagcaatagttttgctaattttgttccccagcatcaaaacaaatgcncaaaatgggaaaagacaaatgggtatttagttgggtattttataaaccccatatttaaaacttaaantaagtncatgtaaagaactggccccaaccgatgaaggg

SEQ ID NO: 8777 - DNA, 546 bp, Homo sapiens
  misc_feature (441)..(441): "n" may be a, t, c, g, other or unknown
  misc_feature (498)..(498): "n" may be a, t, c, g, other or unknown
  misc_feature (521)..(521): "n" may be a, t, c, g, other or unknown
  misc_feature (527)..(527): "n" may be a, t, c, g, other or unknown
  misc_feature (533)..(533): "n" may be a, t, c, g, other or unknown
  misc_feature (546)..(546): "n" may be a, t, c, g, other or unknown
gaaaccaatgcattctttatcgcagactgaagcttaggggctcactcactgtgagctctgatttgggggcatctgtggctgcccacactttccaagacagacaagggcaaactctccaagcagaggagaaaacaacttccagaagctgccccttcaaaggcctgaggtgaggacctggggcagcaggcagcttggcatgcaggggttaaccagaaaggccgggtctggagggctgggcacacctaaccctcatctcctggtgactgcaggtcccactcccttcttcaggagtgccatgcagactctggaacaatctaacaggccaagtgtctcccagggtgggttagggaggaggctgaacacaggctcagatccctggaagtggcagggagagaactgagagaaacttcaccctctgctcggaggacatccccagcctangtccttgcttctcaaactctaaagtgcttataggaatcaacttgggggtctttgctnaaatgcagggtctgagtcgggangtatanggtganggctaaactttgn

SEQ ID NO: 8778 - DNA, 543 bp, Homo sapiens
  misc_feature (477)..(477): "n" may be a, t, c, g, other or unknown
  misc_feature (485)..(485): "n" may be a, t, c, g, other or unknown
  misc_feature (488)..(488): "n" may be a, t, c, g, other or unknown
  misc_feature (502)..(502): "n" may be a, t, c, g, other or unknown
  misc_feature (505)..(505): "n" may be a, t, c, g, other or unknown
gtttttttttgaaaaagagcctacagcacccccacccctacctcaccactccccaaaccagctcaagagttaaagccaggaagtggggcagactggggagaggaggcttgtgtggctccctctagtgttggttcactgctgtgcagcacacagcagtatctgggtcaatgaggacatggtcctagcctttctttctccaccaggaccctgacttatctggctggcccagcatggaggagaaggaaagcgggccgtgctgccggggggattcctggatccctctgcatgctgacagacagctgtccacagtgggtagccaaggtgactggcattttgatcccagctgaatgaagactggatttgaatgcagtgccagggctgttctgtagacaagagcgaacagtaccctgttcgctcccttctgcagtaccctgaggaaggagagaggcacccaaggcacgaatgcagacaacaganggactggncangctatcccgttttncanctgtttgtgccacaagccaccactccatactttatgtc

SEQ ID NO: 8779 - DNA, 546 bp, Homo sapiens
  misc_feature (509)..(509): "n" may be a, t, c, g, other or unknown
cattataaaatgtcaaacatgacccagtggggttgtgattagcaattagagaaaccccatcctaggtaataaaaagttttcccaaatagcacctatatgtctttctgactgtggtttaatgagtaattaagaccattcagccaagatttacatttgctgccacctttaatagcactgatgaaaagtagaacttttttttttgacttctttttcactgtgcctctaatcaagaaatttttgttaaaatattaagggtttttaatgtttaaagaatgagacataaaaaagttgcagaaaataaatgataaattcttatttattgaaagacattcagttgaggaatagggatataactgtttgttaggtaagcttatatggcacatgattaagttccactaattcgtatttctgcattatgctttctgataattccggagcattatactcatgcagcagtggtaggaaagtactgatgtttttttaaaaaatggtccattcttggccagccncatgggttacgcctgtaattccagcactttgggaggc

SEQ ID NO: 8780 - DNA, 531 bp, Homo sapiens
  misc_feature (109)..(109): "n" may be a, t, c, g, other or unknown
  misc_feature (130)..(130): "n" may be a, t, c, g, other or unknown
  misc_feature (132)..(132): "n" may be a, t, c, g, other or unknown
  misc_feature (330)..(330): "n" may be a, t, c, g, other or unknown
  misc_feature (473)..(473): "n" may be a, t, c, g, other or unknown
  misc_feature (497)..(497): "n" may be a, t, c, g, other or unknown
  misc_feature (499)..(499): "n" may be a, t, c, g, other or unknown
  misc_feature (509)..(509): "n" may be a, t, c, g, other or unknown
  misc_feature (519)..(519): "n" may be a, t, c, g, other or unknown
  misc_feature (531)..(531): "n" may be a, t, c, g, other or unknown
ccatctttatcggctgtataaacatctctggtctgtacatacatttcatacatcgtagggtgggaagcgagggccaaagggaggcccagcagcacaacagctcacccgntttccctacagccctacccgntntgtgcaaaccaaggccaacagctcctgctgcctcttcctccctggaaaagtcactgttacggggagggggccaggggttgaaggattagaaggagatagagggcttggtggggaggacacatgtaagtgctagaatcaaacactgaagcgaaacaggcaactggcacaagcagcaagctgaggcatgggacggggcangaaaaggggagggaggggccacgctgcccctctgggcttgctcagctaaggctctggggtcttgccctacgctggcagggaaacaggccccagagcctcaccccaatacccgggagctagggacatgggtggcactggtaaanaaaggttggaaggggaaaaaggantnaaggccctantggccctgtnacttaaagcccn

SEQ ID NO: 8781 - DNA, 538 bp, Homo sapiens
  misc_feature (443)..(443): "n" may be a, t, c, g, other or unknown
  misc_feature (473)..(473): "n" may be a, t, c, g, other or unknown
  misc_feature (493)..(493): "n" may be a, t, c, g, other or unknown
  misc_feature (506)..(506): "n" may be a, t, c, g, other or unknown
ctctatttaatgttttattttggaagaaagaattgcatgttcagggcatccatgtagaccagttggtcctcggtatgtcggaacaacacagagaaggctggaggttttatcaaaagaaatgtcagtattgctctttgagaaagtttattggcaccaggaagggtgttgggagctggcaagctacaactggtgagcaaccgggcaggcaaaattattcctagagcttcagcaagttctctcagcagttatggacaaagctggtcccagcttacagcacgcagtttcaccagctggatgtgcagagaattacattactagattaatgttatgtgcctgaggtgcttttatccctggcttcttgacttttgattgggtgtgataagaatgacttaatttggtgtaatccactttcacagcactgacatacttaagtatggactganggttgctgaattaaccggtgtgtacccgancccaagaaggcttaatgaantaggaattactgnttaagcctaagacctttattaaaattttgtcc

SEQ ID NO: 8782 - DNA, 532 bp, Homo sapiens
  misc_feature (466)..(466): "n" may be a, t, c, g, other or unknown
  misc_feature (485)..(485): "n" may be a, t, c, g, other or unknown
  misc_feature (494)..(494): "n" may be a, t, c, g, other or unknown
  misc_feature (497)..(497): "n" may be a, t, c, g, other or unknown
  misc_feature (518)..(518): "n" may be a, t, c, g, other or unknown
  misc_feature (531)..(531): "n" may be a, t, c, g, other or unknown
aaaaaaaaggttggaaaaattactttatgaagccttaagcactaagaataattaattaaactgtaatccaggattagatacaatttaataatagttcaattccaaaataaaagttattgtaggtaagaccatgaaatttcctaacgcttgattttaatacattgcgctaattttctaaaacaactcagaggaacccatatttacagtaggcagaatatttatgaaaaaaatctggcatcaggtatatttatatatatgtatgtgtgtgtatacgtatgtgtgtgtatatatatgtgtgtgtgtgtgtgtatcccgagattatatgaactaagaaacaagttgtgtatcttaacagcagtactagagcgcagagtttcagacttggatttataaatgctttcaacgtgtggtgtttggaaaaggagaagacatcatctgattttcaaaacctggaagtttttctcangactggaagtcaaaatcgnactgccccntangggaaaagggaaccttttccntaatggtcatctnc

SEQ ID NO: 8783 - DNA, 539 bp, Homo sapiens
  misc_feature (523)..(523): "n" may be a, t, c, g, other or unknown
aataatatgaatttaaaatagccacaaacagggtgagtgcatgtaagcggctgaactgccagtacaggggaaggtaaatgggcctaaactatgatacctagcaagggttggatctgtgcaggcttctatgtacagagacaagcagggttaggcacttaaagctttttgatgaaaatcctgggaaagagctgagcctacatttattattattactatcaaaacaacaacatacttttcatgaagaaacatgcaatcagaaacattacagagactgaagagagcttaagagttttctgaaaatgaaatgacatgtttttccagagtatcatctcaattataaaatttgatggttttatattatcatatttcttcagtggtaaatacctcattaaaaaattattaaaaaattattgacaatacaaagccctagttagtatacaaatattactatactggtcccatcttgtaagggaaatatcccatctagatatctaaatatcttctatcatccaatatcttaaanccaatttcttaaattg

SEQ ID NO: 8784 - DNA, 479 bp, Homo sapiens
  misc_feature (452)..(452): "n" may be a, t, c, g, other or unknown
  misc_feature (456)..(456): "n" may be a, t, c, g, other or unknown
  misc_feature (464)..(464): "n" may be a, t, c, g, other or unknown
  misc_feature (468)..(468): "n" may be a, t, c, g, other or unknown
  misc_feature (473)..(473): "n" may be a, t, c, g, other or unknown
  misc_feature (477)..(477): "n" may be a, t, c, g, other or unknown
  misc_feature (479)..(479): "n" may be a, t, c, g, other or unknown
ctaaccagtgaggaaaatgcagaggggcagtgggttcatgagaaatgttatcctttctacatgtagagagaaagctgggaggatcttgttagtagaggggaaaaaacaatcacacagatgaaaggataagcatcagaaaggagcagtatagaaaagagattaaatatgcactcttccatacaaattaggcatttagtacaggttctggcatatgggccagttctaatccctgatgaggcaagggccttagacaaagagcaggtggagctagccaaggtgaggaaaattccagacaatgatttgagacttcagctgttctatttcttctttcttttattgccaaatactgaaaggagactaagcaaggaagctggatatgaaatgtctaccttcttgacttacggttcatgttgtggtccttcctatttccaccttaaaattgacagggcctngctnaaatttgngctnccaangatncn

SEQ ID NO: 8785 - DNA, 555 bp, Homo sapiens
  misc_feature (499)..(499): "n" may be a, t, c, g, other or unknown
  misc_feature (510)..(510): "n" may be a, t, c, g, other or unknown
  misc_feature (512)..(512): "n" may be a, t, c, g, other or unknown
  misc_feature (515)..(515): "n" may be a, t, c, g, other or unknown
  misc_feature (539)..(539): "n" may be a, t, c, g, other or unknown
atatacagaagctaatgtttattgaacgtaacagtatatttcatgtagtttcccataattttttcatgtactaactcatgtaattctttgttttttagagatctgaagtgattttacctttacttccttcactttaagccaatcatgaaatttcagtgatttctggggtgagggcgaaaggtggtgttacgaatcatcggggctgtggcccagttgcctcacggaggtgcaggtaggctggggcctcactagggcagctggaggagcacggactgccctgccggcaggcaggtgatgttccgagagcatgagagctggtatgcaatgtcttctgcagcttccagcttgcacagctcgctctggccgtcccctgcagtggccagtgagttggcgatcagctcagctgccttggagtcaccctcagcagagatgatggccgccttttccaccacaaatctggcgctctctgcttcctggggggccacctgtctggtaactnctttcaagaangncanatgtgtcaaaaacacgttgtccanaatgagccccaaaggg

SEQ ID NO: 8786 - DNA, 543 bp, Homo sapiens
  misc_feature (479)..(479): "n" may be a, t, c, g, other or unknown
  misc_feature (516)..(516): "n" may be a, t, c, g, other or unknown
  misc_feature (537)..(537): "n" may be a, t, c, g, other or unknown
gcattgttaaaatgtttctccatggtgcttttaatgaagtatatgcaactagtttaacagcatgacaattgttattccaagacatcctcagtaacttttgaaatagcaaatttaaattttaacatgttcttatatttaacatgtttgatattttcttctagaatatcatagcaaataaatattcaacatacaccaaaagtacttaaaagaagctcctttcctttggacatcaacttttaaaaacacgaacaactttttgaaagacagaatttacaaatacagaactgtactgacttaaatttggaatttactaattactggggatactttagtgagtctgcatatgtgtattattaatacatgttaaaccatactgcagataacaaaaaatatacttacatttctcttccagagagtaatgactgtattcaaagtctgagggaatgacaaaacgggatgcacatctaacactgatcccngttcttcagaaaagactagtttcagctggttccaggnttacataagatgatggaagcngtcttt

SEQ ID NO: 8787 - DNA, 532 bp, Homo sapiens
  misc_feature (38)..(38): "n" may be a, t, c, g, other or unknown
  misc_feature (125)..(125): "n" may be a, t, c, g, other or unknown
  misc_feature (139)..(139): "n" may be a, t, c, g, other or unknown
  misc_feature (156)..(156): "n" may be a, t, c, g, other or unknown
  misc_feature (174)..(174): "n" may be a, t, c, g, other or unknown
  misc_feature (299)..(299): "n" may be a, t, c, g, other or unknown
  misc_feature (321)..(321): "n" may be a, t, c, g, other or unknown
  misc_feature (458)..(458): "n" may be a, t, c, g, other or unknown
  misc_feature (484)..(484): "n" may be a, t, c, g, other or unknown
  misc_feature (486)..(486): "n" may be a, t, c, g, other or unknown
  misc_feature (496)..(496): "n" may be a, t, c, g, other or unknown
  misc_feature (532)..(532): "n" may be a, t, c, g, other or unknown
cttcttttgttctttttgcctttgttgttctttaactngttctctctcaatatccatgaaaagtcgtctatgtctcaggtactgcttttgacgctctttcttatcttcttctttatccacgtcanactgaaatgccagnggagcttggaattcagngctcaatcctgattgatncctatcataagccaatggcactccaggagtatttcctcttgcaatctcccatttctcaaaagatgagggtagtttgatatgcttgttctgttctctaggggagtcttggtcctggattttaggtncaacatattgatgatagtccanaggcaattcctctctcactctttcttctctcataaaagatgcaggttgctgatttttgatgtcatcctggtcctgggatttgggaggcaaacactgatagtctgccagagaaaagcttctctccctttctcatctgncatatcagagtatggctccttaaagngnactttctganattttggtagaaaatcttgggcctgacatttgggan

SEQ ID NO: 8788 - DNA, 553 bp, Homo sapiens
  misc_feature (428)..(428): "n" may be a, t, c, g, other or unknown
  misc_feature (478)..(478): "n" may be a, t, c, g, other or unknown
  misc_feature (524)..(524): "n" may be a, t, c, g, other or unknown
  misc_feature (527)..(527): "n" may be a, t, c, g, other or unknown
  misc_feature (531)..(531): "n" may be a, t, c, g, other or unknown
  misc_feature (545)..(545): "n" may be a, t, c, g, other or unknown
  misc_feature (551)..(551): "n" may be a, t, c, g, other or unknown
  misc_feature (553)..(553): "n" may be a, t, c, g, other or unknown
ccaggagcagttaggtacacacagtaaagtttattttggtgcatggtatacttcactccattaaaaataaattaatcagcaaattcctgcctggctcagctctggtttatgtaaatagtgcccagctgtaatgagttacaaggtgttattatctcacacacacacaggaggcttcactctagagctccgctcgcaacaaaagcatcttaaataaactgagagaagcggtttgatttgtaatgttttcacagaagtgggatatacctcacccatatagagtttctttatatgactcattttatagcaagttaaatgaaggaagtttgatgggggagggaggggcaatatggttccccaccccctttcttcactttaagaaaatcccccaagagatgacccgcactgagggaggaggggctggtcctcangtgctcagaccaaggtggctctgcagcaccgtgcttcagaagttgggaangggggaccaaagcttgggccccaggtcttgggctggttacactaanccnggangaatgttctttttntccccngn

SEQ ID NO: 8789 - DNA, 536 bp, Homo sapiens
  misc_feature (6)..(6): "n" may be a, t, c, g, other or unknown
  misc_feature (28)..(28): "n" may be a, t, c, g, other or unknown
  misc_feature (36)..(36): "n" may be a, t, c, g, other or unknown
  misc_feature (40)..(40): "n" may be a, t, c, g, other or unknown
  misc_feature (57)..(57): "n" may be a, t, c, g, other or unknown
  misc_feature (70)..(70): "n" may be a, t, c, g, other or unknown
  misc_feature (157)..(157): "n" may be a, t, c, g, other or unknown
  misc_feature (161)..(161): "n" may be a, t, c, g, other or unknown
  misc_feature (165)..(165): "n" may be a, t, c, g, other or unknown
  misc_feature (171)..(171): "n" may be a, t, c, g, other or unknown
  misc_feature (173)..(173): "n" may be a, t, c, g, other or unknown
  misc_feature (278)..(278): "n" may be a, t, c, g, other or unknown
  misc_feature (290)..(290): "n" may be a, t, c, g, other or unknown
  misc_feature (398)..(398): "n" may be a, t, c, g, other or unknown
  misc_feature (441)..(441): "n" may be a, t, c, g, other or unknown
  misc_feature (443)..(443): "n" may be a, t, c, g, other or unknown
  misc_feature (487)..(487): "n" may be a, t, c, g, other or unknown
  misc_feature (493)..(493): "n" may be a, t, c, g, other or unknown
  misc_feature (505)..(505): "n" may be a, t, c, g, other or unknown
  misc_feature (519)..(519): "n" may be a, t, c, g, other or unknown
  misc_feature (526)..(526): "n" may be a, t, c, g, other or unknown
ctctgngatttggttttctactttggtncacatganctgnggctgcatctcatacanaagctgacacatntcgcaggaatgccccataaaacagagcgcaaacaaatcacccagcaggttcgcttcacctggctgttactgctgaactccctacttntaanagcncagaananaacatcgctttgaatctacagataagcgagggtggggcgagcagcagccagggctgccgggatgggagcggccacagacacaggcccccgggtgtctgtcttganatacaggtgganaagccgcccaagaaattccagcaagatgggagcagctgggggatgctccagcacagtagcctgcctacaggactcctctggctccctcagtcctggtagattctggcntgacaccaaggccagcagtgctggctcttggccctgtcactgngnctggtttatcctggggccccaaaagccccttttttgggcaggancttcgnccttcccttttnataacccccttggnccccaanaaaaccccag

SEQ ID NO: 8790 - DNA, 475 bp, Homo sapiens
  misc_feature (413)..(413): "n" may be a, t, c, g, other or unknown
  misc_feature (417)..(417): "n" may be a, t, c, g, other or unknown
  misc_feature (435)..(435): "n" may be a, t, c, g, other or unknown
  misc_feature (438)..(438): "n" may be a, t, c, g, other or unknown
  misc_feature (462)..(462): "n" may be a, t, c, g, other or unknown
  misc_feature (469)..(469): "n" may be a, t, c, g, other or unknown
  misc_feature (475)..(475): "n" may be a, t, c, g, other or unknown
caactacaaaaaaaaaattttttattaagtgtgaaagcaaaacaggtccatctatttaaatattttttacatatttatagatacaacaaagacaaataacttagcaaaaattacaagtttaaagaatagtactattttgaaacagccaatatagtatctgaaaatattccattttatccataatcagtgagtattatttccaaaaaaagtaacttgcattttcttgtgaaaaatatggttttttttttagatgtctgccaagatttatcagaaaagtccatctttctaaacctaaaaaattgtaatgcctttattgagaactttttttacctaatggctttaaaaaccacgtgttttcctttggacttaggtgaattctaaatctttacttcactttcaaactacagggcatngacntaaacaaaaacaaatcanatngagagttttgggttgcttttcttnatactgngcgaan

SEQ ID NO: 8791 - DNA, 542 bp, Homo sapiens
  misc_feature (304)..(304): "n" may be a, t, c, g, other or unknown
  misc_feature (487)..(487): "n" may be a, t, c, g, other or unknown
  misc_feature (501)..(501): "n" may be a, t, c, g, other or unknown
  misc_feature (506)..(506): "n" may be a, t, c, g, other or unknown
  misc_feature (531)..(531): "n" may be a, t, c, g, other or unknown
  misc_feature (542)..(542): "n" may be a, t, c, g, other or unknown
ctactcaaactataagcttttattattgtattttacagatcattcattcaggacatgctgcatctggggttggcatcatttcccttttgaatgacagaatgtgcataaaagtctcttgcccacgctgaactcacacgtgcccggcaggaaggagctctcacgaagtgccagctggatgtgagcttgctctggcagcagcagtgctgtccttgtttctgagctgccacctattcactggagttaggtgggtcaaagctgaaatttagcttggaatttaagtttctaattttatacttttcattgnggtctggtcagattttagtctgcttcaaaatcaaaaggtcactcagtcactctaatatgatcattttgaatatggaaatttgttatttacatgctgtacctcaaatcaaagaaaaagcacgcgtcaatatcacgcgtaggaaaaactagaaaattgttccttttccatttgccccctggttangtttcctcataacnggtcngcttggaaaccagacttcccctttnaacagatgccn

SEQ ID NO: 8792 - DNA, 552 bp, Homo sapiens
  misc_feature (402)..(402): "n" may be a, t, c, g, other or unknown
  misc_feature (446)..(446): "n" may be a, t, c, g, other or unknown
  misc_feature (509)..(509): "n" may be a, t, c, g, other or unknown
  misc_feature (514)..(514): "n" may be a, t, c, g, other or unknown
  misc_feature (552)..(552): "n" may be a, t, c, g, other or unknown
caatctttacaattttattgtaaatcatagtgtgagatacagctgcaaatatagggaagtaagttcacaaactgttattttctaaagctaaagctaacattaggccttgctatggtagaactcttcactgggttgtttcttaaaaaaaattcacgcaactgacaggaggaattgtctttattcttgcattaatgataaatgtaatctacaagatggccttcatggattagaaaaaggaatcagaccacaaggaaaaagaaattgctggttttcactcaagatttatctagaaaagtgtactgactactggaataatagtttacccctgggttgtaccacagaatgagaaattctacaagattatacaactctttttctacaagattacactactcatattgnttttattccattccggaattagaaattaactttctaaatatcgntttttttctccaaaaaaatccttttaccagctaacctgggatatggccaaaaatatcttgatnctggnaaagggctatctccctagtaaaaaatggaataaattgn

SEQ ID NO: 8793 - DNA, 551 bp, Homo sapiens
  misc_feature (468)..(468): "n" may be a, t, c, g, other or unknown
  misc_feature (516)..(516): "n" may be a, t, c, g, other or unknown
  misc_feature (539)..(540): "n" may be a, t, c, g, other or unknown
  misc_feature (547)..(547): "n" may be a, t, c, g, other or unknown
aaaaccagaatgaaattttattgtgtaaagtttatagaagtatgactagtattcctttgtacaaagtacacaacggttttaaatataactgagagaaatgtgagtcctatgacaacatctgatacacgctgaaccatttacagacacactaaaaatgttttaaaatatcttctttctccaaagagtccattgcgcatttcttagagtagagatggggacacattccaggcaaggtcacaatggcattttgttgccctcaatgctgattttcactgcgtgtgcagatctgctttttttccttatatctgtgaactttctcatctgtttatccagtcgactgatacccttcttggaggtcgcctgaaacctggatgactccatttccacattccatttgggcctgacaacatagtccttgtttgaaggcattgggacccttgcacgggcacagaatccaaggatctccangtcttaaaacccttcttcctttcttgtaacaccctttttcaagggctnttctggggggtctgaccccccanngctgttnattt

SEQ ID NO: 8794 - DNA, 553 bp, Homo sapiens
  misc_feature (519)..(519): "n" may be a, t, c, g, other or unknown
gcaaaacaatcagaaaacatttattatactgaaatgtgtacatcctactattaaaaaaacaaagtaacaaatttgctggtgccaaaatttatttagcctgtttcactgggacaaactcacgttcaatgccactcagtataatttcaagtctgataagcatctaagtatttttaccccgcttctaaaacctgatgaggaattcaaaataagcacacagcattaaatgacatttattgttccataaatcttgagacccaaaaaggaatgctaaatagacaagcaaaacttttaaaacaaacgagataaactcacttctttccccagtgactggtacagaaaacatgtggtcacacgaaagcaaagggaaaaagtcagaaaggaaaactctctgcctataggatctataggagttacagatattttcaaatcgatgatgaaaatagatcgtgcttctttgtagcaaataattaaccccctttatgaataaaacataaaatgtcaaaagcttttactcactgnagtagttggctttttgggagaagatttcaactcc

SEQ ID NO: 8795 - DNA, 566 bp, Homo sapiens
  misc_feature (496)..(496): "n" may be a, t, c, g, other or unknown
  misc_feature (530)..(530): "n" may be a, t, c, g, other or unknown
  misc_feature (535)..(535): "n" may be a, t, c, g, other or unknown
aattttgttcatttttattaacataggacatactaaccaaatattatcatttaataaaatcaacgttacaaagaaactcactagcaaataaacaaacgatattcacttgactcttctcttggttgaatgattttctattaattagtagtacacagctatttttatcaatttatgcttaaactgccttatgatttcaatgaaatttcttagcttttacttgttgaataattttttcaattgggaatcttttcataattcaaaatagttcctgaaaattaatgcatccttcaatgtcttctacttaagctgggtgcatttaaaatgcaacacaattctttgaaaggagactatgacatttgagcataaagcctataagaaaaagaaatgtcttccctccccccatgcttcacagagactatatgaatgttccatactcttcatatttagcaacaggagttccttagagatcaaacagcagaaaacaggaggaacttangccatcaatggacttgtaaaacagataaactccnaatgnattttaagattccatcttcttcacagatgaa

SEQ ID NO: 8796 - DNA, 545 bp, Homo sapiens
  misc_feature (1)..(545): "n" may be a, t, c, g, other or unknown
nnnnnnnnnnnnnnnnnnnnnnnnnnnnnnnnnnnnnnnnnnnnnnnnnnnnnnnnnnnnnnnnnnnnnnnnnnnnnnnnnnnnnnnnnnnnnnnnnnnnnnnnnnnnnnnnnnnnnnnnnnnnnnnnnnnnnnnnnnnnnnnnnnnnnnnnnnnnnnnnnnnnnnnnnnnnnnnnnnnnnnnnnnnnnnnnnnnnnnnnnnnnnnnnnnnnnnnnnnnnnnnnnnnnnnnnnnnnnnnnnnnnnnnnnnnnnnnnnnnnnnnnnnnnnnnnnnnnnnnnnnnnnnnnnnnnnnnnnnnnnnnnnnnnnnnnnnnnnnnnnnnnnnnnnnnnnnnnnnnnnnnnnnnnnnnnnnnnnnnnnnnnnnnnnnnnnnnnnnnnnnnnnnnnnnnnnnnnnnnnnnnnnnnnnnnnnnnnnnnnnnnnnnnnnnnnnnnnnnnnnnnnnnnnnnnnnnnnnnnnnnnnnnnnnnnnnnnnnnnnnnnnnnnnnnnnnnnnnnnnnnnnnnnnnnnnnnnnnnnnnnnnnnnnnnnnnnnnnnnnnnnnn

SEQ ID NO: 8797 - DNA, 481 bp, Homo sapiens
  misc_feature (450)..(450): "n" may be a, t, c, g, other or unknown
  misc_feature (457)..(457): "n" may be a, t, c, g, other or unknown
  misc_feature (459)..(459): "n" may be a, t, c, g, other or unknown
  misc_feature (461)..(461): "n" may be a, t, c, g, other or unknown
  misc_feature (469)..(469): "n" may be a, t, c, g, other or unknown
  misc_feature (472)..(472): "n" may be a, t, c, g, other or unknown
  misc_feature (480)..(480): "n" may be a, t, c, g, other or unknown
cactacagacagaatatcttattttattgtgtcgcataatcctttcctaaaaaaaaaacactgcttctccccagttacaagagactaaaagcatactaaaaacactttatcgtcattactaaatgcattaaatacacatcctaaatggaatatgctgtatatccgatgaaatacatagaacgttcatcaaggcaaaagaaaagacgtagccaacaatggaaagatggcacacacaagaaaaaaaaagaacagttctcaaatattgcagtaacttttcaatgtatcatagatattctatgacttttctatgaaacagaggaggaccaaacattatacacagtttgaagagactaaatgccagagaatctacagatattagcatccaggaataatttttattcctggcccattttctgcccactggaaaaaattgcattgtttttccttccnaagaggncncncaaaaaanttntttccatng

SEQ ID NO: 8798 - DNA, 554 bp, Homo sapiens
  misc_feature (9)..(9): "n" may be a, t, c, g, other or unknown
  misc_feature (175)..(175): "n" may be a, t, c, g, other or unknown
  misc_feature (180)..(180): "n" may be a, t, c, g, other or unknown
  misc_feature (325)..(325): "n" may be a, t, c, g, other or unknown
  misc_feature (531)..(531): "n" may be a, t, c, g, other or unknown
gaggttcanaaatgcatatattttttacttacaaatattcatctgaccaaaattcaacataacctttatggaacacttaacaattgttttgtttttaaaataacatttcattcaaactgtatataattcagtaaagttttttatacagcaagcaatgcttaaaccctggaaaatntgtanaaaagagattttcacacaaaataagaaaagaaaaatctgaggtatccctcacacacacacatccattcattctggcccatgtacgtgcacatacacacgcatgcctgtgtgttcacacagacatattcattctcactcacaaagnggctgcagcataggcaaaaattgtaggtccaaaggaaaatgattgattgttctaataaagagtccgagtagctcagaaaaaaaaaccaaaacaaaacacaagagtcttctgaggaaattactacctcaaaaaaatgttctcaagatgaatttgagatctaagcctactaaactgcttttgcaaaacagcttcctgcagtccaaggngacttgggcaaatagaaaggaat

SEQ ID NO: 8799 - DNA, 569 bp, Homo sapiens
  misc_feature (557)..(557): "n" may be a, t, c, g, other or unknown
atgaacttcttttattcaaatatattttcacacatcttatctaaatacataacacagaagcctgtgtgacttgggcaacgtggtccaggagggcctgagactaacacatccacctcggcaaaaggacatcaaatatctcttacagtcggaacaaacagccttttgtgtatttccttagtttacgaaatatactcgaaatgctattattagctgaatttgtggtttccttttgagtttctgagttattcttatttatttttcccattttgtttttgcaccaaggagaccggagtcaaataatactcagcgactgatttcctctctttggactgaaaaattaaacagatactaaatgatgacagtgaatttagagagggctccaagggcttgaaagaacatgtctgggataatatggtgcttctaagagtattgcaatcacatcgtggcaatcaccggcgcgtgccgcgtgactacctcctcggctaatatgctttcttctcggcgatgactaatcacgttctattaaacagcagtaatgcgggaagaactcggctgtncaagtgtaaagg

SEQ ID NO: 8800 - DNA, 561 bp, Homo sapiens
  misc_feature (504)..(504): "n" may be a, t, c, g, other or unknown
  misc_feature (550)..(550): "n" may be a, t, c, g, other or unknown
  misc_feature (556)..(556): "n" may be a, t, c, g, other or unknown
  misc_feature (561)..(561): "n" may be a, t, c, g, other or unknown
agcaaaacaaaactgttttatttatcaaagacaatgaaaaaattagaaaatacagaagaggttataaagcataataaattttattttttggaaatggaaaaatgtccctgaatagttagatgtaccttttagtagtaatgtctaataataaataagaaatcaattttataaggtccatatagctgtattaaataatttttaagtttaaaagataaaataccatcattttaaatgttggtattcaaaaccaaagatataaccgaaaggaaaaacagatgagacataaaatgatttgcaagatgggaaatatagtagtttatgaatgtaaattaaattccagttataatagtggctacacactctcactacacacacagaccccacagtcctatatgccacaaacacatttccataacttgaaaatgagtatttgcatatctcagttcaggatatgttttttacaagttaatcctaaagtcttaagccaggaagcttttcttagtncaggattttattggctaagctttacaaattaacccttaaaaaattnttccanggtcn

SEQ ID NO: 8801 - DNA, 376 bp, Homo sapiens
  misc_feature (70)..(70): "n" may be a, t, c, g, other or unknown
  misc_feature (93)..(93): "n" may be a, t, c, g, other or unknown
  misc_feature (186)..(186): "n" may be a, t, c, g, other or unknown
  misc_feature (194)..(194): "n" may be a, t, c, g, other or unknown
  misc_feature (209)..(209): "n" may be a, t, c, g, other or unknown
  misc_feature (228)..(228): "n" may be a, t, c, g, other or unknown
  misc_feature (254)..(254): "n" may be a, t, c, g, other or unknown
  misc_feature (257)..(257): "n" may be a, t, c, g, other or unknown
  misc_feature (310)..(310): "n" may be a, t, c, g, other or unknown
  misc_feature (319)..(319): "n" may be a, t, c, g, other or unknown
  misc_feature (330)..(330): "n" may be a, t, c, g, other or unknown
  misc_feature (367)..(367): "n" may be a, t, c, g, other or unknown
  misc_feature (374)..(376): "n" may be a, t, c, g, other or unknown
caataaatacatgctgatttattacagggataagatggtttcttgggggatagattcaagaggagttganaatgttttattcatttacaatgnccctttcctggaagggtggacagcaagatttaggacaagctaaaatcatcccctatttaaaaaaaaaaaaaaaaaaaagtcaccagcaagtantcccgggngggaggtgggagcanaataaaaaaaaatctgcantgattcctaattgtttttcaatacanaancttgggaaggggtttctgccagtttcatgaggaaggcccaacttccaggtagngttggggangggtatgaggncctatgcaggctggcctcttatcccacagatgccaanatgatgnnn

SEQ ID NO: 8802 - DNA, 567 bp, Homo sapiens
  misc_feature (145)..(145): "n" may be a, t, c, g, other or unknown
  misc_feature (516)..(516): "n" may be a, t, c, g, other or unknown
  misc_feature (564)..(564): "n" may be a, t, c, g, other or unknown
catgtcatactaaatatttattttctgcagactgacttcggagtaattcttgagccaggaggggagaggttagtgttcaaattgctgagatcttaggtcaaaaagctacagaaaagaaatcactttgaaaaacacaatgactcanaggcagtcaccccttgccagcaattccaagagctgaggaggcttcatgcctcaggacatggtgactagttgagtgaaccagagattgaggcagtggtttttacaggggaagaaacaagccttgggtgtatgggagcaggaaaggagggtgacagactggagaaatgataaaggccattttggaagcccacagggaagtggtcttgggaaacctgaagacactgggatattcagaaggccaaggggatccagcttatcctgttgggcaaggtgctgggagtgaaggcaggtaagccatgtcaagggcctgggaagcaaggggaaaactggaaggggtaccccaggtgaagaagggtatggaatggggtgcanaagtccatggagatgaccggcagatctcaggccggtttttggcacatnaaa

SEQ ID NO: 8803 - DNA, 558 bp, Homo sapiens
  misc_feature (466)..(466): "n" may be a, t, c, g, other or unknown
  misc_feature (480)..(480): "n" may be a, t, c, g, other or unknown
  misc_feature (493)..(493): "n" may be a, t, c, g, other or unknown
  misc_feature (531)..(531): "n" may be a, t, c, g, other or unknown
  misc_feature (542)..(542): "n" may be a, t, c, g, other or unknown
  misc_feature (558)..(558): "n" may be a, t, c, g, other or unknown
atttttccagaatgcctttattttcagtatcatagaatttaaatacagagtcaaaagatgatttataaaatataaaacattttctgcttggccgtatttgaagacaagctgaatacatatctatgttctgaataagtccactatggatatatataggaagagatatacatatatccatccacagatacacacacacatatatatttctgcatgtatatatacataattctttctatagttacaggaaatacttcttctataattctgattttgactcccatcctccaccatttactcatccactcattacctaaatcttggctttctttcctatattgtaaataatccatccaaacttctagccagtactgtcaggagggttcttgctcgagtgagctgttaatactattttccactgacaacttctgcacatcgagggacacagtgtatctgaagactccgctgnatacttccacaacngggggcattttcntttgtagtcggcatggacaatacttataggaagaactnttacgaattcncccctttaagtggggn

SEQ ID NO: 8804 - DNA, 503 bp, Homo sapiens
  misc_feature (2)..(2): "n" may be a, t, c, g, other or unknown
  misc_feature (19)..(19): "n" may be a, t, c, g, other or unknown
  misc_feature (25)..(25): "n" may be a, t, c, g, other or unknown
  misc_feature (74)..(74): "n" may be a, t, c, g, other or unknown
  misc_feature (105)..(105): "n" may be a, t, c, g, other or unknown
  misc_feature (213)..(213): "n" may be a, t, c, g, other or unknown
  misc_feature (240)..(240): "n" may be a, t, c, g, other or unknown
  misc_feature (285)..(285): "n" may be a, t, c, g, other or unknown
  misc_feature (304)..(304): "n" may be a, t, c, g, other or unknown
  misc_feature (311)..(311): "n" may be a, t, c, g, other or unknown
  misc_feature (353)..(353): "n" may be a, t, c, g, other or unknown
  misc_feature (386)..(386): "n" may be a, t, c, g, other or unknown
  misc_feature (406)..(406): "n" may be a, t, c, g, other or unknown
  misc_feature (409)..(409): "n" may be a, t, c, g, other or unknown
  misc_feature (460)..(460): "n" may be a, t, c, g, other or unknown
  misc_feature (466)..(466): "n" may be a, t, c, g, other or unknown
  misc_feature (480)..(480): "n" may be a, t, c, g, other or unknown
  misc_feature (485)..(485): "n" may be a, t, c, g, other or unknown
  misc_feature (491)..(491): "n" may be a, t, c, g, other or unknown
gngtgtgtgtgtgttttgnttttgntctgtttttaataacaacagtaggacccaaactaaaaagtcggttcatnttcaaaccaacaagagcactagaggacttgngactcagtaccttcatataacaccacataaataactttagccacagtcaatgttcacagcctggtcagtggaacaaaggaaatacttttctggcgattagacgtcatntgcagagagagctgggatattcatccnaggccgggtgaaaaatgccatcttctccctgaaagactgaacttntgggggttccttacagctntggcctnggagcctgtgcacatccttggcagctgccctcatcatcttgnctgtctgaagctcacccttgtgctccgctcggnccatccgcttctccagcatnctnagcagcaggcggaaacgctcgtcctacgcaaccactgtggcaagcttcttntcccgnggctcttggcttgntccanctggtncttgagcttctt

SEQ ID NO: 8805 - DNA, 562 bp, Homo sapiens
  misc_feature (462)..(462): "n" may be a, t, c, g, other or unknown
  misc_feature (541)..(541): "n" may be a, t, c, g, other or unknown
  misc_feature (543)..(543): "n" may be a, t, c, g, other or unknown
ccttgcaactaatggaatgctctacaaagttgagggtcagagggggaacaattatatagaaatttcggagatgtatattctttggccttcgaaattctggagcaaaaacgtctacaagcattttgaaatattctgtgccttcggcagaatttcgtgtgtgatcactgaggactgaatccaaatgccttgctgcttttaatgtttcttctgcaagaccttcttcttttactagttcttcaaaatttacaatatcttcaagatcaggaacaaatctaatggcattgctgctacaatgaagaccaccagatcttatcattcgtacatagcccatagcattaccaatctggctgatgagttgcctgaattgatcaaggtagctctgtccctcaggtgttattccaagttttctgatgcctcgattgaatttttctgctctatcaaaaggatacttatgatcatttnggccttaatttccctgaaaaatcgaatatctttaatcaatctggatttgatgggtcatcatacataaattggctaaatntntagaacttctttttcaaaa

SEQ ID NO: 8806 - DNA, 523 bp, Homo sapiens
  misc_feature (127)..(127): "n" may be a, t, c, g, other or unknown
  misc_feature (135)..(135): "n" may be a, t, c, g, other or unknown
  misc_feature (176)..(176): "n" may be a, t, c, g, other or unknown
  misc_feature (194)..(194): "n" may be a, t, c, g, other or unknown
  misc_feature (216)..(216): "n" may be a, t, c, g, other or unknown
  misc_feature (242)..(242): "n" may be a, t, c, g, other or unknown
  misc_feature (313)..(313): "n" may be a, t, c, g, other or unknown
  misc_feature (318)..(318): "n" may be a, t, c, g, other or unknown
  misc_feature (320)..(320): "n" may be a, t, c, g, other or unknown
  misc_feature (329)..(329): "n" may be a, t, c, g, other or unknown
  misc_feature (332)..(332): "n" may be a, t, c, g, other or unknown
  misc_feature (344)..(344): "n" may be a, t, c, g, other or unknown
  misc_feature (356)..(356): "n" may be a, t, c, g, other or unknown
  misc_feature (502)..(502): "n" may be a, t, c, g, other or unknown
  misc_feature (505)..(505): "n" may be a, t, c, g, other or unknown
  misc_feature (508)..(508): "n" may be a, t, c, g, other or unknown
  misc_feature (519)..(519): "n" may be a, t, c, g, other or unknown
  misc_feature (523)..(523): "n" may be a, t, c, g, other or unknown
ggggaagcacaagctttattggctgaaagttcttctcaggagcctggtctgctgggactgcatgttcctggatgggctcccccaggcctaagctccaggtttcctctggccttccgaaggattttgngggttacnaccaactgatcaaagatgactttttcctggcgcttgctcanctgcaaaagcttcatggngttttgcaacctcttttcttgntcaaacaattttttatgtagtttggngacctctgccttcatttctccaatctgctcacagtgaagggggcactggccatcctcggggagtgagactntccananaagcttcanccncctgtaggcctnttccagggtcancttggccgtgctcacactgctcacaaacttgctcagtggtgctgggtgtggaccctttgttcccagctcttgacttgtggagctgggagcctcttgggtttgaatgccatttcagcaaggacctttgccctggctgaactgtttancanggnctataagcccnaaan

SEQ ID NO: 8807 - DNA, 559 bp, Homo sapiens
  misc_feature (443)..(443): "n" may be a, t, c, g, other or unknown
  misc_feature (488)..(488): "n" may be a, t, c, g, other or unknown
  misc_feature (500)..(500): "n" may be a, t, c, g, other or unknown
  misc_feature (519)..(519): "n" may be a, t, c, g, other or unknown
  misc_feature (541)..(541): "n" may be a, t, c, g, other or unknown
  misc_feature (544)..(544): "n" may be a, t, c, g, other or unknown
  misc_feature (548)..(548): "n" may be a, t, c, g, other or unknown
accaaaagaaatctttattcttcagcaggtagacaacatctgccagccctggtcctcagggccacactcatatgcactcacccctcagcagcatatcgccccttttctgacatataaatgcaagagacccaggaccctagatctttcttcaaacgcaagtgtctcacacacacttattttacaaatccactagaaatatggactcttatgttctttgtacagccatgcaacagaggcctagcatttgtgctgtgtctgtgggaaaggcagtcagagaccagtggtttccctgctttggggaagatggctcaacagttagtaatcccaggttagattgtcagaacagtctaggccaggactgagggctcagctgccagggctccccaacagaaaccactcccctctggctgacactgcttccttgcgcaccagtctcttcttgncatccaggggtttggctaaggcccgaatcacctgtggtttgtacngcagcagcacangggtgggcaggcgaatganaacatgcatgcactgcaatgcnggngaanccggacaagcc

SEQ ID NO: 8808 - DNA, 401 bp, Homo sapiens
  misc_feature (185)..(185): "n" may be a, t, c, g, other or unknown
  misc_feature (292)..(292): "n" may be a, t, c, g, other or unknown
  misc_feature (318)..(318): "n" may be a, t, c, g, other or unknown
  misc_feature (320)..(320): "n" may be a, t, c, g, other or unknown
  misc_feature (345)..(346): "n" may be a, t, c, g, other or unknown
  misc_feature (357)..(357): "n" may be a, t, c, g, other or unknown
  misc_feature (397)..(398): "n" may be a, t, c, g, other or unknown
gtcttttaaaaacatcgtaacattaacacatggccgttcaccgtcccccagcgatgggagctggcctggggcccagggtcctccaggatcttcactcattcacagtaacggttctgaccagtcctccaggtcgcacgtggatgcgacaggggtggggagggaggaggaagtgactgtcccacctntgcaggaccatgggagtgggcaaggtgttctccggggcgcacccctgaacccaggggtgctgcaggacttgggcggcactcagcctctgcttggcgtcacggaccancagcttggagatgaggtctttggcancncaggagatgtgggcccagtccttgnnggggaactcgnacttgccctcctggatgctcttaaacagcatgttctggcnngca

SEQ ID NO: 8809 - DNA, 554 bp, Homo sapiens
cccaaatcattatattcttttatttatagactctgagagcaaggacccaagcacagcctggtgctcttggatagagaagaaagcagctattgtccacactcagaggttgctgaggtgccctcccccactgatctggaatgatctacactgctagtgaagaggagggatggcaagctgactaaataagaaggcagggaaagaaagtccgctttagttctgagggctgtgacattagatgagagtggagccctgggcatgtcagccagccttctgtgtaacgcccgcccaggtcccattgtgtctgttctctcggtcctccactgttgcccacatcttcctccaggctgcttaagtgcccctcctggagtgcatgagtaggtcgcgttgcagcccagcctccaggctggaggtcagtctggctgtgggagggtcggtcggcagagtcaatttgttgaaaacacctctgccaaagtagtcagcaatcacagaaaactgcattggagcacctgagctgatgctggaattgatcatggaaactcgttctggttcctggg

SEQ ID NO: 8810 - DNA, 580 bp, Homo sapiens
  misc_feature (487)..(487): "n" may be a, t, c, g, other or unknown
  misc_feature (513)..(513): "n" may be a, t, c, g, other or unknown
  misc_feature (560)..(560): "n" may be a, t, c, g, other or unknown
  misc_feature (564)..(564): "n" may be a, t, c, g, other or unknown
  misc_feature (579)..(579): "n" may be a, t, c, g, other or unknown
gcagatcatagtgctttattaacaaattcatgtgttcttttcccatccctttaatacaaaaaaattattcatcagttattttcatctgacatttcactaagtacagaatgcataatgtcaacattattagatcagccattcaagtgggtcacataagtttatcctcattgtgccaaattcccactcaaaggataagctgaataacagatgcctccaggtgtatacaacaaccttagtttcttgacttgaactagtcctgtttaacaggtcaaactgctagtctttctaagtaaactaaaaaagactcaagtacacagctgtacatacatatcatcagatggtaagttcatttcaacaagaacctctataactaactgtacatttgtacagttttctgctatcattgcaaaagcccctctgaacaaacttatagtttagaatttaaaacaatcctgatgagacaaaacgtaccaggtggcttttctgnagcagaaattaattccaccatctttncttaagccaatttaaagccaaccaagttggaaaataaatttgcagcnttcngtaaccaaatgtctnt

SEQ ID NO: 8811 - DNA, 583 bp, Homo sapiens
  misc_feature (461)..(461): "n" may be a, t, c, g, other or unknown
  misc_feature (475)..(475): "n" may be a, t, c, g, other or unknown
  misc_feature (480)..(480): "n" may be a, t, c, g, other or unknown
  misc_feature (508)..(508): "n" may be a, t, c, g, other or unknown
  misc_feature (541)..(541): "n" may be a, t, c, g, other or unknown
  misc_feature (582)..(582): "n" may be a, t, c, g, other or unknown
atataaaaataagtgtttattaacaaatgggctcagagtagaaaatgcagacagatgggttcactttaccatattttgggatcatcatcttattgcgtacagcactgtaggcaagtaaacgaaaccaaaggctggctcccctggccgaggcctgggactgatgcaagacagccagccagtcacctccgcctcccatgaacctcttggaaaacttctcctgtcccacttctgtcaccctccagctccttgagagagccagagttgagaagaaaatgagcctgaagttgaaagggaaagttcttgcctgaaacagtgctgggaataagtccagaccatttccctcaagagccacctcttcactccttaagccagaggacaccacaaagacacagttaatggcctctcatgccactcctcaggtggcttgtgagggcagccagtgagggactgcaggatttcangggaagtagctcanatggnccactcagaacttttggaagaatttganggacaaggtcccgcagtcgcacttttgagcatnttggcattgtccaaataaatggggtcaagctttttcaatcng

SEQ ID NO: 8812 - DNA, 506 bp, Homo sapiens
  misc_feature (247)..(247): "n" may be a, t, c, g, other or unknown
  misc_feature (429)..(429): "n" may be a, t, c, g, other or unknown
  misc_feature (441)..(441): "n" may be a, t, c, g, other or unknown
  misc_feature (447)..(447): "n" may be a, t, c, g, other or unknown
  misc_feature (494)..(494): "n" may be a, t, c, g, other or unknown
  misc_feature (500)..(500): "n" may be a, t, c, g, other or unknown
  misc_feature (502)..(503): "n" may be a, t, c, g, other or unknown
agaacaaaatggttttaatcaattgcgtcaccctcactctcctgggagcggagcaacaaaaaggctcggctcctggtgagtggtgggttgatcgctgcatccagtgtaaagcttggggctgctggggagggaggggccgagtaagggactttcccatctgagtggctcaggagacccacccctctcccctcagagcagcaggggacagagaaaagccatcacttctttggtctttgtggcggctcancatgtgggatgggaaggagggcagaaagggcagagaagggcccttagcaggaagcgccacctcagcagagtaggcctggctgggagctctggcagaaaggtcacagtgaggctgaggagcgcccaagaggagaatggccgtagtgcagaagtgctggcatggatgggtggggtaaggtgcantgccccaccctntgccanggcccttgggaaaggcaaaccctccaaagtggccatgaaaataggtncagggncnnact

SEQ ID NO: 8813 - DNA, 473 bp, Homo sapiens
  misc_feature (1)..(473): "n" may be a, t, c, g, other or unknown
nnnnnnnnnnnnnnnnnnnnnnnnnnnnnnnnnnnnnnnnnnnnnnnnnnnnnnnnnnnnnnnnnnnnnnnnnnnnnnnnnnnnnnnnnnnnnnnnnnnnnnnnnnnnnnnnnnnnnnnnnnnnnnnnnnnnnnnnnnnnnnnnnnnnnnnnnnnnnnnnnnnnnnnnnnnnnnnnnnnnnnnnnnnnnnnnnnnnnnnnnnnnnnnnnnnnnnnnnnnnnnnnnnnnnnnnnnnnnnnnnnnnnnnnnnnnnnnnnnnnnnnnnnnnnnnnnnnnnnnnnnnnnnnnnnnnnnnnnnnnnnnnnnnnnnnnnnnnnnnnnnnnnnnnnnnnnnnnnnnnnnnnnnnnnnnnnnnnnnnnnnnnnnnnnnnnnnnnnnnnnnnnnnnnnnnnnnnnnnnnnnnnnnnnnnnnnnnnnnnnnnnnnnnnnnnnnnnnnnnnnnnnnnnnnnnnnnnnnnnnnnnnnnnnnnnnn

SEQ ID NO: 8814 - DNA, 568 bp, Homo sapiens
  misc_feature (523)..(523): "n" may be a, t, c, g, other or unknown
  misc_feature (564)..(564): "n" may be a, t, c, g, other or unknown
cttgctaatctttctatttttagggggtagagacggggtttcaccatgttgcccagcgttcctcccgccacggctttccaaagtactgggattacaggcatgaaccgccgcacacaccacttgtatctcctatgcccgtgtcaagcagcagcagggcggtgggaacggctgcacctgcactgtggcagctcgcaggcctccctgacgtccaggcggaggctttctcaagtgtgggtgccttgggtccgacccaggaccccctccccagctcccgtcctgtggaggagaccccaccatgcttcctcaccaccggctggagatgtcctgaccccctgcccactgcgccctaacattactgactctaaaccagaacccagtgcccaccctgtcctcaccgtcctcaccccacggcattctgagtgagggacgcccaggcccacccactccctggactcacttctgtccccccgagagaccttgcccgggacatgtacccacctatgccctctactggccaacttanccctggggaaccaatgggtgaagaagggaagtcctcacggncagc

SEQ ID NO: 8815 - DNA, 550 bp, Homo sapiens
  misc_feature (268)..(268): "n" may be a, t, c, g, other or unknown
  misc_feature (402)..(402): "n" may be a, t, c, g, other or unknown
  misc_feature (438)..(438): "n" may be a, t, c, g, other or unknown
  misc_feature (472)..(472): "n" may be a, t, c, g, other or unknown
  misc_feature (502)..(502): "n" may be a, t, c, g, other or unknown
  misc_feature (514)..(514): "n" may be a, t, c, g, other or unknown
  misc_feature (540)..(540): "n" may be a, t, c, g, other or unknown
  misc_feature (543)..(543): "n" may be a, t, c, g, other or unknown
  misc_feature (550)..(550): "n" may be a, t, c, g, other or unknown
aacagtccagctgtggtttatttggtacattcataagatgttcactcctatatatattttttccctaggggtttctcatttctagatttacactttccctcatagcatggtccctccaaggtatatgcttccgatacataaaatgtttgtaattttgttaattctgccattcattagctcaataatttctctcattaaaattctgtaaactatgaatttcaaagaagtctattctatattcatctggttcatgaagtttcctctttgngaatcttatgttagtaaaatgactttacaacgtttaacatggttcctcacctgtatgaactttttaaaaaaaggtatgacttgctgctaaaaattttcagagtggttactaaattcagttttcctgtgtattgnctactatctttttgcatgtaaagaacagctttctgnggatgcctttccatatgctgggcattcataaagntctattcagtatgagttttctggaagatgncagaaggattcncttaccgagttctctttatatatganggntctatcn

SEQ ID NO: 8816 - DNA, 560 bp, Homo sapiens
  misc_feature (529)..(529): "n" may be a, t, c, g, other or unknown
  misc_feature (531)..(531): "n" may be a, t, c, g, other or unknown
acacttgggttttaggtatttatttacaaagttcttactaatacaattgcttttaaaatgtagcaaagagtcatttactactctcagaagtggcacatacatggcatagaaaacaatctatagtcagttaactattaaaacagaaacttgaaatttaagtgacaaacgtttgtagcactccctaaagaaataggaaataaaaatgcatttatccatatgaacttgattattctgaattactgactataaaaaggctattgtgaaagatatcacactttgaaacagcaaatgaattttcaattttacatttaattataagaccacaataaaaagttgaacatgcgcatatctatgcatttcacagaagattagtaaaactgatggcaacttcagaattatttcatgaagggtcaaacagtctttaccacaattttcccatggtcttatccttcaaaataaaattccacacactatcaaactaaatcaagatttgctagtggataaaattaccattaatataccgactctntntggaacagctccaacatctggttttgcaa

SEQ ID NO: 8817 - DNA, 484 bp, Homo sapiens
  misc_feature (407)..(407): "n" may be a, t, c, g, other or unknown
  misc_feature (450)..(450): "n" may be a, t, c, g, other or unknown
  misc_feature (462)..(462): "n" may be a, t, c, g, other or unknown
  misc_feature (473)..(473): "n" may be a, t, c, g, other or unknown
  misc_feature (475)..(475): "n" may be a, t, c, g, other or unknown
  misc_feature (481)..(481): "n" may be a, t, c, g, other or unknown
  misc_feature (483)..(483): "n" may be a, t, c, g, other or unknown
catgctaaggaattcttttactgtgcgcttccctgaatagatacgccgtcaaacaaggcagaagctacaaataaagcttacttctactgaactcatgaagctgttcctagtgtcagttttgagtttcaagtgaagactgaatgtcaactgcaggctttccgaattcctcgaccatgtccatccatggattctcttcttgtctagatttccaagcatgaagatgctaactaaagcatttctcaatggggaacacgaaaagatttctattattgtgggttctccggtgttcctaaaggctgagttataactaaaggatttcaacctatttgtgagtttgatggtaacgctggaaaaatgcttgaagttgttactttgctcattataggagtatggtttccctccagganggtttctctaaaattaagagctattctacaacagagacccctntacacttaaggnatttatgggancnggcctntna

SEQ ID NO: 8818 - DNA, 558 bp, Homo sapiens
  misc_feature (518)..(518): "n" may be a, t, c, g, other or unknown
ctttatacagttcacttttaatcattcatccaaaaaacagtttcttcccatttaaaatgcctattcatacatttgagttattccctttggattatcggaagccagattacaaaatttaggaaatgctaccaagtcctctttgaagcaacaggcacataaataatttaaaactctggaaacaatttttagaaccttaatgtgaaaaatagacttttttttaatgcatactcatttctgtcaaaggctaggctaaaagctttttgagggtcacactgcgtataccccttcctcatatgatgggtagttttgtggacacagtaaagagttaacccagcttcctcggggacaccaggtcactctttctggacacctgccatcagttgccatgcctaacaaacccttccctggaagcagttagaacataccttgagagttagatccatcttgggagtccagactcatactaccttttggccttggaagtcccaaatgaaagtaattgggcccgatgatgggcncgatattcatattggccacttcgtcctttggataactttt

SEQ ID NO: 8819 - DNA, 544 bp, Homo sapiens
  misc_feature (2)..(2): "n" may be a, t, c, g, other or unknown
  misc_feature (31)..(31): "n" may be a, t, c, g, other or unknown
  misc_feature (140)..(140): "n" may be a, t, c, g, other or unknown
  misc_feature (219)..(219): "n" may be a, t, c, g, other or unknown
  misc_feature (221)..(221): "n" may be a, t, c, g, other or unknown
  misc_feature (303)..(303): "n" may be a, t, c, g, other or unknown
  misc_feature (323)..(323): "n" may be a, t, c, g, other or unknown
  misc_feature (424)..(424): "n" may be a, t, c, g, other or unknown
  misc_feature (449)..(449): "n" may be a, t, c, g, other or unknown
  misc_feature (465)..(465): "n" may be a, t, c, g, other or unknown
  misc_feature (480)..(480): "n" may be a, t, c, g, other or unknown
  misc_feature (505)..(505): "n" may be a, t, c, g, other or unknown
  misc_feature (534)..(534): "n" may be a, t, c, g, other or unknown
  misc_feature (539)..(539): "n" may be a, t, c, g, other or unknown
  misc_feature (541)..(541): "n" may be a, t, c, g, other or unknown
gngtgtcatcctcagaccagccatttgcctnttccaaaaagctggggctaagcatgtgggtggttcaagaggggcagcccccaggccccaggctgggccgcggtaccagtggcaggtccccctgggtctcaggagcttancttctacggagctcaggtgtcatttatggggttgccagagcaagctgttaaagggcgaatttggtaagactgagctcananacctggtgggagggcaaggactggcgggcacagcaggaggagattagaggagggtccacctgaatctttgcagcaggcacanagcttctggctgcatctcanaagggggcagacgcacaggccagggaacacggggctctaggctgtggctccgagtgtccctggtgactggaaagcctgaagggaagctggaaactgatacnggatgcccgtggctttgtgaaacanaatgagctctttcttnctgaaaaagggcccnaaggggaaaaaaaaaaacccgaccnttacactgggtccttcattcctggcccgngggananatt

SEQ ID NO: 8820 - DNA, 561 bp, Homo sapiens
  misc_feature (53)..(53): "n" may be a, t, c, g, other or unknown
  misc_feature (70)..(70): "n" may be a, t, c, g, other or unknown
  misc_feature (212)..(212): "n" may be a, t, c, g, other or unknown
  misc_feature (348)..(348): "n" may be a, t, c, g, other or unknown
  misc_feature (487)..(487): "n" may be a, t, c, g, other or unknown
  misc_feature (492)..(492): "n" may be a, t, c, g, other or unknown
  misc_feature (512)..(512): "n" may be a, t, c, g, other or unknown
  misc_feature (520)..(520): "n" may be a, t, c, g, other or unknown
  misc_feature (527)..(527): "n" may be a, t, c, g, other or unknown
  misc_feature (530)..(530): "n" may be a, t, c, g, other or unknown
  misc_feature (539)..(539): "n" may be a, t, c, g, other or unknown
cgcatgtggatgacctggtggcactgggacagagagccaggtcacacggcctntcccaccaacccccagnggtgccaagtcaaatttattgttttttaaacacaaacttcagtgggaggggaagggagaacggaaccccacaccccctaggcacctgccatcggttgtcctttggaggaagccacctcccctcctgcccgaggagaggctgntaggcagctccccaaggctgactccagccctttcggaggccccccatcaggaggccttggaaaagccgccctgcatttgggcctgacgtaacgcacgcgggtccagggctgctgagcagacagctgaggacccggntccagccctgcccttgtggctgctggtcctgggagcctgcgggtctacctctgcatgtgtgcacacaaggagtggggatgaacagcgtgctgggttgttgggaggattcaacaagaaagtgtccaagtgggtgcctggnctggngcccaatcccccgaacccantttgcccngtgaggnggnccctgtccnttgaccatttgccggggccggg

SEQ ID NO: 8821 - DNA, 536 bp, Homo sapiens
  misc_feature (47)..(47): "n" may be a, t, c, g, other or unknown
  misc_feature (182)..(182): "n" may be a, t, c, g, other or unknown
  misc_feature (276)..(276): "n" may be a, t, c, g, other or unknown
  misc_feature (286)..(286): "n" may be a, t, c, g, other or unknown
  misc_feature (314)..(314): "n" may be a, t, c, g, other or unknown
  misc_feature (319)..(319): "n" may be a, t, c, g, other or unknown
  misc_feature (340)..(340): "n" may be a, t, c, g, other or unknown
  misc_feature (373)..(373): "n" may be a, t, c, g, other or unknown
  misc_feature (447)..(447): "n" may be a, t, c, g, other or unknown
  misc_feature (452)..(452): "n" may be a, t, c, g, other or unknown
  misc_feature (465)..(465): "n" may be a, t, c, g, other or unknown
  misc_feature (482)..(482): "n" may be a, t, c, g, other or unknown
  misc_feature (490)..(490): "n" may be a, t, c, g, other or unknown
  misc_feature (492)..(492): "n" may be a, t, c, g, other or unknown
  misc_feature (536)..(536): "n" may be a, t, c, g, other or unknown
gcaataaaagcacagatttattgaagcaaaagtatattccacagagngggagcaggctaaagcaagctgctcaagagccccagttgcaaaatctggggtttaagtaccctttaggggtttcctattggttacaccctatgcgccaccaatcggaggccgaagtgaaggctcccagtctccanactcttattctcctagctcaaagaaatccactgatttcctctgtagcatcttcaggttccatcttgacaacttcctctaaatccccaggggaanagttgtttanagactcctggatgccctgagggagcggntccanagcttgccttccctcctctgntttcacaacggtccagcgataggcactgttctntgacaatccttcttggcactgtttatcgactggtggaggccctgggctatgttccactttggggaaaacagtancaganagaggagaatagntcctggggctctaattngggtctangncctgaaaggcattttcccattagccccagacaagcaatggcccn

SEQ ID NO: 8822 - DNA, 563 bp, Homo sapiens
  misc_feature (3)..(3): "n" may be a, t, c, g, other or unknown
  misc_feature (486)..(486): "n" may be a, t, c, g, other or unknown
  misc_feature (510)..(510): "n" may be a, t, c, g, other or unknown
  misc_feature (512)..(512): "n" may be a, t, c, g, other or unknown
canggaacttaaagagattatatttcaacaaattaagtcctcatttgtatgcaaaattattcttccaatcctctcattactgacagatgatgagtcaatgacctttaaacaaggactctgcgctaggaccctaaactgtatgttaaagggttagtaggttcagtacattctttgtggttttatataattgctttgcaattgattaaattgctttcttttaaaggaatatattaaaattcctttaaaaaaaaagcaacattttttgaaagaagggatatgcagctataatttcttaaatatgcataaaatgaacatatgtcaaaatcggaaatgctggctattcttgcactcctaacataggaaaatggtttttaaaaaattaaagaaaaaagccaaacatccttaacttaagaaacttaaggagttttcacaattcctaagtcaatattcctgactaagagccttgactatgaagaggcaggaatntaaagaacctcaataaaataaatncngtaaaaaccaaaccaaaacttgggatatagaatcttaaatctttggttttc

SEQ ID NO: 8823 - DNA, 490 bp, Homo sapiens
  misc_feature (412)..(412): "n" may be a, t, c, g, other or unknown
  misc_feature (453)..(453): "n" may be a, t, c, g, other or unknown
  misc_feature (462)..(462): "n" may be a, t, c, g, other or unknown
  misc_feature (464)..(464): "n" may be a, t, c, g, other or unknown
  misc_feature (476)..(476): "n" may be a, t, c, g, other or unknown
  misc_feature (481)..(481): "n" may be a, t, c, g, other or unknown
  misc_feature (485)..(485): "n" may be a, t, c, g, other or unknown
catataaaccacagaatatatttaattcaaattaaacatgaaactagaataatgttcggtccttatcaagtagcaattacattgtttaaaaaaaaaaaaaagaacagtacatttctgtctacattccgacaatccaacgaggcggcatgggtcacatccagtttgatgaggtgacagacccagcagtcaccatccatgggcatggttctgaggggactggggagacacagaccatacatgatacaaaatgattctgcagcaagtctgaaggagcgcagcctccctcctaatacataagaatgaacgtccaggtagcagagagtaggcgacttgcataatgagcgcattttattaaatagatagttaacgcactgcttcttactcattccaagttgctgtaggtgctgcccgnattaacagcagggacaaaagcttcctatgcgcgtttcagcnggaatactntntccactccaggnacttnttgntttgg

SEQ ID NO: 8824 - DNA, 554 bp, Homo sapiens
  misc_feature (40)..(40): "n" may be a, t, c, g, other or unknown
  misc_feature (105)..(105): "n" may be a, t, c, g, other or unknown
  misc_feature (127)..(127): "n" may be a, t, c, g, other or unknown
  misc_feature (168)..(168): "n" may be a, t, c, g, other or unknown
  misc_feature (170)..(170): "n" may be a, t, c, g, other or unknown
  misc_feature (253)..(253): "n" may be a, t, c, g, other or unknown
  misc_feature (402)..(402): "n" may be a, t, c, g, other or unknown
  misc_feature (423)..(423): "n" may be a, t, c, g, other or unknown
  misc_feature (457)..(457): "n" may be a, t, c, g, other or unknown
  misc_feature (536)..(536): "n" may be a, t, c, g, other or unknown
  misc_feature (549)..(549): "n" may be a, t, c, g, other or unknown
gagacagagtcttgccctgttgcccaggctggagtgcagnggcgcgatctccgctcactgcaagctccacctcccgggttcacgccattctcctacctcagcctntcgagtagctaggactacaggngcccaccactacacccggctaattttttgtatgtttagtananacggggtttcaccatgttagccaggatggtctcgatctccaggatcagtttcttgagtcttttctcttttgcctcttagtcanaatcctaagaacataaccaggaaacaaatgaggcaagcaagatcctgctataaatcaaagaactactagactcatgaaataattttaaatgcgtgttaaccatgagtgaaaactagaaattgacagccccaatttttttttaagggcanatggtactttacatcttgggncttaggcataaaactatctggaacaaaaggctanggatcgagtcattataaaggcactttatgcctaaagatttcaaacttggagcttttaagggaaattggggttcacttanttaaacaccagtnggaat

SEQ ID NO: 8825 - DNA, 563 bp, Homo sapiens
  misc_feature (510)..(510): "n" may be a, t, c, g, other or unknown
  misc_feature (517)..(517): "n" may be a, t, c, g, other or unknown
  misc_feature (532)..(532): "n" may be a, t, c, g, other or unknown
  misc_feature (548)..(548): "n" may be a, t, c, g, other or unknown
atatttgtaggcacaatttattttaaaatccacacaagaaacccagaaatgcagcattatcttcagacatcacattctagctctgtttaaataccacatatgctaaaaaccgacgccaggacattctctaaatgagttacaaatcagtttctggaaaggaagtgctccatgaaaagcttatagcaagataactcaggctttcaggtggcgtatggcacgtgaattagccttacagtaattgtgtacatagtatgtttagtcattattgaatcaaaagtttcaggaagtaccttttttaatgcatacgctgagagaaccgtcaatatgcctttgttcctgctgagggatctgccattctggaggtacaaatactgcagatagaatatcaccgcaggactacgtcaagttcagagtgttcaggatcatttctatataaaactacaattagctgaactatggcaaaggtccttgaacataaagccttcttcattcattggatcttaataagtngaaggcnctaccggaaagctgnttaaaggatttaattncatccagttttgatt

SEQ ID NO: 8826 - DNA, 568 bp, Homo sapiens
  misc_feature (10)..(10): "n" may be a, t, c, g, other or unknown
  misc_feature (68)..(68): "n" may be a, t, c, g, other or unknown
  misc_feature (182)..(182): "n" may be a, t, c, g, other or unknown
  misc_feature (482)..(482): "n" may be a, t, c, g, other or unknown
  misc_feature (540)..(540): "n" may be a, t, c, g, other or unknown
  misc_feature (568)..(568): "n" may be a, t, c, g, other or unknown
ccattacagngcacatttattgactctgtgtatcttcacagtgtgatcttcaccacagcttgcaaagngtaaccactcagcaccttctgcttccttctgttcagtttttccactgcaattcttccagcataattttctgatagccagtgtatgactttggctttgacttgtttctacacagngggtccagtcatttatttctggaacttgatcagtctttttccaggtatataagcaaatctttccacactccaatcctactgcaaccacgtatcgttgagaagggtggagcactgggcagacgctgacagctgtcacagccccacccacgtccaggactgaggagcaggggccaatgttgtgctcaatacagtcatcagtggagtcgcactcaccccagacaaccacctttttgtctcgactcccagtgaagaaatacttgctgtcaggactccaatcacaagaccaaataattctactgngcacagaagtaatttggtgggtgaaggcaaaaagactaaaaactggcttgaactaggngaaaatgggatcccggtttttccaaagn

SEQ ID NO: 8827 - DNA, 554 bp, Homo sapiens
  misc_feature (463)..(463): "n" may be a, t, c, g, other or unknown
  misc_feature (468)..(468): "n" may be a, t, c, g, other or unknown
  misc_feature (477)..(477): "n" may be a, t, c, g, other or unknown
  misc_feature (479)..(479): "n" may be a, t, c, g, other or unknown
  misc_feature (498)..(498): "n" may be a, t, c, g, other or unknown
  misc_feature (517)..(517): "n" may be a, t, c, g, other or unknown
  misc_feature (543)..(543): "n" may be a, t, c, g, other or unknown
ccagttaaattcagttttattgttttccgttacatgttcactccctgttccttctcgccgcctggtctggtgggggcataggagagggagggaggactgaaggtcatacatttctgataatgtcgctttctaaagggctgtgacatttttgtacatcttttccatcttttagtagcaagtggttgctgcagaccagaagtgaaccaaataaagactcctgctctgtgcagctctcagactcctgctctgtgcagctctcacaaagatcacagctgcttttgtacattccagtaactgcatgacacaaaacggtacctgtgagcaggaaacacattcacaccatgagacatgcacagaggcaggtgtccctgagcgaagttgtgcagagatctaggcctaggggcagtcagctcctgccgcaacacaacctagaaaaccaaggcgagaacggccccttgccttncacancgagggcananggcaaaagccctttcctgngaattccaggaggattcanccaagggtaaaagccccgggtctganaaaatcgaatc

SEQ ID NO: 8828 - DNA, 546 bp, Homo sapiens
  misc_feature (70)..(70): "n" may be a, t, c, g, other or unknown
  misc_feature (91)..(91): "n" may be a, t, c, g, other or unknown
  misc_feature (107)..(107): "n" may be a, t, c, g, other or unknown
  misc_feature (111)..(111): "n" may be a, t, c, g, other or unknown
  misc_feature (131)..(131): "n" may be a, t, c, g, other or unknown
  misc_feature (197)..(197): "n" may be a, t, c, g, other or unknown
  misc_feature (242)..(242): "n" may be a, t, c, g, other or unknown
  misc_feature (269)..(269): "n" may be a, t, c, g, other or unknown
  misc_feature (276)..(276): "n" may be a, t, c, g, other or unknown
  misc_feature (293)..(293): "n" may be a, t, c, g, other or unknown
  misc_feature (320)..(320): "n" may be a, t, c, g, other or unknown
  misc_feature (332)..(332): "n" may be a, t, c, g, other or unknown
  misc_feature (353)..(353): "n" may be a, t, c, g, other or unknown
  misc_feature (361)..(361): "n" may be a, t, c, g, other or unknown
  misc_feature (495)..(495): "n" may be a, t, c, g, other or unknown
  misc_feature (498)..(498): "n" may be a, t, c, g, other or unknown
  misc_feature (512)..(513): "n" may be a, t, c, g, other or unknown
  misc_feature (533)..(533): "n" may be a, t, c, g, other or unknown
  misc_feature (537)..(537): "n" may be a, t, c, g, other or unknown
  misc_feature (541)..(541): "n" may be a, t, c, g, other or unknown
gaaatgtaaaactcagtttaatttcaagtttgtatagagaatgtatgccacagtttgtattttataaacncaacctatcttattataaatncaaaataagaaaaagngatncgttagctgttatgaagggngaaaacattatataaacctcaaaaggctgctttctgcatctgcatctatgtaatttcatggttctntaccaatttcatttacagaaataatctctatagtcaaattattgntcactttcatgccccaacatgggaagnggtaggngaatatctgtaggaatncaatttattggctgctcctccactcanaagtagccctgngtctgtccagtctacactcanaactttgncttcatgagcagccagatcatagagaggagccttacaacttcttgtatcccacagcttaacaatgttatctaaagatcctgaaatcagctgctgttcatgggtagggagaccattttactgggggcacccaccngtntgtgacgttggggnnagggaccccaaggacccatntttngttngggac

SEQ ID NO: 8829 - DNA, 498 bp, Homo sapiens
  misc_feature (474)..(474): "n" may be a, t, c, g, other or unknown
  misc_feature (479)..(479): "n" may be a, t, c, g, other or unknown
  misc_feature (484)..(484): "n" may be a, t, c, g, other or unknown
  misc_feature (487)..(487): "n" may be a, t, c, g, other or unknown
  misc_feature (489)..(489): "n" may be a, t, c, g, other or unknown
  misc_feature (492)..(493): "n" may be a, t, c, g, other or unknown
cactacttaatgcatttaattccaacccctcattggaatcatcttggtaacatttaagattctacaacagttataatgcgacgattcagaggtggtctcaaagttgttacagtgttaaaaaaattatagtaagcagtataaaattacaatttattatggggccagggggattcacaaccatccttaaaaacattaagagcaaaccacggccaggcatggtggctcacacctgtaatcccagcactttgggaggctgaggtgggcagatcacttgaggtcaggagttcaacatgatgaaaccccgtctctactaaatatacaaaaattagccagtcatgatgtcgtacacctgtggtcccagctactcggagggctgaggcatgagaatcgcttgaacctgggaggcggacgttgcagtgagccaagatagcgccactgcactccagcctgggaaacagagcgagactccgtctnaaaancaaancanancanngaaac

SEQ ID NO: 8830 - DNA, 565 bp, Homo sapiens
  misc_feature (506)..(506): "n" may be a, t, c, g, other or unknown
  misc_feature (536)..(536): "n" may be a, t, c, g, other or unknown
  misc_feature (559)..(559): "n" may be a, t, c, g, other or unknown
gcagaagcaatgctaaggataaaatatcctgactacctttattgacatgatttgtgtttaccagctcattaaaatctatgtttcaaattccctggattttcccaagttccagactggtaaaaagtatttttacatacacatttgatgctcacattacaaacttaatatctataaacttgaaacttgttttgcacaagtctatggctttactacttttcaagacaaaagtcacatattaaaatacaaactactcaaaagcaaatagttgtcaagaatgtggtttacaagacagatcttacagataatacagactatattatgatttatctgtttgaaaacagaaagtagtgtattatactgaattctggtataaggtgcgcaggaaactttacttacaatcctttattttcataaggtaaacaccaaagtatttctcacatatattaccaccagattttttttaaaccaaatttccggtttaaaaatcacacactggccaacacagnaattcgaaatgctaggaaaaggctagcatntgaaggaaaacctggcttaagcnttctaa

SEQ ID NO: 8831 - DNA, 562 bp, Homo sapiens
  misc_feature (506)..(506): "n" may be a, t, c, g, other or unknown
  misc_feature (533)..(533): "n" may be a, t, c, g, other or unknown
  misc_feature (536)..(536): "n" may be a, t, c, g, other or unknown
  misc_feature (560)..(560): "n" may be a, t, c, g, other or unknown
aaacataccctttattaacatctaggtaatatctgtaatattccttgctcctcatccccaagtacgctattagctgtccatccttctgggtagaagtgtattttcgttttacttgttgatttttggatgcatgctgggggaggaaagcatattgtttgtagtcaccctggcgtgctaaggtatattattccccagtaattctctcaaggtgggcatatgcaaaacataatctctaaattcttcaatactaagaaatacctttgttttacccctaaaatcaaatgccattttggctggatataggattctaggattaaagcctttttccagcagaactttgaagacattgctccatttacttctagcatccagtgtgtccagtgataagtctgctgtcaacctgattcttgttccttggtaggtaatttctcttctctctctagaagcccttaattatttctctttatcactagaattccaaaatttcaccaagaagtgtctaggangcagtctcttttatcaaattttactanggnacctcgacaagcactggcaatttnag

SEQ ID NO: 8832 - DNA, 553 bp, Homo sapiens
  misc_feature (517)..(517): "n" may be a, t, c, g, other or unknown
  misc_feature (519)..(519): "n" may be a, t, c, g, other or unknown
atttgagacagagtttcactcattgcccaggctggggtgcaatggcgcaactgtggctcactgcaacctccacctactgggttcaagcaattctcctgcctcagcctctggaggagctggcattacaggtgccgccaccatgcccagctaatttttgtatttttagtaaagacagggttccactatgtcggtcaggctgatctcgaacttctgacctcaggtgatccaaccgcctcggcctcccaaagtgctgggattacaggtgtgagccaccatgcccagccagcaaacagttttaatttcactgtagtcttggtcctctttgaatgcagtctctctctttttttttggggggggggggacagtctcgctctgttggccaggctggagtgcagtggcatgatcttgactcactgcaacctctgtctcccgggctcaagcaattctctcctcacctccgagtagctgggattacaggggtgtgccactgggcctgggtaattttggattttagtananatgggggttcactatcttggccagctgggcttga

SEQ ID NO: 8833 - DNA, 548 bp, Homo sapiens
  misc_feature (466)..(466): "n" may be a, t, c, g, other or unknown
  misc_feature (481)..(481): "n" may be a, t, c, g, other or unknown
  misc_feature (543)..(543): "n" may be a, t, c, g, other or unknown
aaagttagttaaatacagtgcctagaaggaacagacggcccagcgcaacaggtcgaggcctttgtccttgatgatttttttttcctctggctacgttcagtccgactgagtgcagcgctatgcatatgtaaacatattcgttaaagccgatcacctttaaggtcattcggaaaaaagcggtccttgttttcgcggtgtgggtgtgggtcgtaacagcagtctcattcccccgggaggaaggctcttgggcgttggagagtcccactcgggttgtgccacaggacaatgtgggcagggcgtgagcggctcggcgggcgcggcccgggcgttacctcctgccgatctcgctctgccgcaggaactggatgttgttggcgctgtcggccagctcggggtactgctccaccgagagtacgtagtacccgtcgtaccctgcaccttgccggcgctcagcaactgccgtttntcgcccttcgtccanagcccgcgccttcttgccgtcgcgcaccccttgttgttcgcgcgccaagcccgggcaaccgnctgcc

SEQ ID NO: 8834 - DNA, 350 bp, Homo sapiens
  misc_feature (210)..(210): "n" may be a, t, c, g, other or unknown
  misc_feature (308)..(308): "n" may be a, t, c, g, other or unknown
  misc_feature (324)..(324): "n" may be a, t, c, g, other or unknown
  misc_feature (326)..(326): "n" may be a, t, c, g, other or unknown
  misc_feature (343)..(343): "n" may be a, t, c, g, other or unknown
  misc_feature (346)..(346): "n" may be a, t, c, g, other or unknown
  misc_feature (349)..(350): "n" may be a, t, c, g, other or unknown
aagttgaacagaacattttatttctcagcaattctatgcgtccaaattaaacatgagatgaatagagactttattgagaaagcaagagaaaattcctatcaaccccaaggaggactcaaagtgaggctggaagaggacttagaagagtatgaaagtcctctaagattttatctaagttgccttttctgggtgggaaagtttaaccttagngactaaggccatcacatatgaagaatgtttaagttggaggtggcaacgtgaattgcaaacagggcctgcttcagtgactgtgtgcctgtagtcccagntactcgggagtctgtntnaggccaggggtgccagngcnccnn

SEQ ID NO: 8835 - DNA, 540 bp, Homo sapiens
  misc_feature (484)..(484): "n" may be a, t, c, g, other or unknown
  misc_feature (517)..(517): "n" may be a, t, c, g, other or unknown
  misc_feature (522)..(522): "n" may be a, t, c, g, other or unknown
  misc_feature (524)..(524): "n" may be a, t, c, g, other or unknown
  misc_feature (539)..(540): "n" may be a, t, c, g, other or unknown
cccttcaaaaacttttatttgtatcaacagttcctagctcttgacttagcttagagcttttaaaagagcagacaccttatatatttgagattgaaaaagtttctgctattaatcagaaataatcatttctattttctggcttaccccttggaataagccaaaaataaaaccaaagttacatttcctgacagatggctaagaaaacaatagaaggaacatcctgaattctagagttgactcttgctggtgaagtacaccttcagcttagtccattctcctaagtaaagcctgaaggaaaactcttaacacctaattctttgtggaaaaatgatcaactagccatttcacaggctatagaacaaaagtacaattgggcatctttccttatgtcctgggatcaggggtgcttacatttaacattgatcaggtaaagaggagaggctgtgcctaaggtctgagaaaaggcttgctctaagcaagctgnggtgaggcacaggatgactagggaatggcaganaacangntggcctactgtcagnn

SEQ ID NO: 8836 - DNA, 526 bp, Homo sapiens
  misc_feature (22)..(22): "n" may be a, t, c, g, other or unknown
  misc_feature (36)..(36): "n" may be a, t, c, g, other or unknown
  misc_feature (66)..(66): "n" may be a, t, c, g, other or unknown
  misc_feature (110)..(110): "n" may be a, t, c, g, other or unknown
  misc_feature (147)..(147): "n" may be a, t, c, g, other or unknown
  misc_feature (179)..(179): "n" may be a, t, c, g, other or unknown
  misc_feature (194)..(194): "n" may be a, t, c, g, other or unknown
  misc_feature (233)..(233): "n" may be a, t, c, g, other or unknown
  misc_feature (247)..(247): "n" may be a, t, c, g, other or unknown
  misc_feature (273)..(273): "n" may be a, t, c, g, other or unknown
  misc_feature (367)..(367): "n" may be a, t, c, g, other or unknown
  misc_feature (460)..(460): "n" may be a, t, c, g, other or unknown
  misc_feature (470)..(470): "n" may be a, t, c, g, other or unknown
  misc_feature (473)..(473): "n" may be a, t, c, g, other or unknown
  misc_feature (486)..(486): "n" may be a, t, c, g, other or unknown
  misc_feature (503)..(503): "n" may be a, t, c, g, other or unknown
  misc_feature (517)..(518): "n" may be a, t, c, g, other or unknown
gacgcataaaccaatttttttncctcatcgatgttncaaaccacttaaggaaatgacatcattcangaacattgggctacgtgtcattttgcttaaagtcagtttctaanaacctttcgatggcatttaaggacttaactggagttncaattgagtgcttactatgtgtcttgcacctntgaatatttaacgtnttacctcatttaatcttcacaacaacaacttatgtaggnagtagtataatctngattttactgaagaggaaacaaaggntaatctggccacggtcaccttactagtgagtggttggaacagatatttgagaacaggcaacatggcttcaaaatctaagctcttgcctacccantaactactccctttcaacgaaagactagtacgttatttgaacctgaataccctgaaagtaacaagcaaattttataattccttttctgttggncagcatattncanattggcaatgganaaattctttgtttgccnccaatttttagaannaatggggg

SEQ ID NO: 8837 - DNA, 570 bp, Homo sapiens
  misc_feature (564)..(565): "n" may be a, t, c, g, other or unknown
aagaacaaagttttgggcaaactagtaatttatttacaattgtaatttataaacagtaacacaaacatctttacattaatattatgaaaaatgtcccatggctgaaatgggtgaaaaatgagacttcagtacatttctaaaggggtgccaagaaaagggaaaaaatgcaattacaacagttttaggggagagttatatcaagtaatgcacctaggtgcaatttcatgcagatgtcttcaaccactcaaactgtttttattagatattagaataaaatttcccaaattatgttgccttttattcacttgatttccataagtaaatcaaaatgactggctgttaacagggtacatctaaatatttctcccatcaaccccttagagataatcccttacattttaggacatgtcagattgtgggtattgcaacttcccaaatggattttacaaaatactattccatggccctaaatgtgttcctggacttctcttaccaaatgggctaatatggaccattataaattaaatgaagaacgctgcaaaatccgcagacaatttcaagacnnttaaa

SEQ ID NO: 8838 - DNA, 560 bp, Homo sapiens
  misc_feature (74)..(74): "n" may be a, t, c, g, other or unknown
  misc_feature (218)..(218): "n" may be a, t, c, g, other or unknown
  misc_feature (222)..(222): "n" may be a, t, c, g, other or unknown
  misc_feature (334)..(334): "n" may be a, t, c, g, other or unknown
  misc_feature (402)..(402): "n" may be a, t, c, g, other or unknown
  misc_feature (452)..(452): "n" may be a, t, c, g, other or unknown
  misc_feature (457)..(457): "n" may be a, t, c, g, other or unknown
  misc_feature (540)..(540): "n" may be a, t, c, g, other or unknown
  misc_feature (546)..(546): "n" may be a, t, c, g, other or unknown
  misc_feature (552)..(552): "n" may be a, t, c, g, other or unknown
  misc_feature (554)..(554): "n" may be a, t, c, g, other or unknown
  misc_feature (560)..(560): "n" may be a, t, c, g, other or unknown
actgaaaaactcagactttattcagattaagttcctctacaaaaagtagggttctgtcccatgtgtctctgacncatttacaaaataccagttttttaaaattttggtcaaattatgagtggttgatttaaaaacttttccaagaagaagaaaagcatggagtcgtaatttaaagaactcaataaaaacttctattttttattttaaaataatatacncagngttattttcttcaagaccgtcctgtggatgtgaaatccgtcttcgcgtcatgtatctcccatatccagcagttcagccatccagctacctttgggaccctgctgcaccttgngtttgctggggagtcactggagagtgcatctctgttcagtttcagggcacgtctcacacatttgctgntccttattcattgttgacacaggggataggtgatccactacttgctgtanaatgnccttactttcactaggaggcagattactgaaatagtattgggggaccagctgcttaaatagttccaggagaagattctgaggnaatccnggaagnantggtcn

SEQ ID NO: 8839 - DNA, 515 bp, Homo sapiens
  misc_feature (495)..(495): "n" may be a, t, c, g, other or unknown
  misc_feature (497)..(497): "n" may be a, t, c, g, other or unknown
  misc_feature (499)..(499): "n" may be a, t, c, g, other or unknown
  misc_feature (502)..(502): "n" may be a, t, c, g, other or unknown
  misc_feature (506)..(506): "n" may be a, t, c, g, other or unknown
  misc_feature (509)..(509): "n" may be a, t, c, g, other or unknown
  misc_feature (512)..(512): "n" may be a, t, c, g, other or unknown
catttgaaaaatatttattgagcacctgttataaggggctgagaaccataaaagacactaggggtacagaaaggaataattaagacggcctgctcttgagctcacagtctagtaaggaaggtaaacataaacaaatcattacaatacaacaggaaaagagctagagcgaagatatagaacaattgcacagaggaaagagtaactaattctgcctgaaggtaacaaggaagagatggcacttgattttgaagtttaaggatgagtgatattttagcacggcagagggcagagggggcacagggcattccaggcagagggaatagcatgtgcaaaggcactgaggtaaaaacatgagcatggttggttcagagaatggtgttgaagggtacacagaggcgggctgtaaagggtcttgtacaccacactaggaagtttgaattttatcctgtaggcaatgggaaggcttcaagcccacatctctccatctggtcacangntntcntaanagnctntgt

SEQ ID NO: 8840 - DNA, 569 bp, Homo sapiens
  misc_feature (506)..(506): "n" may be a, t, c, g, other or unknown
  misc_feature (531)..(531): "n" may be a, t, c, g, other or unknown
  misc_feature (537)..(537): "n" may be a, t, c, g, other or unknown
  misc_feature (544)..(544): "n" may be a, t, c, g, other or unknown
  misc_feature (555)..(555): "n" may be a, t, c, g, other or unknown
  misc_feature (569)..(569): "n" may be a, t, c, g, other or unknown
aagctgagacaatgtatcatagtcctatacacttctgagtaaggattaactaactagggtttgtatcttgcctaaaccactcactagctgtgacttttggcaagagatcaggaagctgttcctaatccctaaaatgcggataatacttgctttacagaatgtagcagcagtttgcagagatgaaccatgtgcttggcacactgtagatgctcaacaaatggcatcatattacttcctagagtcgggagaagttgtaaaatgaccagctttcttatgcttactcggagtattattctggcctttctcataatggagacagctttatcgatttagttgaagaaatgctgaaaattggggtggaattagacattatgttttaaagttcaaagagggccagacttgcgatgatccagaaattagaagaaactagagctttgagaaccaggaaaaggccgattggaaccaaaaaagaatgaccaggaaagatcaaatttcctaggaaatgnatatacatgctgatggcataagganaggctntgctganaaggattgggnatgtgaagggtaan

SEQ ID NO: 8841 - DNA, 555 bp, Homo sapiens
  misc_feature (16)..(16): "n" may be a, t, c, g, other or unknown
  misc_feature (160)..(160): "n" may be a, t, c, g, other or unknown
  misc_feature (271)..(271): "n" may be a, t, c, g, other or unknown
  misc_feature (278)..(278): "n" may be a, t, c, g, other or unknown
  misc_feature (358)..(358): "n" may be a, t, c, g, other or unknown
  misc_feature (395)..(395): "n" may be a, t, c, g, other or unknown
  misc_feature (464)..(464): "n" may be a, t, c, g, other or unknown
  misc_feature (476)..(476): "n" may be a, t, c, g, other or unknown
  misc_feature (485)..(485): "n" may be a, t, c, g, other or unknown
  misc_feature (506)..(506): "n" may be a, t, c, g, other or unknown
aatcaacacattcagnggatttgcacaatgcaatagcagcaccaaaaattaattgaatttccataaacaataaaaaatttaaacgaaaattaaaaaacacttccatttgctagagatcttaaagtaagaaatacttaggaataaacataaaaaaactganaatttcacaccttgaaatctacaaacattaaccaaaatgattaaaaacatatatatacaacccacattgatggtttggaaaaatcaatattggtattatataagccaatgngattcanattcaacacaatacctataaaaacccctattggtttttgttaaagaaacaaaaagcaggctgggaaaagtgactcacgtntgttggccaggctgatctcaaactcatgacctcaagngatctatccaccttgggctcctaaagtgctgggtttacaggcgtgagccacacgcctggcccaatcctnttaacataaacnctttaatgncaattaatgcttcaccggaangttttaagtcactcaaactcaagccaattctggaatggctttctggcaa

SEQ ID NO: 8842 - DNA, 568 bp, Homo sapiens; identical to SEQ ID NO: 5581
  misc_feature (1)..(568): "n" may be a, t, c, g, other or unknown

SEQ ID NO: 8843 - DNA, 543 bp, Homo sapiens
  misc_feature (475)..(475): "n" may be a, t, c, g, other or unknown
  misc_feature (492)..(492): "n" may be a, t, c, g, other or unknown
  misc_feature (505)..(505): "n" may be a, t, c, g, other or unknown
  misc_feature (514)..(514): "n" may be a, t, c, g, other or unknown
  misc_feature (522)..(522): "n" may be a, t, c, g, other or unknown
  misc_feature (524)..(524): "n" may be a, t, c, g, other or unknown
  misc_feature (532)..(532): "n" may be a, t, c, g, other or unknown
catacgattggtttaatttttttttcagcaggagaaaaaagaataaagttacaagattcttttaatattttcacaatgttaaaactaaaactgagctctaggctatgtgtgtaagtaaatctagaacacaaaagggttaaataagattttctcttttaaagatacaagaatttaagctttccttacatttaacaaacttcacagaacagatactgcaggggaacaagccccaccccccaccccccccagctctaagtcaggaagcgaacatgggcttcgctcccccaggccagctcccctgggctccttcccatggctgcctccacgcagcaggcagaggagggggcggggggccctggggagggccgggaagggctcgcacagcctcttcgggaccagagcttggcggaagcctatggggggctgcctcactgaggatggccgtatggtggcaagggctgtggcttgacagcantggtaaacgctgggcanacctggccccttntgcctgggnttgcctanancaagaaanccggtctgggt

SEQ ID NO: 8844 - DNA, 485 bp, Homo sapiens
  misc_feature (382)..(382): "n" may be a, t, c, g, other or unknown
  misc_feature (403)..(403): "n" may be a, t, c, g, other or unknown
  misc_feature (428)..(428): "n" may be a, t, c, g, other or unknown
  misc_feature (445)..(445): "n" may be a, t, c, g, other or unknown
  misc_feature (453)..(453): "n" may be a, t, c, g, other or unknown
  misc_feature (461)..(461): "n" may be a, t, c, g, other or unknown
  misc_feature (480)..(480): "n" may be a, t, c, g, other or unknown
  misc_feature (483)..(483): "n" may be a, t, c, g, other or unknown
ggaactgtatgattattttattattttaatgctaaactgaacagtgaactgaaatcagaggagaaagaaaatcaagctagtggctcactctcaatagtgtcctctaattttattgatgcttcagttttcataaagtgcaataaacaaaataaatagatgaaaaaagctttgaagatttatatacagttttgaggttaagataaattactgactatattcctttcagccttttaactctgtgaaagctgtaacgtacattaaaagcacattgaactaggttaaataatgatctttcccccttagatcaatctagtattaaggagtatataattatgcaagttcattctataacacgaggctagactaaaaggaaaatttttgngctacagactaaatccagatncggtcaggtgctgagcagaattccnggttcaaaataggaggnttctggtncatcatcnggctgggggatgaaaggcntancc

SEQ ID NO: 8845 - DNA, 551 bp, Homo sapiens
  misc_feature (120)..(120): "n" may be a, t, c, g, other or unknown
  misc_feature (122)..(122): "n" may be a, t, c, g, other or unknown
  misc_feature (384)..(384): "n" may be a, t, c, g, other or unknown
  misc_feature (417)..(417): "n" may be a, t, c, g, other or unknown
  misc_feature (456)..(456): "n" may be a, t, c, g, other or unknown
  misc_feature (468)..(468): "n" may be a, t, c, g, other or unknown
  misc_feature (510)..(510): "n" may be a, t, c, g, other or unknown
  misc_feature (522)..(522): "n" may be a, t, c, g, other or unknown
  misc_feature (538)..(538): "n" may be a, t, c, g, other or unknown
cctttttcaacttttttgaaaatttatttcacatttattactagtcacataatcctcaaaaatctaagttcacaaatgatcatcacatgagccctcttctccatatacacatttgttagngngaaaaaacaattttgtacagtattttagtagttacatgattagcaagcaacagagaagtagtgaaagctgaagaactccaaatgcattgctcataggacaaccactcaaacacaagcagctaggcaataaaggaaaatttcccatccagtcattgagaaatgctaaaggcattttatggtgacatgaatgcttaagttagtatgcaacctatagggcaaataaaactgctatataggttggtaattttgcatttaaatattngtagtatggtctacccatttatctaacatttantaatacataaaattttaagtctgggttctcaaaacggtngcttgggatttnggtatagggggctggtatctcaaagctcattcagtatctttncttctttcaaanggttaatgggactggngcaatggttggaa

SEQ ID NO: 8846 - DNA, 693 bp, Homo sapiens
  misc_feature (529)..(529): "n" may be a, t, c, g, other or unknown
  misc_feature (597)..(597): "n" may be a, t, c, g, other or unknown
  misc_feature (627)..(627): "n" may be a, t, c, g, other or unknown
  misc_feature (651)..(651): "n" may be a, t, c, g, other or unknown
  misc_feature (655)..(655): "n" may be a, t, c, g, other or unknown
  misc_feature (666)..(666): "n" may be a, t, c, g, other or unknown
  misc_feature (678)..(678): "n" may be a, t, c, g, other or unknown
  misc_feature (681)..(681): "n" may be a, t, c, g, other or unknown
caatggcaacacagatttattgggagaaagacctgcggagagggggtaccagctagtgccagagcccccttcccgcttacaggctggaccagttacagtcccgggcaggagaggtctgggattgttgtgaaaatggggtgggggcggtgtgtttggctgctgataatgaaggaatttagtgcagccaggggttaggcctgggacctgcctgacaggatgtttctcacagctcaggccctggtggaattttccactctgaccagtttgtaaaatggtaggggtctgcaaaatagtgcagtttgggctaacattcttatttcttactttagtataaaaaggaaaaagggcgtcgttgatcatctggctgcttcctgctggataggggcgttgtgattagggcctgggttctggagcttccgaatggtttcctcgtaggctctggtattagacgtggcaaaggtgaaatatattatcaatgtgtttttgcatgcttgcctggataaaacaattcagcctttgggaaatgaancgggatacaaggttaaatatgcatggcccaatcattagtaacaggaagaggaagatcaggggtcctangaagggggcaacccagggtatccatcttanaagggatgatccttgccccaggantcancgacttgatgncaaaagcttttnaanccctgtcatgaa

SEQ ID NO: 8847 - DNA, 832 bp, Homo sapiens
  misc_feature (699)..(699): "n" may be a, t, c, g, other or unknown
  misc_feature (737)..(737): "n" may be a, t, c, g, other or unknown
  misc_feature (799)..(799): "n" may be a, t, c, g, other or unknown
  misc_feature (809)..(809): "n" may be a, t, c, g, other or unknown
  misc_feature (818)..(818): "n" may be a, t, c, g, other or unknown
  misc_feature (820)..(821): "n" may be a, t, c, g, other or unknown
  misc_feature (826)..(826): "n" may be a, t, c, g, other or unknown
actgaaaactagttttattttaaaattaagtgcatagcactcatctaattccattggtgtagactttagcaccatacttgctatttgcaattaatgtcgtaacacagatacattttggtttgcagtctgtacttgagtagtgtttatttagtggactttggtaaagcccttcatacatattaatctcttcacagtacacatttaatgatggtccagtattctcaaaaaaaaaaaaaaaagcctactttaaagactaatcaataaattaaacaaaacaaaacccaaacaatgttcccccaccccccaaagctagcagttgtgagttgtatttatattgaaacctaatgttttaaaaatagttctggttctccaaccaccccatcccaccccgggtatgcagcaatagtaatcaattattttattctaccctcccaaaagattattaatccagtgttctttagctttttaaaatataaattgggaaagtgttattaataagcttttttaaaaggcatattcttctataacaagaatggcatataaaccaatcaataaaagtatttgacaagacattaagttaccacaggcactggctgttgtttcaagttgggatctctatcccaatatcttacattcatagcattattgaggtagttaaaatactgaaaattggactccaggttgctgggttctgaatgngaatgtgaaaggatatattctcttttgagcctactttnccccaaataattcaaggtttcttggggtaaggaacttcccaaaatccaatttgcaggccttnttttaaaaanggaaaaggngnnggatnctttca

SEQ ID NO: 8848 - DNA, 599 bp, Homo sapiens
  misc_feature (118)..(118): "n" may be a, t, c, g, other or unknown
  misc_feature (382)..(382): "n" may be a, t, c, g, other or unknown
  misc_feature (448)..(448): "n" may be a, t, c, g, other or unknown
  misc_feature (457)..(457): "n" may be a, t, c, g, other or unknown
  misc_feature (473)..(473): "n" may be a, t, c, g, other or unknown
  misc_feature (489)..(489): "n" may be a, t, c, g, other or unknown
  misc_feature (508)..(508): "n" may be a, t, c, g, other or unknown
  misc_feature (536)..(536): "n" may be a, t, c, g, other or unknown
  misc_feature (549)..(549): "n" may be a, t, c, g, other or unknown
  misc_feature (572)..(573): "n" may be a, t, c, g, other or unknown
  misc_feature (598)..(598): "n" may be a, t, c, g, other or unknown
gattcttatttttttaatataatttatcttgctgagatagcaagtcaagtttataaagaagatgcatttaggaataatcctaaaagataaagcaggtttacaaccctgcaccgcgcanaaaccctattaataggctttttttttttaatacacatttgtatcttgaccttttcacttgtttttctcaaatatttcatttctgggccccatccattacagggttaccaggaggcaaattttatctacataaatattcacatgaaaatagtaacttacaaaaagaaaaaaaataaggcagcttcataacacaattattcttttacacttttaacaatataacttctcccgttcagaataaatatacacccaatgtatggagcangattcaaagtggatagtggcttgggggtgcttaaacagtgttatcgcttgggacctgaagtcctgngggaagcantgggtggtctccttanacatggttgggatttnggaaaggtttgtttacccnctcctggaattgccttggcccctgcacnccgcttcctgaantttcggaacaaccaaacgcttcnntaaaagtcaaatcaaaacctccctnc

SEQ ID NO: 8849 - DNA, 600 bp, Homo sapiens
  misc_feature (21)..(21): "n" may be a, t, c, g, other or unknown
  misc_feature (75)..(75): "n" may be a, t, c, g, other or unknown
  misc_feature (109)..(109): "n" may be a, t, c, g, other or unknown
  misc_feature (111)..(111): "n" may be a, t, c, g, other or unknown
  misc_feature (118)..(118): "n" may be a, t, c, g, other or unknown
  misc_feature (189)..(189): "n" may be a, t, c, g, other or unknown
  misc_feature (202)..(202): "n" may be a, t, c, g, other or unknown
  misc_feature (212)..(212): "n" may be a, t, c, g, other or unknown
  misc_feature (221)..(221): "n" may be a, t, c, g, other or unknown
  misc_feature (223)..(223): "n" may be a, t, c, g, other or unknown
  misc_feature (285)..(285): "n" may be a, t, c, g, other or unknown
  misc_feature (289)..(289): "n" may be a, t, c, g, other or unknown
  misc_feature (342)..(342): "n" may be a, t, c, g, other or unknown
  misc_feature (375)..(375): "n" may be a, t, c, g, other or unknown
  misc_feature (380)..(380): "n" may be a, t, c, g, other or unknown
  misc_feature (439)..(439): "n" may be a, t, c, g, other or unknown
  misc_feature (456)..(456): "n" may be a, t, c, g, other or unknown
  misc_feature (518)..(518): "n" may be a, t, c, g, other or unknown
  misc_feature (529)..(529): "n" may be a, t, c, g, other or unknown
  misc_feature (541)..(541): "n" may be a, t, c, g, other or unknown
  misc_feature (585)..(585): "n" may be a, t, c, g, other or unknown
cgctcttccgctcatgttgangggaacttgaaaaacagctcctttccctgtatctctccccacagaaccctccanaagaataaaggggtcacaaaaaaactggcctganantgctgancgcatcttcttcctcgtgtatgtggttggggtgctgtgcacccaattcgtctttgcaggaatctggatgtnggcagcgtgcaantctgacgcancccctgganangctgcaccccatggcaggcggcctaaactgtaaaggggcagggcctgggctgcacaccttangatnaaatttgctttcccatggctgggggcgggccatgacagggcctctggattaanccaccctgagctctccctccgctagcacacaancacanaacgtgaaataaacccatctccagtgcaagtgtgcctcaagggtcagtcttcaatctcntcctaaataagttgggncctattttttgcttccaacccccattttgctccttaactttccccattgtcctgtttcccancccacaggcangcagcctaattngtccttctgcaaccacaaatgccttggcctggggccaaaaagcnctaaaggtggggaac

SEQ ID NO: 8850 - DNA, 587 bp, Homo sapiens
  misc_feature (544)..(544): "n" may be a, t, c, g, other or unknown
  misc_feature (546)..(546): "n" may be a, t, c, g, other or unknown
  misc_feature (567)..(567): "n" may be a, t, c, g, other or unknown
  misc_feature (569)..(569): "n" may be a, t, c, g, other or unknown
  misc_feature (578)..(578): "n" may be a, t, c, g, other or unknown
  misc_feature (587)..(587): "n" may be a, t, c, g, other or unknown
cagattcacaagctttaatcattactttttctgttatacattgaattgtggatgtcctttaattagtaaaacagccactaaaattgtttttatggtttgctatcacaaaagtcgaaggattgctagaatgctgtttacctgtttcaacagctcccatcaactaccgctactcactttacatagaaataaaaacagctactattcattgagcctatttctatatgggaatcttagtgtcctcacacacattaattcactcaattctccccaaactctatgaggtaaactattatgcccattttagactcaaatgtcaaaaccatatatgcattttgttccactgaccccaagtggtaactgtgagtagtagttctaacaatgaggcattttttaaaaagtcctattaatgtttacctataatttaacctataagggataaacccatacccccattgaacatggtacttttttccatttattgtctaatatgtggcaacagtaaatgaacaatctcatccttaaaacaggtgttatgacttttacntntgacaaacccccgaattaatncnaaactctcnaacctgccn

SEQ ID NO: 8851 - DNA, 591 bp, Homo sapiens
  misc_feature (37)..(37): "n" may be a, t, c, g, other or unknown
  misc_feature (55)..(55): "n" may be a, t, c, g, other or unknown
  misc_feature (505)..(505): "n" may be a, t, c, g, other or unknown
  misc_feature (510)..(510): "n" may be a, t, c, g, other or unknown
  misc_feature (558)..(558): "n" may be a, t, c, g, other or unknown
  misc_feature (568)..(568): "n" may be a, t, c, g, other or unknown
  misc_feature (583)..(583): "n" may be a, t, c, g, other or unknown
  misc_feature (586)..(586): "n" may be a, t, c, g, other or unknown
actttctaatatttttattttttagcaccaaaagganaaaacatattgttacaangctggttatagtgtctcaatggacactgcaaagaactacataaaagaagtctgtctcaagcagttcgtatttgagtcagtggtcagatggggcagttgcgctcagctgcagtccctgactccggaaacactgtgcctctcaaatgatctagagctcatccttggcgtacatgaggggcagttgttgttctagtacccatttagcccatggctcttcaagccaattcacactgggaaaaacacaccctcacaagatgcctatccatttgagttcatacaggttttagtagctagaactaaaaaacatttttaaaattatctaaacaaattggtaccaaagaaaacttgccatacttaaacagtatatatgttcccttttttggctgaaaaattcaagtttgtgctatataaaacactaacagttactaaagactaggaaaatttgcagganaaagntattttaaacttcccaataatcctaaaggaagccaattataaaactcnaataatgccntacttacttataccnctnttttt

SEQ ID NO: 8852 - DNA, 599 bp, Homo sapiens
  misc_feature (143)..(143): "n" may be a, t, c, g, other or unknown
  misc_feature (442)..(442): "n" may be a, t, c, g, other or unknown
  misc_feature (498)..(498): "n" may be a, t, c, g, other or unknown
  misc_feature (560)..(560): "n" may be a, t, c, g, other or unknown
  misc_feature (576)..(576): "n" may be a, t, c, g, other or unknown
  misc_feature (582)..(582): "n" may be a, t, c, g, other or unknown
ggcaccttaattaacaattcatagaatgggtcacttcaggccactcaagagtaccagtgaacactcccccacaaacacaccctgccacaagacatttagcacagaggaacagatccatggccactgcctctgcagtatcaaanagaattagtctttccacaaaacagattttaacagccaatctctggatttctgtagtggctttagtcaggcatatttatcatcatattagcagtgttcagttcctgcccaacatctttatttaatcccaattcaatgcttatggatgctcagctcatgtttaatgttgcaagccccatcttagcccatcttaattcaaacagaaaagaaacaaaacaaaacaaaaacaaaaaaggtacctgcctggttcatggatccctagccatccagggaccaaattccaaattaggatgacaaagantttcccttagttcaaaatgacatgtgttccagtcctaatcccagatgttaatctanccatagtgtccctgagccttaatccatgtgtttatcacatacttccccctagctttaaaatnactccccaagctgaanaaaggnaaacaaccataacccaa

SEQ ID NO: 8853 - DNA, 604 bp, Homo sapiens
  misc_feature (45)..(45): "n" may be a, t, c, g, other or unknown
  misc_feature (76)..(76): "n" may be a, t, c, g, other or unknown
  misc_feature (145)..(145): "n" may be a, t, c, g, other or unknown
  misc_feature (159)..(159): "n" may be a, t, c, g, other or unknown
  misc_feature (203)..(203): "n" may be a, t, c, g, other or unknown
  misc_feature (340)..(340): "n" may be a, t, c, g, other or unknown
  misc_feature (344)..(344): "n" may be a, t, c, g, other or unknown
  misc_feature (351)..(351): "n" may be a, t, c, g, other or unknown
  misc_feature (402)..(402): "n" may be a, t, c, g, other or unknown
  misc_feature (445)..(445): "n" may be a, t, c, g, other or unknown
  misc_feature (476)..(476): "n" may be a, t, c, g, other or unknown
  misc_feature (517)..(517): "n" may be a, t, c, g, other or unknown
  misc_feature (519)..(519): "n" may be a, t, c, g, other or unknown
  misc_feature (528)..(528): "n" may be a, t, c, g, other or unknown
  misc_feature (545)..(545): "n" may be a, t, c, g, other or unknown
  misc_feature (549)..(549): "n" may be a, t, c, g, other or unknown
  misc_feature (578)..(578): "n" may be a, t, c, g, other or unknown
  misc_feature (583)..(583): "n" may be a, t, c, g, other or unknown
ccaggctgtcttgcctttattcctggttagggcaggtggtcctanacagcagtttccagtaaaagctgaacaaaanactacttggtactctcttcttggtgtacatggctgtgtcctgcactgtgccccatcccgcctgggacanaaacgggcatccanggtgctgaaacccgggcagggaggctactgtggagaccaggcancagtgctgtgggccccaagcagctgtgactgccctggcttgaccagcacagggttgggcctggtgtggcctaactttggcttgagtgtccagggtcatccgtggctcccgaactgtggcccctgcagggtgcaggangcancaccgangttcccgtacagcactgacttgaaggaataaccgtgggctggggctacacntgtctggtgcttgcccaaggggatcttggctctccaaaaatcntcttcacctgggcaggtgccaaagcccccanccccacggccaccaacacaaccgtcatcctccgtactgttnanccaaaaccnccgttgaaccaaaaccncccngaaccaccaacaaaaccgtcatccccccntactnttaaccaaaacccccttaacc

SEQ ID NO: 8854 - DNA, 587 bp, Homo sapiens
  misc_feature (5)..(5): "n" may be a, t, c, g, other or unknown
  misc_feature (177)..(177): "n" may be a, t, c, g, other or unknown
  misc_feature (227)..(227): "n" may be a, t, c, g, other or unknown
  misc_feature (230)..(230): "n" may be a, t, c, g, other or unknown
  misc_feature (283)..(283): "n" may be a, t, c, g, other or unknown
  misc_feature (381)..(381): "n" may be a, t, c, g, other or unknown
  misc_feature (485)..(485): "n" may be a, t, c, g, other or unknown
  misc_feature (510)..(510): "n" may be a, t, c, g, other or unknown
  misc_feature (525)..(525): "n" may be a, t, c, g, other or unknown
  misc_feature (568)..(568): "n" may be a, t, c, g, other or unknown
  misc_feature (570)..(570): "n" may be a, t, c, g, other or unknown
  misc_feature (586)..(586): "n" may be a, t, c, g, other or unknown
aaaanaatgctaggtgttcttcccctaccatctcatataggggaataaactaatttcctactaagttattacttcttcatagaaaacttagagcattaggggaaaaaaggtcaatagttctgtaccttttattaatcttaattgcataatcccaactttcaaatttaaaaagctcanaaaaaattcctgagcagttaagttgctttataatctaattgttggggaanaanttcttgtttctaggctaatcataaaaaaactggtaatggttaacacttgaaanatcacttactatgtgccaggcactgtgctttacctgtattaattcatttaattcttacaaccacaaatgaaccctacattcctgtttcacaaaagaanggcctggtcttaaatcccatctaatactaaaatctgtgctcttaaccacagtggtgtattgcctaaacgtctttgttctcgtgatttcaagggataaaatatancagtttatatttctactaaatttcnccctacacaaatatntccccaatctactaaataccatctctataacaaatctttgttntnttagggccatttcccna

SEQ ID NO: 8855 - DNA, 592 bp, Homo sapiens
  misc_feature (167)..(167): "n" may be a, t, c, g, other or unknown
  misc_feature (169)..(169): "n" may be a, t, c, g, other or unknown
  misc_feature (303)..(303): "n" may be a, t, c, g, other or unknown
  misc_feature (337)..(337): "n" may be a, t, c, g, other or unknown
  misc_feature (391)..(391): "n" may be a, t, c, g, other or unknown
  misc_feature (430)..(430): "n" may be a, t, c, g, other or unknown
  misc_feature (469)..(469): "n" may be a, t, c, g, other or unknown
  misc_feature (471)..(471): "n" may be a, t, c, g, other or unknown
  misc_feature (503)..(503): "n" may be a, t, c, g, other or unknown
  misc_feature (525)..(525): "n" may be a, t, c, g, other or unknown
  misc_feature (579)..(579): "n" may be a, t, c, g, other or unknown
gagatggagtcttgctctgttgcccaagctggagtacagtggcgcaatcttggctcactgcaacctctgcctcccaggctcaaacaattcttatgcctcagcctcccaagtagctgggattacaggcacgcggcaccacacccagctgatttttctatttttagtananatggggtttcaccacgttggtcaggatggtctcgatctcctgacctcatgatccgcccaccttggcctcccaaagtgctgggattacaagtgtgagccaccacgccccgcctagaactcttatagagaatgaanaatgcgttttgattttcttttttgcatatccaanacattgcactcaagtttctgaatcggcctattaaggttggtgcaaaagtaatantggctttgccattaaaaattaaaaatggcaaaaaccacnattagtttttgcaccaacctaacatttaggaaaatggananttcccccaaaggtgggaaattcctgtcttttncatttatgctgtctatggtcancactaaaacaacagtgccaccagcaggtgctcaccatccggtatttgttgggtnaatcaaggaataa

SEQ ID NO: 8856 - DNA, 565 bp, Homo sapiens
  misc_feature (480)..(480): "n" may be a, t, c, g, other or unknown
aaaaaaacgtgatctggctgtcgcccaaactggagtgcagtggggcgaccatggctcactgcagcctcaaattcctgggcgcaggcaatcctctgaccttagcttcctgaatagctgaaaccacagacacatactatcatgctcagctacttttacttctttctaaaggtctcactctgctgcccaggctggtctcgaaattctagccacaagcaatcctccagcctgagcctcccaaggtcctgggatttataggcgtgagtcaccacacctggcaaaaagcaactttttgtatatgcttaccagctaataacatcttgtcatgcttaaatatctatagtttcttttatcataaaacaaatcacaattttatcatgaaaacaaaccacaaacaaatataagactacgttataaaagtgaatgtgactcttcaaactgcagattccacctgctctgccggacctggacacacacttctcncaaagggagccatgaaatctgtgcttccaaatcactggtctaagcaaccttcactcctactccaaaatgccaagaaaataaaatg

SEQ ID NO: 8857 - DNA, 554 bp, Homo sapiens
  misc_feature (500)..(500): "n" may be a, t, c, g, other or unknown
  misc_feature (504)..(504): "n" may be a, t, c, g, other or unknown
  misc_feature (518)..(518): "n" may be a, t, c, g, other or unknown
  misc_feature (535)..(535): "n" may be a, t, c, g, other or unknown
  misc_feature (540)..(540): "n" may be a, t, c, g, other or unknown
  misc_feature (544)..(544): "n" may be a, t, c, g, other or unknown
  misc_feature (546)..(546): "n" may be a, t, c, g, other or unknown
cattagaaagtcttatttatttattacaaaagcaaagcttcattcacaatatgaactgcatactagatatagttatttctgcattaaactgctttccggaatccctaaacaatatagtgtattgtacaaccataatgcaagttatgttttgcatacaaaatatgttctttacatcaaagcacatgttaacaaaaacaagttctagaaagcatataccctctaagactaatgaaaacgtctttagcagggaattaaaaaaaaattaacattcatttgataaatattttgtagaacttgaaatgaggattttatctctgagtattttttgtagtattccccttgtccagtttttgcagaagaatggcaaacacttatttctaaaatgaaatagccctggaaacacccagtggaattttttcaaagtaaatgtctagccttaacttgaagttcaagaagttgtagctacatactacattagtaaaatctgaaataaaattatncccngtttaacccctccncagttcctaaaaaaatnttatnggananaattttct

SEQ ID NO: 8858 - DNA, 594 bp, Homo sapiens
  misc_feature (417)..(417): "n" may be a, t, c, g, other or unknown
  misc_feature (429)..(429): "n" may be a, t, c, g, other or unknown
  misc_feature (443)..(443): "n" may be a, t, c, g, other or unknown
  misc_feature (473)..(473): "n" may be a, t, c, g, other or unknown
  misc_feature (480)..(480): "n" may be a, t, c, g, other or unknown
  misc_feature (507)..(507): "n" may be a, t, c, g, other or unknown
  misc_feature (514)..(514): "n" may be a, t, c, g, other or unknown
  misc_feature (522)..(522): "n" may be a, t, c, g, other or unknown
  misc_feature (559)..(559): "n" may be a, t, c, g, other or unknown
  misc_feature (577)..(577): "n" may be a, t, c, g, other or unknown
cccaaggcaaaattttattttttcaagttacaaaaataggagcatgtcaaaaatacagtctagtccttatacgagtagttccagccatttaaaagttatacagagtttgggaaaaagcagtttatatacaagtcttaaaacacaacaatcatgaacaatgcacaccgttcaatgtagttattgctagttatatgcagcttttagttaccattgttcttctctgtaagggaaaggacagcatttggacattctgattgttgctgctgaagctgtggttttggaaaatcaatccaaaataagaataagctcactatgagtagaataaaacgtgtaagtttcaatcagtactacaagaaagcatggtttaaatttgagttccatacaattctacataactctattttgttactataacanaaatacagtgtntagttttgggcaanaattaatgaattactggttttataattaantgaaaanaacagtttttggtgccatgttaaaacnaaactgnatttctancttacaaccttaaaaatggaaaaattttatgtttaancaaaaccgaacccaggtnttaccttaaaattaaaa

SEQ ID NO: 8859 - DNA, 379 bp, Homo sapiens
  misc_feature (24)..(24): "n" may be a, t, c, g, other or unknown
  misc_feature (41)..(41): "n" may be a, t, c, g, other or unknown
  misc_feature (65)..(65): "n" may be a, t, c, g, other or unknown
  misc_feature (86)..(86): "n" may be a, t, c, g, other or unknown
  misc_feature (151)..(151): "n" may be a, t, c, g, other or unknown
  misc_feature (154)..(155): "n" may be a, t, c, g, other or unknown
  misc_feature (174)..(175): "n" may be a, t, c, g, other or unknown
  misc_feature (183)..(183): "n" may be a, t, c, g, other or unknown
  misc_feature (287)..(287): "n" may be a, t, c, g, other or unknown
  misc_feature (297)..(297): "n" may be a, t, c, g, other or unknown
  misc_feature (309)..(309): "n" may be a, t, c, g, other or unknown
  misc_feature (325)..(325): "n" may be a, t, c, g, other or unknown
  misc_feature (343)..(343): "n" may be a, t, c, g, other or unknown
  misc_feature (356)..(356): "n" may be a, t, c, g, other or unknown
  misc_feature (374)..(374): "n" may be a, t, c, g, other or unknown
acttcaggtttctcttttaataancaaaacatccaaggtanaattccaaagtacaaaatcaaccnggtctgaactgattggtgatnagagcactcagatcagtccttccttaaagaaacagtttcctccctgatgccctctttggtcactntgnnaatccgggagtgcgtcccnngtgtacanatctctctcagccgcagaaatgaagacatctttcaccacccgcatggctctgtccaaggacagcggaacatgctccacattctgggtgttcttaaaaccaaccnggttgtcaancacgggctgtancatggcacttgctgancctccagccttgaaggantctctctggtaanacctactggatctaagcngtgta

SEQ ID NO: 8860 - DNA, 601 bp, Homo sapiens
  misc_feature (1)..(601): "n" may be a, t, c, g, other or unknown
nnnnnnnnnnnnnnnnnnnnnnnnnnnnnnnnnnnnnnnnnnnnnnnnnnnnnnnnnnnnnnnnnnnnnnnnnnnnnnnnnnnnnnnnnnnnnnnnnnnnnnnnnnnnnnnnnnnnnnnnnnnnnnnnnnnnnnnnnnnnnnnnnnnnnnnnnnnnnnnnnnnnnnnnnnnnnnnnnnnnnnnnnnnnnnnnnnnnnnnnnnnnnnnnnnnnnnnnnnnnnnnnnnnnnnnnnnnnnnnnnnnnnnnnnnnnnnnnnnnnnnnnnnnnnnnnnnnnnnnnnnnnnnnnnnnnnnnnnnnnnnnnnnnnnnnnnnnnnnnnnnnnnnnnnnnnnnnnnnnnnnnnnnnnnnnnnnnnnnnnnnnnnnnnnnnnnnnnnnnnnnnnnnnnnnnnnnnnnnnnnnnnnnnnnnnnnnnnnnnnnnnnnnnnnnnnnnnnnnnnnnnnnnnnnnnnnnnnnnnnnnnnnnnnnnnnnnnnnnnnnnnnnnnnnnnnnnnnnnnnnnnnnnnnnnnnnnnnnnnnnnnnnnnnnnnnnnnnnnnnnnnnnnnnnnnnnnnnnnnnnnnnnnnnnnnnnnnnnnnnnnnnnnnnnnnnnnnnnnnnn

SEQ ID NO: 8861 - DNA, 613 bp, Homo sapiens
  misc_feature (30)..(30): "n" may be a, t, c, g, other or unknown
  misc_feature (526)..(526): "n" may be a, t, c, g, other or unknown
  misc_feature (544)..(545): "n" may be a, t, c, g, other or unknown
  misc_feature (547)..(547): "n" may be a, t, c, g, other or unknown
  misc_feature (565)..(565): "n" may be a, t, c, g, other or unknown
  misc_feature (583)..(583): "n" may be a, t, c, g, other or unknown
  misc_feature (591)..(591): "n" may be a, t, c, g, other or unknown
ggtgttaaatacatttattgtaaactttanacacaaaaataagttctctaggccattcacatgcacattaaaaccaacaggtgcaaactacaacaatgcatataattatacaaatgatgccactctgtgatgtttacaggattgctgtccatgcaaggtgatcataggcattatttatgaagccttaagatccagaagtgttgttactaccaaacctctgattaacactgtgaagtaagtgttttggaaggcagttccatgagttggctaacatttctttaaagcaaatgactgcttctaagcttagccgtacaagagattttggttgaactgaaaatattagtatttcattactgtgtgcagctctgtgatggacaagcaagttgttggcacatccaccaaaaacaattacttctccttcatcgctggcacaagctgtgtgccataaccttggtttttcggtatatggatgattaaattgtatcccattccatttttactgatgccagtaagttcccaggcatcnacttaatggctgttttannantggttaaatcccccccanaaaaaaaaaaaaaatcgnaaaaaacnggggtttattgaattgccaaaa

SEQ ID NO: 8862 - DNA, 160 bp, Homo sapiens
  misc_feature (120)..(120): "n" may be a, t, c, g, other or unknown
  misc_feature (132)..(132): "n" may be a, t, c, g, other or unknown
  misc_feature (139)..(139): "n" may be a, t, c, g, other or unknown
  misc_feature (146)..(146): "n" may be a, t, c, g, other or unknown
  misc_feature (148)..(148): "n" may be a, t, c, g, other or unknown
  misc_feature (150)..(150): "n" may be a, t, c, g, other or unknown
  misc_feature (160)..(160): "n" may be a, t, c, g, other or unknown
ggcggggggaggggggaacagagcctcgctccgtcatccaggctgcagtgcagtggcgtgatgtcggctcactgcaacctctgcctcctgggttcatgcagttctcctgcctcagcctcncgagtaactagnactacangcatgcncnancattcccacn

SEQ ID NO: 8863 - DNA, 585 bp, Homo sapiens
  misc_feature (93)..(93): "n" may be a, t, c, g, other or unknown
  misc_feature (116)..(116): "n" may be a, t, c, g, other or unknown
  misc_feature (234)..(234): "n" may be a, t, c, g, other or unknown
  misc_feature (403)..(403): "n" may be a, t, c, g, other or unknown
  misc_feature (405)..(405): "n" may be a, t, c, g, other or unknown
  misc_feature (444)..(444): "n" may be a, t, c, g, other or unknown
  misc_feature (515)..(515): "n" may be a, t, c, g, other or unknown
  misc_feature (517)..(517): "n" may be a, t, c, g, other or unknown
  misc_feature (525)..(525): "n" may be a, t, c, g, other or unknown
  misc_feature (528)..(528): "n" may be a, t, c, g, other or unknown
  misc_feature (547)..(547): "n" may be a, t, c, g, other or unknown
  misc_feature (552)..(552): "n" may be a, t, c, g, other or unknown
  misc_feature (566)..(566): "n" may be a, t, c, g, other or unknown
gttctctgacaggtttattagctttcatgttaatggatgtttttaaaccctgcaaccctctgtcaacttctttccacatcaagaggccatganatacagtaatggcctcttaagantcatgccacataaagatgatgactttgatgtcctggcctgcctcctgtaacaatgtgaggctgttttgggcacatgctgtaataacaacaggactatcacaggaacaatgaagcaganaagcagaaggtgcctacaaagttttacctaaatgtcttgtttgtcaggatggagctgatgcgcccatactggcagaacaattagcacagagtagttctgaaaaggaggaagaattcacagagcatcagttatgggtgcagggaagtcgccatctgccaatgggcaccanantgtcactgtactggaaggggaaaaagaatgggctggatnaaatccaagggcctctctgcccatgttcaaagtcagtaactgctctgcctgccggctcacaatgcatgccnanttttaatnacncccccccaaaatggggttnatcancttacttagtcccncaacttcaaggaacggtta

SEQ ID NO: 8864 - DNA, 495 bp, Homo sapiens
  misc_feature (400)..(400): "n" may be a, t, c, g, other or unknown
  misc_feature (419)..(419): "n" may be a, t, c, g, other or unknown
  misc_feature (428)..(428): "n" may be a, t, c, g, other or unknown
  misc_feature (430)..(430): "n" may be a, t, c, g, other or unknown
  misc_feature (451)..(451): "n" may be a, t, c, g, other or unknown
  misc_feature (476)..(476): "n" may be a, t, c, g, other or unknown
  misc_feature (494)..(494): "n" may be a, t, c, g, other or unknown
ctgattcacacgaatactaacgtttaatcctgttttcaaagtccaagattgaaaacttgcaattaaacactgagcaagccacatgtttaagtaatatttcttaaaaagtcttaaagaaaaaagtatgatacaggacctaagttttcagtggcatatatactattaacacatgttctgaaatctggtaggtcacatcagtcctgaattaacttttaataataataataataaaaaaactaactgagctttatactttttctatgccactatagctttctttcacctcattttttaaatgtcgatcttcactttatgccgttctcagtattcttccaaaaatcttcgaacagtagtcctacaacgcaaagtttggggaaaaatgataattagacaacatgtntaaggccaatttttatganaaagtgttngnccagtcactaactggctaatnaacatgttttcatggaatgcttgtntcctttttaattatcaang

SEQ ID NO: 8865 - DNA, 566 bp, Homo sapiens
  misc_feature (175)..(175): "n" may be a, t, c, g, other or unknown
  misc_feature (417)..(417): "n" may be a, t, c, g, other or unknown
  misc_feature (472)..(472): "n" may be a, t, c, g, other or unknown
  misc_feature (532)..(532): "n" may be a, t, c, g, other or unknown
  misc_feature (543)..(543): "n" may be a, t, c, g, other or unknown
  misc_feature (545)..(545): "n" may be a, t, c, g, other or unknown
  misc_feature (548)..(548): "n" may be a, t, c, g, other or unknown
  misc_feature (561)..(561): "n" may be a, t, c, g, other or unknown
  misc_feature (563)..(563): "n" may be a, t, c, g, other or unknown
cttttttgagatggagtctccctctgtcaccaggctggagtgcagtggcgtgatctcggctcactgcaacctccacctccctggttcaagcgattctccagcctcagcctcctgagtagctgggactgcaggcgtgcactaccacgcccagctaatttttgcagtttttcagtanagacggggtttcaccatgttggccaggatggtctcgaactctcaacctcataatccgcctgccttggtcccccaaagtgctgggattacaggcgtgagccaccgcacctggcccagatttttatataactgattggcactcaatattacttgctgacagtttcttctcccttcctaatatgagcattgtatataactggaattaatattcattctcaaagcatatatgctacaaatggcaanaaattacaaacttgtaaatagccacctatctcaaaaactgttaacttgtggcaantaaaaaaattacccgcttcatttgggttttaatccatttagtcagcacattttcatcaancacctactatntnttnggcaagcattgtnanaaa

SEQ ID NO: 8866 - DNA, 562 bp, Homo sapiens
  misc_feature (398)..(398): "n" may be a, t, c, g, other or unknown
  misc_feature (487)..(487): "n" may be a, t, c, g, other or unknown
  misc_feature (494)..(494): "n" may be a, t, c, g, other or unknown
  misc_feature (503)..(503): "n" may be a, t, c, g, other or unknown
  misc_feature (513)..(513): "n" may be a, t, c, g, other or unknown
  misc_feature (542)..(542): "n" may be a, t, c, g, other or unknown
  misc_feature (545)..(545): "n" may be a, t, c, g, other or unknown
  misc_feature (555)..(555): "n" may be a, t, c, g, other or unknown
gtggaatgctcacagcctcttcagtgttttcgatcccaacaaccagcacataaacatctttcaatgtatgattaatgttaagcatatttccttaactgaaaaagaggctaaataatcacattggctaacattttagcaggtaataaccccatgcttgtaagcactttacatgaattaactcacttaaatgcagagcaactctatgaagtaggtacttttttttatagtcatagagaggttaagtaacttgtccaaagtaatacagagtattacctgggaactagaatttgaattgagagagtgttattaatctgtgcaattaaccactacaccatacctcagcaaaaaatatctactgtattaagcctggaatagaagacacaatcaataaaatttancatgagggaaggggcaagatggccgactagaggcagccagatagacagggatgactggccacttctaaaagtctccaaaaggaaggccnttgaaanacccaaccncttctccatngcattgctctctcctgacttggttagganccncctattaaanaccttcc

SEQ ID NO: 8867 - DNA, 579 bp, Homo sapiens
  misc_feature (531)..(531): "n" may be a, t, c, g, other or unknown
  misc_feature (539)..(539): "n" may be a, t, c, g, other or unknown
aacaatttaaaatattttaaatgacaaaacaattaaatgacaattaacaataatgttagcctataaagctattttctaaaacaatttggtaaggagagtaacattgttttatagttctacaaatctctttaatgtttagcttgatagaaggcagctgaattaccatacctgcttctgcattcaacttgctgcaatacatgttgtaaaacctggctccacacaggtagatatttggaaaaagaggggtatttaatagctttttcagatgatagtgtgcttttatattataccaaacattgatgaagtagttgaaggatactggttcttagtcaattctcataaaaattatctcttaaaactatgacattattggagcacaataccaaaaactaatcaggtctctgtaccatggttcttacaaatttaagatgagccttctagaagccggagtcatattcccttactttcctgcccaaagcaccattcctgtttcctccccaaggttcagctacagggcaaaaaaaaaaaatntccggccnccatgaacttgcttattaaaaatcccggttggtaaaggtt

SEQ ID NO: 8868 - DNA, 539 bp, Homo sapiens
  misc_feature (39)..(39): "n" may be a, t, c, g, other or unknown
  misc_feature (272)..(272): "n" may be a, t, c, g, other or unknown
  misc_feature (432)..(432): "n" may be a, t, c, g, other or unknown
  misc_feature (500)..(500): "n" may be a, t, c, g, other or unknown
  misc_feature (503)..(503): "n" may be a, t, c, g, other or unknown
  misc_feature (507)..(507): "n" may be a, t, c, g, other or unknown
  misc_feature (521)..(521): "n" may be a, t, c, g, other or unknown
  misc_feature (523)..(523): "n" may be a, t, c, g, other or unknown
  misc_feature (533)..(533): "n" may be a, t, c, g, other or unknown
  misc_feature (538)..(538): "n" may be a, t, c, g, other or unknown
gttgagcagccaaaaagtcatggtttattatatctgaanaaatttcataattcaaacacaaccaaactgtacattttacaatcacattctatttgtaaacagttaaaagccactgacttcttttgcatcttaggacacaaacagttagaatcaaggcaatgatatgatggcaaattctgtactgttaaaatttttacccttgtttagtctctcttctttgactaagcaagcattataataccatttgtgggcaaaaaaaggggggaggaaanaaagtttaaaatggtgtaactcgttagtttgcaacaacatttaaaattttctttatacaacaaacaactctgtaagcccaataccttggttacagtatgcatagttactgatttcggctttaaggtacaacagttaaacattaacacagtcacgagagancagaaacatatggagccacttgatgggattacaaaaaattattacctattgattattaacaaaccacntcnctcnctaataaaaaaaananctctgaaacnaaatnt

SEQ ID NO: 8869 - DNA, 511 bp, Homo sapiens
  misc_feature (20)..(20): "n" may be a, t, c, g, other or unknown
  misc_feature (43)..(43): "n" may be a, t, c, g, other or unknown
  misc_feature (288)..(288): "n" may be a, t, c, g, other or unknown
  misc_feature (302)..(302): "n" may be a, t, c, g, other or unknown
  misc_feature (315)..(315): "n" may be a, t, c, g, other or unknown
  misc_feature (331)..(331): "n" may be a, t, c, g, other or unknown
  misc_feature (466)..(466): "n" may be a, t, c, g, other or unknown
  misc_feature (479)..(479): "n" may be a, t, c, g, other or unknown
  misc_feature (482)..(482): "n" may be a, t, c, g, other or unknown
  misc_feature (486)..(486): "n" may be a, t, c, g, other or unknown
  misc_feature (495)..(495): "n" may be a, t, c, g, other or unknown
  misc_feature (501)..(501): "n" may be a, t, c, g, other or unknown
  misc_feature (506)..(506): "n" may be a, t, c, g, other or unknown
gggtgcctttttgactgaangcaagctcacagatgaagcagangactgaagatctcgatctgaaccatttgccggtgtaaactcatgtctaaaatgcttgttagaattgagacagggtcagtgtttacacacagcccttcattatatttagagataaaacctatttcttgttcttgcattcacattaagtcatgatgtaagaatatcctacttggttccttcagagaattcttgaaaagttcgatttacagaagactgctatcatggatgttctttaactcctcagancggcggcagcgcanggtggcgggcgantaagcccatctcccancagcggcgacagcagcctctttctgtacatctgcttgtacttccaacctgttaaaacagtttaccatggcacttcctgacagactccccgttatactggctccagctaatgccatggtgctgggcgtttcactcnagttgtctccgantgntccnattccatcnagttgnttccncttgg

SEQ ID NO: 8870 - DNA, 489 bp, Homo sapiens
  misc_feature (138)..(138): "n" may be a, t, c, g, other or unknown
  misc_feature (199)..(200): "n" may be a, t, c, g, other or unknown
  misc_feature (208)..(208): "n" may be a, t, c, g, other or unknown
  misc_feature (216)..(216): "n" may be a, t, c, g, other or unknown
  misc_feature (238)..(238): "n" may be a, t, c, g, other or unknown
  misc_feature (252)..(252): "n" may be a, t, c, g, other or unknown
  misc_feature (288)..(288): "n" may be a, t, c, g, other or unknown
  misc_feature (401)..(401): "n" may be a, t, c, g, other or unknown
  misc_feature (406)..(406): "n" may be a, t, c, g, other or unknown
  misc_feature (424)..(424): "n" may be a, t, c, g, other or unknown
  misc_feature (465)..(465): "n" may be a, t, c, g, other or unknown
  misc_feature (470)..(470): "n" may be a, t, c, g, other or unknown
  misc_feature (476)..(476): "n" may be a, t, c, g, other or unknown
  misc_feature (486)..(486): "n" may be a, t, c, g, other or unknown
atggaacaagaattcaatttattctctatttataaaacatttttttaaagtgccttgggtatgaaaatctaaatgtctgcggtgtgatcagtcaggagcacgtaactatcactcttcgcatcctttggtcactggganatcctttgggggctgggaggtccttctgtcccatgctaaaggaaaagcttcacaagggtannagccacanaaccctcngcaagaaaggccggtcaggganaatgaatggtacanaaaggaaaggaaggaaagggggtggaacacaggtanaaggcaaggaagggatgccgcactggagaccgatggggacactctaattgtgcaagaaggaggaccttccttcttgaatgctgaacacagctagtctgaacttccttggaaantccanctgtttgcccatgcatanggccaactctccctgcaaagcaacaaatgtggcttctatcnggaangaaaantatccatcantgt

SEQ ID NO: 8871 - DNA, 586 bp, Homo sapiens
  misc_feature (525)..(525): "n" may be a, t, c, g, other or unknown
  misc_feature (530)..(530): "n" may be a, t, c, g, other or unknown
  misc_feature (532)..(532): "n" may be a, t, c, g, other or unknown
  misc_feature (567)..(567): "n" may be a, t, c, g, other or unknown
aacattcagaagtagagtttaattagctgctaattagcacaggaatcgtggaacaggtaactcaaaatttacattacttagaacaagaaaaaagtcagaataatgcagtcttcatttgtgaagcttacaatcttctcagattagagtgctcagatctgggaatattttctgttagaaatacagaggaagataaaagaacttgcagtagaccatgccactgaagagtaaacagaaagcacagagaaagaatttatagctttaagtattttcttcacaagtatatgaaatttatgaatgagatatggtataatcataaatacctgtgcaatgttatcatgttctcgactataaaatggctgtgtattttcattataagcaagcaaaacatgtgacttcagcctttctcaagattttagataaactatatttaagctcacattaaataccatagctagttttaagatacccatttctttttttctaaataaatatgttgttcaggggttttttgaaattcctgaagtnaatcncncccaagttggtgagccatttttatactttataccnagggtttaatataaataac

SEQ ID NO: 8872 - DNA, 552 bp, Homo sapiens
  misc_feature (496)..(496): "n" may be a, t, c, g, other or unknown
  misc_feature (502)..(502): "n" may be a, t, c, g, other or unknown
  misc_feature (507)..(507): "n" may be a, t, c, g, other or unknown
  misc_feature (514)..(514): "n" may be a, t, c, g, other or unknown
  misc_feature (518)..(518): "n" may be a, t, c, g, other or unknown
  misc_feature (540)..(540): "n" may be a, t, c, g, other or unknown
  misc_feature (550)..(550): "n" may be a, t, c, g, other or unknown
ccaagacagagtctcactctgtcacccaggctggagtgcagtggcacgatctcagctcactgcaacttctgcctccagtgttcaaatgattctcgtgccttagcttcctgagtagctgggactacaggcatgtaccaccaccccggctaatttttgtatttttagtagagacagggttttgccacgttggccaggctggtctcgaacttgtgacctcaggtgatctgcccgccttggcctcccaaagtgctgggattacaggcgtgagccaccatgcctggcccaaaggaaattcttataggcacagttattgacctaagtgtcttaaaattatcttgcttaggtgcgaaccagaaggaaactaaggctaaaaccaaattacaaattcaaattccatgattcaaatttaaaataggagatagccatccaaatgagatgagagaatgattcctgagagcgggagagactcatatccttcacatctgggaactgccangcccanaaganggcctanctgnacccaggctttggcctttccanggggattttnaa

SEQ ID NO: 8873 - DNA, 546 bp, Homo sapiens
  misc_feature (499)..(499): "n" may be a, t, c, g, other or unknown
  misc_feature (510)..(510): "n" may be a, t, c, g, other or unknown
  misc_feature (525)..(525): "n" may be a, t, c, g, other or unknown
  misc_feature (527)..(527): "n" may be a, t, c, g, other or unknown
  misc_feature (542)..(542): "n" may be a, t, c, g, other or unknown
  misc_feature (544)..(544): "n" may be a, t, c, g, other or unknown
  misc_feature (546)..(546): "n" may be a, t, c, g, other or unknown
cagtagatcagcacttattttaattactgagatagagtcacacttgacagaagcaagccctgcggtatatggcatcatcacaccaccggtgggtattttaatcctaaaactgagacagagtttacttaaacatttaaggcttgagtttcctctgtacagtgtggaggtgattaagaaaattaatcctaacatgaagatttttcatccagttaaaaaaagaaatactttaaaaacgacctgcccttccaaaacatgaagttaacttggagtttttctgtgatatgacaaactaggcataatcctatctcggaattgttgagtagaaaatttatgtactaatactcctgttaaaattcaacagctttattgtgaaagaatccagagatctcacactgaaaaaaatactaacacagctcatatataaattacttatctataaggaacaattatagaaggaatctaaatggggcaattttaacaaaccaggcaaaatatcccntttcctgaatntaagggactccaagncntggagttttagattnangn

SEQ ID NO: 8874 - DNA, 497 bp, Homo sapiens
  misc_feature (460)..(460): "n" may be a, t, c, g, other or unknown
  misc_feature (474)..(474): "n" may be a, t, c, g, other or unknown
  misc_feature (477)..(477): "n" may be a, t, c, g, other or unknown
  misc_feature (481)..(481): "n" may be a, t, c, g, other or unknown
  misc_feature (487)..(487): "n" may be a, t, c, g, other or unknown
  misc_feature (494)..(495): "n" may be a, t, c, g, other or unknown
ggatttttttgtgctttaatgttcgcagtcacacgaaagtggcatctccatcagcactggggcggccgcctcctcatcagccgacagctgcacggtccccgcctctcatccatttggtctgtttgcaagttactagatcatacaaaaaataaccgctacaaattctctgtatctggcatataaaaactgagcaaaaagtatctcttaaagcaaaacatctcagaaaaaatacaacacaggtttaacttctgcagtactttgttcatataaaacactagtaaaataggcttcttaaaaattaaatagtgaaataccaaccaaattatatacattgttacagtacaagtgaatgaggcaaaatatccagttcttagtttcccaggtgggtgggggtggccttcagtgcgtggcacggagggggtgacaggaaggccacgttccgatgtcacagtcagcgcanaaagaagctttgcnacnggcnaaccgnttggaannac

SEQ ID NO: 8875 - DNA, 499 bp, Homo sapiens
  misc_feature (453)..(453): "n" may be a, t, c, g, other or unknown
  misc_feature (460)..(460): "n" may be a, t, c, g, other or unknown
  misc_feature (465)..(465): "n" may be a, t, c, g, other or unknown
  misc_feature (484)..(484): "n" may be a, t, c, g, other or unknown
  misc_feature (487)..(487): "n" may be a, t, c, g, other or unknown
  misc_feature (498)..(499): "n" may be a, t, c, g, other or unknown
cctcagtcagatttcactttatttgtatcgatgataatattaactcttcagatttataaaatgacaaaacttgataattacctggaaacaatttattattaactaggttaaccctaaatccatcaagaaaaaccacctaacatattcagtgttaaaaagagacattacgactagcctggccaatatggcaaaaccctgtctctactaaaaatacaaattttagcagggtatagtggtacgtgcctgtaagtcccagctactcagaggctaaggcaccagaatcgcttgaatctgggaggcagaggttcaagcgattcccccgcctcagcctcccgagtagctgggatcacaggcatgcaacaccacgctcggctagttttttatatctttagtagagatgggggtttcaccatgttggccaggctggtcttgaactcctgcctcatgatccgntagcctncgctnccaaagtgctgggattacnggngtggcccgttnn

SEQ ID NO: 8876 - DNA, 548 bp, Homo sapiens
  misc_feature (383)..(383): "n" may be a, t, c, g, other or unknown
  misc_feature (391)..(391): "n" may be a, t, c, g, other or unknown
  misc_feature (421)..(421): "n" may be a, t, c, g, other or unknown
  misc_feature (427)..(427): "n" may be a, t, c, g, other or unknown
  misc_feature (451)..(451): "n" may be a, t, c, g, other or unknown
  misc_feature (466)..(466): "n" may be a, t, c, g, other or unknown
  misc_feature (490)..(490): "n" may be a, t, c, g, other or unknown
  misc_feature (517)..(517): "n" may be a, t, c, g, other or unknown
  misc_feature (528)..(528): "n" may be a, t, c, g, other or unknown
  misc_feature (534)..(534): "n" may be a, t, c, g, other or unknown
  misc_feature (537)..(537): "n" may be a, t, c, g, other or unknown
gacaaggtcccattctgtcgctcatgctggggtgcagtggcgcaatctcagttcactgcagaggtttttaatacccattagtgaaactagaagatcaggctttagtctcagctggcccactgactttctgtatgaccctcaaccagcccctgcccctctctggtttcctatctataaaacagtaggtttaagccagctaggtaatgagggccagagaatcccattaatcccccaacacaccaggctgagaggaaagagcagaaagttttcgtgttctgggctgggggaccttttgggaggtctcactcccagcagctccactccctcgtcctcgtcctccgagctctgggccagggtcctcttccgagccccagccatggganaggatctnaggggtcccctctggaagggctggagcagntaaccnggggtcactcccccagcggggtancagggagggctcaanggcttgaagtgacaaggccatggnaacttcgacacggggcccggggacagnccccaaaggtnttgggnagncctgggtaact

SEQ ID NO: 8877 - DNA, 544 bp, Homo sapiens
  misc_feature (406)..(406): "n" may be a, t, c, g, other or unknown
  misc_feature (427)..(427): "n" may be a, t, c, g, other or unknown
  misc_feature (432)..(432): "n" may be a, t, c, g, other or unknown
  misc_feature (446)..(446): "n" may be a, t, c, g, other or unknown
  misc_feature (464)..(464): "n" may be a, t, c, g, other or unknown
  misc_feature (483)..(483): "n" may be a, t, c, g, other or unknown
  misc_feature (516)..(516): "n" may be a, t, c, g, other or unknown
  misc_feature (530)..(530): "n" may be a, t, c, g, other or unknown
  misc_feature (534)..(534): "n" may be a, t, c, g, other or unknown
  misc_feature (540)..(540): "n" may be a, t, c, g, other or unknown
gagatttaaaaccagatttaaaaccatcagctcccaggagtgtggcctcctccacctgctccccaacttttctggttccaaaggttcaagccaggctcaactcccactcctctagtctccaaataagcgtagcacggagagtctgagtgacaatccactttaataatccagcttcagctcagctgagaacttcccctctcaggtgcaaagggatggcagagaagtctttccaagagggctcaatccactaagagattatggcttagagaagggaacagctcaaagaagcccttgaagagggtgagggtctggaggactcctgtggtgcaggccatctcccggatagagtgcatggccagttgggggctgcctaaatccagcaccccgcaagcccagccgagaaccnagataggtccaatggtgggtncacanggggtgtcatttcngaccatgagatcctgcangggggaccttgcttttgtnggccccttttggatcaagggcctttgaccccgngtttggaagcttancgtnctttgnctgt

SEQ ID NO: 8878 - DNA, 578 bp, Homo sapiens
  misc_feature (345)..(345): "n" may be a, t, c, g, other or unknown
  misc_feature (387)..(387): "n" may be a, t, c, g, other or unknown
  misc_feature (402)..(402): "n" may be a, t, c, g, other or unknown
  misc_feature (422)..(422): "n" may be a, t, c, g, other or unknown
  misc_feature (431)..(431): "n" may be a, t, c, g, other or unknown
  misc_feature (463)..(463): "n" may be a, t, c, g, other or unknown
  misc_feature (471)..(471): "n" may be a, t, c, g, other or unknown
  misc_feature (474)..(474): "n" may be a, t, c, g, other or unknown
  misc_feature (504)..(504): "n" may be a, t, c, g, other or unknown
  misc_feature (524)..(524): "n" may be a, t, c, g, other or unknown
  misc_feature (565)..(565): "n" may be a, t, c, g, other or unknown
  misc_feature (567)..(567): "n" may be a, t, c, g, other or unknown
  misc_feature (570)..(570): "n" may be a, t, c, g, other or unknown
cctgggacagagtttcgctttcgttgtccaggctggagtgcaatggcgcgatctcggctcaccccaacctctgcctcccgggttcaagcggttctcctgtctcaggagagttgtcttaaactacaattaacatcagttctgatatcagaattatctaaggacaccatcttatacctacctggtcattaactgaaatttctctctatagcttcatcattagacattaaaattcctcatgcttaggctcagtgcatttacatttcaaagaagacatcctatttgcattacagaacaagccttgcacaatttgcaagtgcatcatctgttttcagatttctttcctgnctaatattctgggttaacttagctggaacatctttgggtaanatgtgctgctggcanggaaacacaagcttttttanggcaatggntcctcaattttttccaaaaactccagtattgnactggcanccnggataataaaatttcttaaagggaataatngccaaaaaaatatttttccnggattacctggttaaccaaaaatggatgatagggctttacncntgnggcaatga

SEQ ID NO: 8879 - DNA, 573 bp, Homo sapiens
  misc_feature (446)..(446): "n" may be a, t, c, g, other or unknown
  misc_feature (450)..(450): "n" may be a, t, c, g, other or unknown
  misc_feature (453)..(453): "n" may be a, t, c, g, other or unknown
  misc_feature (483)..(483): "n" may be a, t, c, g, other or unknown
  misc_feature (520)..(520): "n" may be a, t, c, g, other or unknown
  misc_feature (525)..(525): "n" may be a, t, c, g, other or unknown
  misc_feature (538)..(538): "n" may be a, t, c, g, other or unknown
  misc_feature (553)..(553): "n" may be a, t, c, g, other or unknown
gcatagaacaagattttgttttcagagttttcttccttccccttcccccaattgttagcagcttgatgtgtcattctccccagcaggggagggggtggaatggcttgggttgtaaactccctcccccagccttcctgtcccttggaggggcagttcagctgggttctggttcagggtcaggcaggcagttaaggctggacgggtggtgcccgtaacaatgtgcctcatggcctgcagctgctctgggtttgactccagactccggtcgtacagcttgagtttcacatctgagggcagcagcgggacgtcccgaggtgccacaggaaagagcatgggccacagcagccagccgccctgtcagctccagggcacggtgcttggactcgcaacggctggcggttgaaggtaaagttcaccttgaaaggtcaacccatccacaaagcggntcangangctcatggaaaagctcaacttgacaccggnccaattcaccttggcccaaaggcccctatttttgaanggggncctccgggggggnttcccaggacaaaanggccaacaagtggtccccct

SEQ ID NO: 8880 - DNA, 352 bp, Homo sapiens
  misc_feature (63)..(63): "n" may be a, t, c, g, other or unknown
  misc_feature (72)..(72): "n" may be a, t, c, g, other or unknown
  misc_feature (79)..(79): "n" may be a, t, c, g, other or unknown
  misc_feature (123)..(123): "n" may be a, t, c, g, other or unknown
  misc_feature (176)..(176): "n" may be a, t, c, g, other or unknown
  misc_feature (225)..(225): "n" may be a, t, c, g, other or unknown
  misc_feature (228)..(228): "n" may be a, t, c, g, other or unknown
  misc_feature (258)..(258): "n" may be a, t, c, g, other or unknown
  misc_feature (262)..(262): "n" may be a, t, c, g, other or unknown
  misc_feature (269)..(269): "n" may be a, t, c, g, other or unknown
  misc_feature (305)..(305): "n" may be a, t, c, g, other or unknown
  misc_feature (330)..(330): "n" may be a, t, c, g, other or unknown
  misc_feature (340)..(340): "n" may be a, t, c, g, other or unknown
  misc_feature (346)..(346): "n" may be a, t, c, g, other or unknown
ccatcacactgaacaagcattttattccagggattcccaacatgtgagcagggtggaagcctntgacaaggngggccanaacctttggatttggtttgggggccaaaatcaactaaggctcanagaacatacaaagcctgcgtgaaggtggtgagctgctcccaccttcacaggtntgggggtcctaaacccctggagccatggtcagtcctgtgcccaagcctnttnttttgcaggccctgaaactttcactacagntcanacactgntgcacgggccggggagggaagggggtgcttccgggnaactgttcacagccccttaacttancctccctggngaccanggcaca

SEQ ID NO: 8881 - DNA, 453 bp, Homo sapiens
  misc_feature (229)..(229): "n" may be a, t, c, g, other or unknown
  misc_feature (402)..(402): "n" may be a, t, c, g, other or unknown
  misc_feature (415)..(415): "n" may be a, t, c, g, other or unknown
  misc_feature (428)..(428): "n" may be a, t, c, g, other or unknown
  misc_feature (438)..(438): "n" may be a, t, c, g, other or unknown
  misc_feature (441)..(441): "n" may be a, t, c, g, other or unknown
  misc_feature (446)..(446): "n" may be a, t, c, g, other or unknown
  misc_feature (448)..(448): "n" may be a, t, c, g, other or unknown
aataaacataagagtggttttattgattacatacaattttagctatattaatatatattataaactttaagaattagaaataagtgacttttattttttaaccaagaataatctaagttatggcagcatgttcaatgaaaggtaagtccggcacaatttttctatatctgtttctcagataatcaggaacatcatccaagctttacattacgataccataatgaccctnagaacacaagttccattaagtagaaatgaagcatcatatgttttcttttttaggaaagacccccccttttgttgtatagacatacccctaataatcttactctactgtacaaataacttttcacccacaagagctgcctcaagtaactttcattttggaaagctatcaaggcntgagacagagtancaaaatgccactntggactttgnatnttggngnttcaa

SEQ ID NO: 8882 - DNA, 540 bp, Homo sapiens
  misc_feature (462)..(462): "n" may be a, t, c, g, other or unknown
  misc_feature (470)..(470): "n" may be a, t, c, g, other or unknown
  misc_feature (507)..(507): "n" may be a, t, c, g, other or unknown
  misc_feature (510)..(510): "n" may be a, t, c, g, other or unknown
  misc_feature (522)..(522): "n" may be a, t, c, g, other or unknown
  misc_feature (534)..(534): "n" may be a, t, c, g, other or unknown
  misc_feature (540)..(540): "n" may be a, t, c, g, other or unknown
aggttgaatgaatgatttatatgttccatgtttatgtaagcacttaacttctttaaaaagaaactagttctttcaaaaagagctctgaattctgtctctggttagaaagtgtgaacaattctcagaacttgggacatgatttttcttctctctcacttcttataagcagatgccccttttcagggcattttcaggttgcacaggcagaactaagtgagaaatacggctccagaggccattcagtttgtctgggtccatatgattgtaggagttgggtgtgttagaattggtgaacttgactttaagaaaatctcttactttttcttcaacttcctttaggcctagacttgttccaagtgtctcttcctccaataagacagtcaggactaaggctacatctttgaaggccgcgttttcatggtcacaatatttgtagaagatcaaagtagagcctgagcttancactgaanggtgcttatcatgagctgggaaagttttgacctttgngangactggccaaanggatctatttantggctn

SEQ ID NO: 8883 - DNA, 566 bp, Homo sapiens
  misc_feature (456)..(456): "n" may be a, t, c, g, other or unknown
  misc_feature (466)..(466): "n" may be a, t, c, g, other or unknown
  misc_feature (562)..(562): "n" may be a, t, c, g, other or unknown
cttggcaagcattcatttattcacataacataagccagacactatgccaggggctggcgatacagaaatgagtaagacatgatccctggcccctcccatccctggaatgtctactaggaagaagctgctagaaaaagacaacatgctactttaaagccaagaggggccagtctcccattccagcttggtacacactgaacacatttgaggcttatgactggttcttttacttacaaatattgtttagacacattttcaaatgtcacaccaatcaataataataaggaatggattttatctatattgacagttctttcaaccttaagagtgaactgctacaggtaagattcaatcacatttttcaggagaaagctattgagaccaatatgctttggttatctaataagggtgggaatgacttataatggctatttactccaggcaaagagaaaaatncaacagaacntaggatcttggatttcaacgtagttctcctccatgggcatttctttggccgttaaggtcaatgccaactgggcccccagtgaacatgtcccccggncctg

SEQ ID NO: 8884 - DNA, 502 bp, Homo sapiens
  misc_feature (481)..(481): "n" may be a, t, c, g, other or unknown
  misc_feature (483)..(483): "n" may be a, t, c, g, other or unknown
  misc_feature (486)..(486): "n" may be a, t, c, g, other or unknown
  misc_feature (488)..(488): "n" may be a, t, c, g, other or unknown
  misc_feature (493)..(493): "n" may be a, t, c, g, other or unknown
  misc_feature (495)..(495): "n" may be a, t, c, g, other or unknown
  misc_feature (498)..(498): "n" may be a, t, c, g, other or unknown
gaagatcacaggggctttaataataaaataaacataaacaacactcgaatctctttataaatcccagagcacaatgtgcgttttcttacttccttttcatggaccccaaataaagactttgacagccagatatccaagatccggatcagccagcttcctaaaattctcctctttttttttaaggggtagaaaactgggggtatcccttggtggttaggggttgcttagagactgtggtagagatttggtgttaacaaaaatgtattttgaaagcaggatttcaattttcttatattgaatggcaaaggttccatgcacctggctatcttcatttctgaaatgaatgctttcattttattctctccagctaccttctccctttctttcctttccacccccattgcctcctttcagtggctttctttttctccttattctttcactcctttctctctcacagcaaaatgttctggaggatgtnantgntnaaacngntanctcc

SEQ ID NO: 8885 - DNA, 558 bp, Homo sapiens
  misc_feature (475)..(475): "n" may be a, t, c, g, other or unknown
  misc_feature (481)..(481): "n" may be a, t, c, g, other or unknown
  misc_feature (483)..(483): "n" may be a, t, c, g, other or unknown
  misc_feature (491)..(491): "n" may be a, t, c, g, other or unknown
  misc_feature (552)..(553): "n" may be a, t, c, g, other or unknown
  misc_feature (558)..(558): "n" may be a, t, c, g, other or unknown
ggagttaaactgtgctaaattacagtagtgcttattagtaactagatttcaaaaggttacagaaaatttacattctctacacaaaaactgcatctcctgcacagacaacatcgacatcgacacaggaaggaaactgattgtccattctttgcccaggaagtctcggtactttatagattcgtctttacctcttttttgttgttgttcttccgaaaaagcagtttaaatttttttctttttctttttatgctagggacgtggagatgttaaaacgacaacaaaaaatatatataaaaacaggaatgaaatctgtgagagaatatttttggttctaaagacgggtgcattccgtttgtcttcgcccgaatcccttgctggagaccacacgagcagtgacattgcacggagaggggcagcttttgggttccgccgccgtcactgaaaccaccggaaggcggttcccgtcggaagcatnaccttntncagaacancggaaggcttctttttgggttcctcacatttctgaatttgcaaatctgatggccagctttnnatccn

SEQ ID NO: 8886 - DNA, 509 bp, Homo sapiens
  misc_feature (424)..(424): "n" may be a, t, c, g, other or unknown
  misc_feature (451)..(451): "n" may be a, t, c, g, other or unknown
  misc_feature (461)..(461): "n" may be a, t, c, g, other or unknown
  misc_feature (464)..(464): "n" may be a, t, c, g, other or unknown
  misc_feature (470)..(470): "n" may be a, t, c, g, other or unknown
  misc_feature (489)..(489): "n" may be a, t, c, g, other or unknown
  misc_feature (505)..(505): "n" may be a, t, c, g, other or unknown
gagacggagtttcactcttgttgcccaggctggagtgcagtggccgtgatctcggctcactgcaacctccgcctctcaggttcaggtgattctcctgcctcagcctcccaagtagctgggactacaggtgcctgccaccactcctggctaattttttgtatttttagtagagacgaagtttcactatattggccaggctgctggtctcgaactcctgacctcgtgatctgcccgcctcggcctcccaaagtgctgggattacaggcatgagccaccacgcccagcccctgcaagcagtttctttaactctgttgggatgccattcgtgggcaaagctagatttgggacaagttgcccagctctgctaggaagagtcagtcctcagggggaaagtttcttttcaccttcgggatcccaaggcttnctgggttgactcaaggatttatcgcancctggatctncangaaatncctttgggcctcttggctnggccaggttggggctnggtg

SEQ ID NO: 8887 - DNA, 530 bp, Homo sapiens
  misc_feature (59)..(59): "n" may be a, t, c, g, other or unknown
  misc_feature (66)..(66): "n" may be a, t, c, g, other or unknown
  misc_feature (284)..(284): "n" may be a, t, c, g, other or unknown
  misc_feature (291)..(291): "n" may be a, t, c, g, other or unknown
  misc_feature (421)..(421): "n" may be a, t, c, g, other or unknown
  misc_feature (430)..(430): "n" may be a, t, c, g, other or unknown
  misc_feature (452)..(452): "n" may be a, t, c, g, other or unknown
  misc_feature (477)..(477): "n" may be a, t, c, g, other or unknown
  misc_feature (485)..(485): "n" may be a, t, c, g, other or unknown
  misc_feature (489)..(489): "n" may be a, t, c, g, other or unknown
  misc_feature (518)..(518): "n" may be a, t, c, g, other or unknown
gcagattagaaaatttttaatagttgatttgaaatgtattcattcactcattacattgngttgcanaaatacctgtctttcaccatgcttggttcttcatacttacaatacagtttgtaagtggaggttaggagtagctgagcaatctggtagagagcagcatgtggcacacagagttgacaaactgacagttggaactcctgactttctccattgcttcctcagaagcaaaatccttcaccatgtgatataaagtagaatgaaactcagtttcttctttaagngcttcanaaaatgcctcactctcttccttgatcttcagtctttgtgctctgtcaccactaaacattaaaagggcccaattaggattctcagtacattcttcaataaggggttcccttaccttaaataccacttttgnagaattacntagtagggtcccttggttccanccaatgcaaaagccgaaccttattngggccatnttgncgaaaagcctttacttttacccaaggganccttattgtttt

SEQ ID NO: 8888 - DNA, 542 bp, Homo sapiens
  misc_feature (465)..(465): "n" may be a, t, c, g, other or unknown
  misc_feature (486)..(486): "n" may be a, t, c, g, other or unknown
  misc_feature (488)..(488): "n" may be a, t, c, g, other or unknown
  misc_feature (508)..(508): "n" may be a, t, c, g, other or unknown
  misc_feature (527)..(527): "n" may be a, t, c, g, other or unknown
  misc_feature (542)..(542): "n" may be a, t, c, g, other or unknown
ctgagacagggtctcactccatcactcgctggagtgcagtggctcactgcagcctcgacctcccagactcaagcaatcctcccgccttagcctcctgagcagctgggactatgagtgcatgccagcacatccagctaatttttaaattttaatgtagagacgaggtctcgctatgttacccaggccagtctcggactcctgggctcaagcaatcctcctgctttggcctcccgaagtgctggggtgacaggaattaacatttttgatttaacttttgttttggcagattccaaactaaagacaacatgttctgacatcaagaagtgcccaggccttccctacagggaagaattctgtggaaactatgttcaaagaaaatcaagcctaagagattacaggtttcaacagactggccttcacttctactagttcaagaattgaatcctgtggaaaaggacagtttantgatatgggggaaatggaatncncctaaatggaaaagcctttnttggaaaaaatttaaattntaaagtccaaattcn

SEQ ID NO: 8889 - DNA, 533 bp, Homo sapiens
  misc_feature (320)..(320): "n" may be a, t, c, g, other or unknown
  misc_feature (343)..(343): "n" may be a, t, c, g, other or unknown
  misc_feature (376)..(376): "n" may be a, t, c, g, other or unknown
  misc_feature (409)..(409): "n" may be a, t, c, g, other or unknown
  misc_feature (412)..(412): "n" may be a, t, c, g, other or unknown
  misc_feature (505)..(505): "n" may be a, t, c, g, other or unknown
gtgggtaagatagtaggtgtatatatttatgggatactttgatacaggtatgcaatgcataataatcacagggtaaagggggtatccatcccctcaagcatttattctttgtgttacaaacaatgcaattatgctctttatttttaaattgaggctggacacggtagctcacccatgtaattccagcactttgggtggctaaggcaagcgtattgcttgtgctcaggagtttgagaccagcctgggcaatgagacaaaaccccgtctctacaaaaaaatacaaaaaaattagcctggtgtggtggcacacaccccgcggncccagctactcgggaaggctgangcaggagaatcacccgaacccaggaagccggangttgcagtgagccaagatcacgccattgcattncancctgggcaacaagcgcgaaacttcatcttaagaaccaaaaaaaatcttgcaaatctgccaatcgcacatgggtaccctatcttcctctggttnataaggccctgggacttcctttggaata

SEQ ID NO: 8890 - DNA, 382 bp, Homo sapiens
  misc_feature (371)..(371): "n" may be a, t, c, g, other or unknown
  misc_feature (374)..(374): "n" may be a, t, c, g, other or unknown
  misc_feature (377)..(379): "n" may be a, t, c, g, other or unknown
  misc_feature (381)..(382): "n" may be a, t, c, g, other or unknown
aaatgatattttctttattttaaatccagagaatgatttaacttaagaaaaagttctagacatgaaaaaagaataaaatagttaagggataagcagaacacaaggcaaaaaataacatcaaaacttcaatggctaatatgaaggctctgtattaaaaacaaaacaacaaaaaacggtaaaattttatcaagagacataagtaaaacgacaaacataacagtccctaaacaggaagacacagtgctgttaaaatgacaattatgtttcagttatcaattgaatgcaatttcaaacaaaaaccaagcttagtttttttttttttttttttttttttttttttttttttttttttttttttttttttttttttnttnttnnntnn

SEQ ID NO: 8891 - DNA, 552 bp, Homo sapiens
  misc_feature (467)..(467): "n" may be a, t, c, g, other or unknown
  misc_feature (505)..(506): "n" may be a, t, c, g, other or unknown
gaggagagcttttctactttattacaaagagaagaagcctttatgtggtcagaaaatacaagattgatctttttttctcttcctatgaaacgctgctgttcaaacagccagagtgaattgtctcagttcacttcttttaagtcccatcacattcacttgggtatggatgtccttggctgctgaaaatctggcccttttagtgcacagggcgacaaagtcccctgaccagcagttccagaatgtcccattttcatatattgcatccatgcacacctcctaaaaatgaggtacagcagggcaaacattttccaaaatagatgtcatatatataatatatacacattccgtacatacatacctttattcatgtgatgtccaaaaatttaaaaaaaatgtccacgtttattacaaaatcgtaccaagactggacaggtggtttgctcattctggaaaggatgaagctcaantaatacccaaaccctgggaaaaccatccagagaattgnnggcaatatctttctttttaaccaggcaggatattcttgcattaagt

SEQ ID NO: 8892 - DNA, 523 bp, Homo sapiens
  misc_feature (69)..(69): "n" may be a, t, c, g, other or unknown
  misc_feature (105)..(105): "n" may be a, t, c, g, other or unknown
  misc_feature (112)..(112): "n" may be a, t, c, g, other or unknown
  misc_feature (126)..(126): "n" may be a, t, c, g, other or unknown
  misc_feature (191)..(191): "n" may be a, t, c, g, other or unknown
  misc_feature (312)..(312): "n" may be a, t, c, g, other or unknown
  misc_feature (316)..(316): "n" may be a, t, c, g, other or unknown
  misc_feature (342)..(342): "n" may be a, t, c, g, other or unknown
  misc_feature (408)..(409): "n" may be a, t, c, g, other or unknown
  misc_feature (453)..(453): "n" may be a, t, c, g, other or unknown
aactttatcatttataaagccatacaatgcattgcaaagaaacaaagcagctgtacaggagtggggacncgtcagtgtacaatacattcatgtccaggataaggngcatacnccaggatttatacncgggggcagcggctataggcacgatgatacaaaatataaagtatatttccatctatataaatacncagaaagcgtgtgttccacgtggttgggggtggccgacagtgtaggacgtgtggcattaacagccccggtgctgccgtgcagggagtctttcttcttcaccttagcatacaggctcccatntagnggcccctgcgtgtgtcccaccacctnctccatgccgtcatctcgatgcccactgaagttgtcgtaggagtcccagcggatgaagggggtcannaggtgttatagtccacaagacacgcttgggcccgttttccaagngcttcatgccttgaattttctttgggcccttaagaaaaatccaacttccactttggccatacttttggga

SEQ ID NO: 8893 - DNA, 471 bp, Homo sapiens
  misc_feature (380)..(380): "n" may be a, t, c, g, other or unknown
  misc_feature (425)..(425): "n" may be a, t, c, g, other or unknown
  misc_feature (429)..(430): "n" may be a, t, c, g, other or unknown
  misc_feature (436)..(436): "n" may be a, t, c, g, other or unknown
  misc_feature (458)..(458): "n" may be a, t, c, g, other or unknown
  misc_feature (470)..(470): "n" may be a, t, c, g, other or unknown
gtcgttttattctataatttttaattagtgacgttaaacatctttcctatcggccattttacatattttttccttatgagttgccttcacttatcttcagcaaaattatctattgagatatcttttttttcctgtaatttggaagtgctcttgatatgctgaaatgtctgcactgccacattttgccctatttgttcttcagtttgcggtttgcttgcagttgtgcttatggcgttcactgtatggaagtgttgttgttccatcaaaagcaaatctattgagtcttttttcttcatggctcctgccttcggtcataaactcttacaggtactacaatgaacactcgccactgtggttaccatggtgcagatgtcttctgnatccttccagaaaaccatttgaggagtgaccttttgcaaaatgtnccanntcttgncaaagttttccagctgccaggnaaaaaggtcctna

SEQ ID NO: 8894 - DNA, 531 bp, Homo sapiens
  misc_feature (308)..(308): "n" may be a, t, c, g, other or unknown
  misc_feature (358)..(358): "n" may be a, t, c, g, other or unknown
  misc_feature (447)..(447): "n" may be a, t, c, g, other or unknown
  misc_feature (455)..(455): "n" may be a, t, c, g, other or unknown
  misc_feature (477)..(477): "n" may be a, t, c, g, other or unknown
  misc_feature (480)..(480): "n" may be a, t, c, g, other or unknown
  misc_feature (491)..(491): "n" may be a, t, c, g, other or unknown
  misc_feature (518)..(518): "n" may be a, t, c, g, other or unknown
  misc_feature (523)..(523): "n" may be a, t, c, g, other or unknown
gagatgaagtttcactcttgttgcccaggctgaagcacagtggcacgatctcactgcaacctccgcctcccaggttcaagtgattctcccgcttcagcctcctgagtagctgggattacaggtgcacgccaccacgcccggctaattttcgtagttttagtaaagacagggtttcaccatgttggccaggctggtcttgaactcctgacctcaggtgatccacccgccttggcctcccaaagtgctgggattacaggcgtgagccactgcacccggcccatggatcagagttttaattaatcatttgngttttgaaaagcccacagtagagacctctagttcagtaaaaataacttgntttccttttaggattggtaccacaggggaacacagcttttcaaagcgccttacggggaagactgagcctggaatcttgaccaatttgtngggcaaanccttaaggaaccctggcccaanccnccggccctttnaccggagggccccatttccctggttanaaaantttcccca

SEQ ID NO: 8895 - DNA, 419 bp, Homo sapiens
  misc_feature (254)..(254): "n" may be a, t, c, g, other or unknown
  misc_feature (346)..(346): "n" may be a, t, c, g, other or unknown
  misc_feature (352)..(352): "n" may be a, t, c, g, other or unknown
  misc_feature (367)..(367): "n" may be a, t, c, g, other or unknown
  misc_feature (372)..(372): "n" may be a, t, c, g, other or unknown
  misc_feature (399)..(399): "n" may be a, t, c, g, other or unknown
  misc_feature (402)..(402): "n" may be a, t, c, g, other or unknown
  misc_feature (408)..(408): "n" may be a, t, c, g, other or unknown
ccaataaagcagtttattttctgagagcccgtgccctgtcccatcccgccccacgagcccatccaggagccacacaccctgcctgggctgtgagcactattctcctggtgacacggcgctcagcccgagggacctgggacaagagctgctctgtcctgcttggtggctctcagaggagagccttgggggctctgagcagcaggtacaccgtcctcccctcctgccagcctggttctgccctcactggaagagtnaaccccgccagcagcgcccacagccccagccccacgtccaggctgccatgtcccggcgggcagtgcccaggcccagttgtattttttagcanactggntgcactataaatagnggcangcctgtcctacctgcattttgcaattnttncgaacnggtaatgctgg

SEQ ID NO: 8896 - DNA, 425 bp, Homo sapiens
  misc_feature (378)..(378): "n" may be a, t, c, g, other or unknown
  misc_feature (394)..(394): "n" may be a, t, c, g, other or unknown
  misc_feature (398)..(399): "n" may be a, t, c, g, other or unknown
  misc_feature (414)..(414): "n" may be a, t, c, g, other or unknown
  misc_feature (421)..(421): "n" may be a, t, c, g, other or unknown
  misc_feature (423)..(423): "n" may be a, t, c, g, other or unknown
ccctcctgaacaggcatttaatagtcttatttcagttggaagcaatagttggaaaataagttacaggaacagaccaaaaaaaaaaaaattaaagtgcttcaggctgcaaacgtaaacataaggggcaggaggctacctggccctgtccccaacccctgagacaggaaggtcactgtcaggggcccttagccatcaccaccctctaatctcagccctgcgggagggagggagggaatgtcagaggtgggaaagaactcaacgggaatgaggaagagactttgtaaactcagaaccagggtaaagggccggggacaagggagctctgggaacccttgccctggcctaaggggtggggccagccccccccacaggaacttnggggaaatctggtggnttanncccagccatgcccgnccacttnanag

SEQ ID NO: 8897 - DNA, 502 bp, Homo sapiens
  misc_feature (447)..(447): "n" may be a, t, c, g, other or unknown
  misc_feature (452)..(452): "n" may be a, t, c, g, other or unknown
  misc_feature (458)..(458): "n" may be a, t, c, g, other or unknown
  misc_feature (461)..(461): "n" may be a, t, c, g, other or unknown
  misc_feature (495)..(495): "n" may be a, t, c, g, other or unknown
  misc_feature (497)..(497): "n" may be a, t, c, g, other or unknown
  misc_feature (501)..(501): "n" may be a, t, c, g, other or unknown
gaaataattcaaaaactttattgacctataacctgattagaatatgccagatgggaatcaatattgtacagaaagttgtcagaattttttacatagaaaactttacatctgtccatatacattttgtccatctgaaaaaattttctacatccactgttaatacggaatgcttgacaatcttgtcttttaaccatcagagcacaattcacagtatgaatacatttccagtaaatctaacctccgcaaaccatgccagatttgttattttaatatattcaacgttaaattctgtacatagagtaaaacctacatcaagccccaccacccaaaagaaaagaaaatgacagcaatctggattcattttgcagtgattcaagttttggccataaaggatcattctattttaatggctcatctttaaaaggcctaaagagaaatttgtgacanggagntactgncantagggatattttctaacctttttttcccaatggngnaaang

SEQ ID NO: 8898 - DNA, 352 bp, Homo sapiens
  misc_feature (24)..(24): "n" may be a, t, c, g, other or unknown
  misc_feature (30)..(30): "n" may be a, t, c, g, other or unknown
  misc_feature (88)..(88): "n" may be a, t, c, g, other or unknown
  misc_feature (91)..(91): "n" may be a, t, c, g, other or unknown
  misc_feature (103)..(103): "n" may be a, t, c, g, other or unknown
  misc_feature (149)..(149): "n" may be a, t, c, g, other or unknown
  misc_feature (159)..(159): "n" may be a, t, c, g, other or unknown
  misc_feature (264)..(264): "n" may be a, t, c, g, other or unknown
  misc_feature (287)..(287): "n" may be a, t, c, g, other or unknown
  misc_feature (305)..(305): "n" may be a, t, c, g, other or unknown
  misc_feature (308)..(308): "n" may be a, t, c, g, other or unknown
  misc_feature (337)..(337): "n" may be a, t, c, g, other or unknown
  misc_feature (341)..(341): "n" may be a, t, c, g, other or unknown
  misc_feature (346)..(346): "n" may be a, t, c, g, other or unknown
acagatgaggagcctgaggcatanagaggnttattaatttgtcaatcaaaaagttccaagtttcaaagctgggatgaaaagccaggtnttntgacttgcactntgtcacactggatttttcctctgatccagctgcagcctcccataanaagttcactnttaatttcatgtcccatgctttgtcttggtccctgtgaggaaaggggtcagctaaaggcaactgttctataaggatgggtaggtatcctggcaagatatttcctntgaaatagtaaacgtgaccttanaagttactgtctagggcnctntcagctgaataaagtctcccaaggaaacnctgnggtanagcagt

SEQ ID NO: 8899 - DNA, 467 bp, Homo sapiens
  misc_feature (378)..(378): "n" may be a, t, c, g, other or unknown
  misc_feature (390)..(390): "n" may be a, t, c, g, other or unknown
  misc_feature (419)..(419): "n" may be a, t, c, g, other or unknown
  misc_feature (446)..(446): "n" may be a, t, c, g, other or unknown
  misc_feature (454)..(454): "n" may be a, t, c, g, other or unknown
  misc_feature (462)..(462): "n" may be a, t, c, g, other or unknown
  misc_feature (464)..(464): "n" may be a, t, c, g, other or unknown
aaccaaatatgaaaatgtgttttatttctcagtacaaagccagatactgtaaggctatgaaaaactgactagccagaggccagaaaggacaaaaagaagactatctctggcctggtgccctgtgatctggcgtggtgtcacaggaggtctggggacagcagcaaagacctggaccggtggaggtggatgagggaagcgatctgccagcccttccagcctcccgcggctggggcctgaggatcctgcctgcctttgggggccactggttgcctggcctggctggttccaggaatgaactgggagaggacaggaggtgcagggctagagttgagaatgaaactagggtgctgttgcccccaaaggtaccttcagtccctntaccacatccanttagaaagtcttgacccttggacaggcanacatggcctgggacttaaaggctgtangaaggtangcttgtantnaca

SEQ ID NO: 8900 - DNA, 548 bp, Homo sapiens
  misc_feature (464)..(464): "n" may be a, t, c, g, other or unknown
  misc_feature (488)..(488): "n" may be a, t, c, g, other or unknown
  misc_feature (515)..(515): "n" may be a, t, c, g, other or unknown
  misc_feature (522)..(522): "n" may be a, t, c, g, other or unknown
  misc_feature (546)..(546): "n" may be a, t, c, g, other or unknown
gatttttaaatgagaaaatttataaaagaaagaaattcatggtcacaaaattttaacattttaatcctaaacattacagggtaaatagatactggaccctatctccatactccataaaatcctaacttttagtttccatttcaaatgttgctgtaaccactaaaacactagtggttttacaacctctggattatggaaatacacatttctgaaataaatgctacaaaaacaacaatggaagaaagccaaacaaacagtctccatgaaggaaaaaaaagtggaacattttgaagcttttagacacttctctttccatgtcttatgattaacctgtcaattcagtgcattgtatggtcatatgtaatggtccccatggtgaacaaacatctaactagtgtccattgattccaagttagtagatgatgaatctttctggatactttcaaaagatacccgcagctcangggtaggactggactgggactggnattcctcatcagtggactcttctctgnttctggnaagggtagccatgctggtaccggnct

SEQ ID NO: 8901 - DNA, 533 bp, Homo sapiens
  misc_feature (481)..(481): "n" may be a, t, c, g, other or unknown
  misc_feature (483)..(483): "n" may be a, t, c, g, other or unknown
  misc_feature (506)..(506): "n" may be a, t, c, g, other or unknown
  misc_feature (510)..(510): "n" may be a, t, c, g, other or unknown
  misc_feature (531)..(531): "n" may be a, t, c, g, other or unknown
caatgcatgaatatttgattttatttcaaaagacaattatttataacactgaccctctatcaaaaagaatatgcttttctgatggggaagtgacaaaaaaaaaaactacacagaacaagagtaataaagttctcaagtaaggattgcactccaataggaattgagtgattctctcagagagcactcattacatcttagacaacgtcactcttctttcctcttggccatatgttcaggtctcatagtctttctgaacacagaatggcagtggccagcattgtccattatctatgttccgcttgtttactaattaaaaagctttggtcttcagtgttgtaaacgcaatttctgccttcgatatcaaaaggtgagtgaatgagacaagattagttgaaggaagtacttgatattttactccagatagctgaatgaaaatgggtattctcccttggctttggaggccatcggttcctactcccangnttttacagaccgggaattaaaangttnacttgcaaatttttacaaggngg

SEQ ID NO: 8902 - DNA, 546 bp, Homo sapiens
  misc_feature (478)..(478): "n" may be a, t, c, g, other or unknown
  misc_feature (481)..(481): "n" may be a, t, c, g, other or unknown
  misc_feature (499)..(499): "n" may be a, t, c, g, other or unknown
gtcctgtactgccaggttggaataatgaccaaagggaggggcaaaacaaacagatatgctcactgtggcagaagtcactccaaagatcaaagacttgattcagccgtggctgccaaaatcagaaccacagtgggtgctcatcagcacggtgccctcagaaccacatgggctacccttgataggttagcagcttggggtgcaggccccgcatcctgcttagaaccacctgctgagaactggatgtgcacattaccttacccactcacaacatttgatttcaactcaattctgctctagtattatgtttattgaatgacggaagtctaacagacactgtaaaaatccaatttcacatcttatagtacccaaaagggaactgtgattttcctatatcagtgagcaaaatcttgagccaattagtaacaagatcacccaatttctagtatttctattgagatatatttctttaggtttctgnaanggggaaataatttttggnaccttagtatcagcaatcttatattcatttataggggtatctcaagt

SEQ ID NO: 8903 - DNA, 545 bp, Homo sapiens
  misc_feature (400)..(400): "n" may be a, t, c, g, other or unknown
  misc_feature (409)..(409): "n" may be a, t, c, g, other or unknown
  misc_feature (423)..(423): "n" may be a, t, c, g, other or unknown
  misc_feature (427)..(427): "n" may be a, t, c, g, other or unknown
  misc_feature (481)..(481): "n" may be a, t, c, g, other or unknown
  misc_feature (484)..(484): "n" may be a, t, c, g, other or unknown
  misc_feature (511)..(511): "n" may be a, t, c, g, other or unknown
  misc_feature (517)..(517): "n" may be a, t, c, g, other or unknown
  misc_feature (525)..(525): "n" may be a, t, c, g, other or unknown
  misc_feature (541)..(542): "n" may be a, t, c, g, other or unknown
agtagagacacggtttcaccgtgttagtcaggatggtctcgatctcctgacctcgtgatccgcctgcctcggcctcccaaagtgctgggattacaggcgtgagccaccgcgcccggccagctttatcgtttttatcagctaagtttttaaaattgaaagtcccccccaaaggggcagcatatatgtaaatacctatttttatctacctgtacttccttcactaatattttaattatctttggtccttcctttgaaggatgaaaaatttaaagctacatgtttcgtattttctttgggccttctatcttgtgcctttcttgtttttggtgatatttttagaaaaagatatttaaaatggtcattatcaagtactgtgggctcctaatgaggaggaagggangtaattggnacccaatggtgacnttanagtggaaggggaaaaaagctgggggaaagtggcttggagacccttcttccacanganggccctgtgggccaaaccactaagctngggtanaacctgantcttgatccactgggnntgg

SEQ ID NO: 8904 - DNA, 548 bp, Homo sapiens
  misc_feature (420)..(420): "n" may be a, t, c, g, other or unknown
  misc_feature (493)..(493): "n" may be a, t, c, g, other or unknown
  misc_feature (495)..(495): "n" may be a, t, c, g, other or unknown
  misc_feature (516)..(516): "n" may be a, t, c, g, other or unknown
  misc_feature (524)..(524): "n" may be a, t, c, g, other or unknown
  misc_feature (530)..(530): "n" may be a, t, c, g, other or unknown
  misc_feature (535)..(535): "n" may be a, t, c, g, other or unknown
  misc_feature (547)..(547): "n" may be a, t, c, g, other or unknown
cttgagacggagtcttgctctgtcacccaggatggagtgcagtggcacgatgtcggctcactgcaagctacgcctcctgggttcatgccattctcctgcctcagcctccggagtagctgggactacaggcgcccgccaccgctcccggctaattttttatatttttagtagagacggggtttcactgtggtctcgatctcctgacctcgtgatccgcccgcctcggcctcccaaagtgctgggattacaggcgtgagccaccacgcccagcctaattggtctatagttctatccatttcagtgtataacactgtttggtgagtgcaattggataaaaagaaggaggagtatttaaggtagggaataaaagagatggcaaatcattgacttggtgtggccttagatagcattaattaatgnttatctcgaccgtttgtggaagctcctaatgggtttataaaagatttgaggatggccaacttttaaatccatncncaaaatctttgataccctttnttttaagngggaanggttnaatttcctggcnt

SEQ ID NO: 8905 - DNA, 263 bp, Homo sapiens
  misc_feature (61)..(61): "n" may be a, t, c, g, other or unknown
  misc_feature (63)..(63): "n" may be a, t, c, g, other or unknown
  misc_feature (122)..(122): "n" may be a, t, c, g, other or unknown
  misc_feature (131)..(131): "n" may be a, t, c, g, other or unknown
  misc_feature (189)..(189): "n" may be a, t, c, g, other or unknown
  misc_feature (208)..(208): "n" may be a, t, c, g, other or unknown
  misc_feature (215)..(215): "n" may be a, t, c, g, other or unknown
  misc_feature (232)..(234): "n" may be a, t, c, g, other or unknown
  misc_feature (236)..(236): "n" may be a, t, c, g, other or unknown
caggcatattagctttaatgtaggtggccatgagtttttaggccaaggaaggaataatgtntnatgtaccaaagcctttggacccattttccatcatacgaatagaattccctgttgctaanccgatgatncattacccttttcccataggtgtgagtggcggtctgaatggagaagttcaatagttcngattgcagatcctatgcanaagaganaataaggaaaataaccnnngnctcctggattaagctgaggctggcaaa

SEQ ID NO: 8906 - DNA, 532 bp, Homo sapiens
  misc_feature (454)..(454): "n" may be a, t, c, g, other or unknown
  misc_feature (468)..(468): "n" may be a, t, c, g, other or unknown
  misc_feature (481)..(481): "n" may be a, t, c, g, other or unknown
  misc_feature (492)..(492): "n" may be a, t, c, g, other or unknown
  misc_feature (509)..(509): "n" may be a, t, c, g, other or unknown
  misc_feature (511)..(511): "n" may be a, t, c, g, other or unknown
  misc_feature (532)..(532): "n" may be a, t, c, g, other or unknown
aagcactcaatgtaggcattttaatcttctggataacagagtatcttttgagaaattaaaatcgaattgaccatttgcaatatttggttttcctaataggtactgtcttagtaaatgtttaaatccaaacaaatcttctgttcaccgggaaaatactaataaaaatacactttctaaaaagaaattaagaaacactagggaacacctaatgtaacagaaagtagttcacgtttgttaataaactgtatttttaaatagtcctttgtttttaaattttaaaaacgtgcagataatgtcatttggatgaaaatataaatgaaacatcagttcactcttggcttcacaggttgcacagcttaggttataatgcacacaagttttataaggcctaatctaacaagggcttggaaagtcttacctcagtcagaatgacctttgatggggttataacggngtttggtggtttgncccctcgcttcanggataccatancaccggtaatagtttcngnattggcaggttttgggaaaan

SEQ ID NO: 8907 - DNA, 343 bp, Homo sapiens
  misc_feature (255)..(255): "n" may be a, t, c, g, other or unknown
  misc_feature (295)..(295): "n" may be a, t, c, g, other or unknown
  misc_feature (309)..(309): "n" may be a, t, c, g, other or unknown
  misc_feature (314)..(314): "n" may be a, t, c, g, other or unknown
  misc_feature (327)..(327): "n" may be a, t, c, g, other or unknown
  misc_feature (338)..(338): "n" may be a, t, c, g, other or unknown
  misc_feature (340)..(340): "n" may be a, t, c, g, other or unknown
cataaaaccatgtttattcaaaaaaatctattcagaaagtctggaaagcgtaataaatatctgtacagtggccacccatctcaaacatgaattacaaagcaggattgggtgaactgggactttgtgcagatcttgctgtgagggctcctggatcaggcttgaggccacaaagctgaatcctctaaacaggtctcgatgaacaaccccctgggaatggaggtagtccatggtcttggtgatggtgcacagggcgtnactggcttcgcgctccgagaagaatctctgccggaggatncggtccaggagctncccancacgcatcagctncattaccaggncncaa

SEQ ID NO: 8908 - DNA, 429 bp, Homo sapiens
  misc_feature (360)..(360): "n" may be a, t, c, g, other or unknown
  misc_feature (369)..(369): "n" may be a, t, c, g, other or unknown
  misc_feature (396)..(396): "n" may be a, t, c, g, other or unknown
  misc_feature (416)..(416): "n" may be a, t, c, g, other or unknown
  misc_feature (420)..(420): "n" may be a, t, c, g, other or unknown
  misc_feature (422)..(422): "n" may be a, t, c, g, other or unknown
  misc_feature (427)..(427): "n" may be a, t, c, g, other or unknown
gtgtgtgagtcagggtctggctctgccacccaggctggagtgcagtggcaccatcacggctcactgcagcctccacctcccagactcaagggatactcctgcttccgcctcccaagtagctggaaacataggtgcatgtcaccatgcctggctcgccctgcaattctaagccctctgtggatggaggtgggatgggcgcagatccacagcgaccatgaaatgcccagcttgcaactcacagtggaaggcaggcactgcagggacagctcacggggaagaactgacacactttctgtgaccagtgccctggacatggcccggagtcacattctaaggggggaggggggcaccaaccttcanggctttcancaccccaaccccaaaagggccctggangaaggcccgttatggggggncccngngaggnct

SEQ ID NO: 8909 - DNA, 490 bp, Homo sapiens
  misc_feature (71)..(71): "n" may be a, t, c, g, other or unknown
  misc_feature (77)..(77): "n" may be a, t, c, g, other or unknown
  misc_feature (107)..(107): "n" may be a, t, c, g, other or unknown
  misc_feature (302)..(302): "n" may be a, t, c, g, other or unknown
  misc_feature (397)..(398): "n" may be a, t, c, g, other or unknown
  misc_feature (453)..(453): "n" may be a, t, c, g, other or unknown
  misc_feature (460)..(460): "n" may be a, t, c, g, other or unknown
  misc_feature (463)..(463): "n" may be a, t, c, g, other or unknown
  misc_feature (473)..(473): "n" may be a, t, c, g, other or unknown
  misc_feature (476)..(476): "n" may be a, t, c, g, other or unknown
agtagcacgattattttattatatgctttataaaaaaacaaacacccaaagacatacaacacaccgccctnaccccncagcggccattagggagggggcttatactnttcctaatgtagatctggccatcttataaagcagaccacattatttgtttccatatatacctgtagatatttctctcccctcaaatatttatatctcgactaaaaaaaggaggtgcaaagagtatataaagataaatgagattttcttgctgttgttatagtacaaacaccagatgactaccagtggagtaacanggcaaaacaaaaacacaaaccccaccttcagtgaggaatggaaggtctgtttaccgacctcaagtagctgaatcacctgctgtaactgggacctnnctgacaatcatggggtttgtagggacatgggcccagtggatgggctttctacctngttccanaanggcttattgnggnccttacaccccttt

SEQ ID NO: 8910 - DNA, 457 bp, Homo sapiens
  misc_feature (368)..(368): "n" may be a, t, c, g, other or unknown
  misc_feature (405)..(405): "n" may be a, t, c, g, other or unknown
  misc_feature (418)..(418): "n" may be a, t, c, g, other or unknown
  misc_feature (434)..(434): "n" may be a, t, c, g, other or unknown
  misc_feature (440)..(441): "n" may be a, t, c, g, other or unknown
  misc_feature (453)..(453): "n" may be a, t, c, g, other or unknown
aaaggcagagtctcactctgtcacgcaggctggagtgcggtggcatgatcttggctcactgcaacctccaccacatgggttcaagtgattcttgtgcctcagcctcccaagtatctgggattacaggtgcacaccaccatgcatggctaatttttgtatttttagtagagatggggttttgccattttgcccaggctggtcctgaactcctgagctcaagcaatccacctgctctggcctcccaaaatgctgggattataggcatgagccactgtgcccggcctgtgggccatttttgattggcccactcattcccaaagggcgctgtacccaggcaaaatactcatatatgcaactagaaatactgnctagagtttacactcattcctattcaaaaaaattttntttaaagttcagntgaaatcattcagggnttcggnntggcttctaganggtt

SEQ ID NO: 8911 - DNA, 551 bp, Homo sapiens
  misc_feature (435)..(435): "n" may be a, t, c, g, other or unknown
  misc_feature (460)..(460): "n" may be a, t, c, g, other or unknown
  misc_feature (503)..(503): "n" may be a, t, c, g, other or unknown
  misc_feature (534)..(534): "n" may be a, t, c, g, other or unknown
  misc_feature (539)..(539): "n" may be a, t, c, g, other or unknown
  misc_feature (548)..(550): "n" may be a, t, c, g, other or unknown
ggagagacaaggtcttactatataggtcttactatattgcccagacaggtttcctgggctcaagggatcttcctgccttggcctctcgaagtgctgggattacaggtgtgagccgtgtgccaatgtgcctggccagtttttaatttttttttttttttgagccggagtctcgctctgtcacccaggctggagtgcagtagtgcaatctcggctcactgcaagctccgcctcccaggttcacgctattctcctgcctcagcctcccgagtagctaggactacaggtgcccaccaccacgcccggctaattttttgtatttttagtagagacagggtttcactgtgttagccaggatggtccttgaactcctgacctcatgtgatctgccctaccttggcctcccaaagtgctgggattataggggtgagccatcgngcccggccccttttgattctttacnagaatattgctgaagataacttttttccatgcccttaattttngtcccttgtgggcatattcatttcttcctgnaaaanggtaactgnnna

SEQ ID NO: 8912 - DNA, 486 bp, Homo sapiens
  misc_feature (2)..(2): "n" may be a, t, c, g, other or unknown
  misc_feature (7)..(7): "n" may be a, t, c, g, other or unknown
  misc_feature (10)..(10): "n" may be a, t, c, g, other or unknown
  misc_feature (13)..(13): "n" may be a, t, c, g, other or unknown
  misc_feature (16)..(16): "n" may be a, t, c, g, other or unknown
  misc_feature (19)..(19): "n" may be a, t, c, g, other or unknown
  misc_feature (24)..(24): "n" may be a, t, c, g, other or unknown
  misc_feature (333)..(333): "n" may be a, t, c, g, other or unknown
  misc_feature (407)..(407): "n" may be a, t, c, g, other or unknown
  misc_feature (410)..(410): "n" may be a, t, c, g, other or unknown
  misc_feature (431)..(431): "n" may be a, t, c, g, other or unknown
  misc_feature (433)..(433): "n" may be a, t, c, g, other or unknown
  misc_feature (439)..(439): "n" may be a, t, c, g, other or unknown
  misc_feature (448)..(448): "n" may be a, t, c, g, other or unknown
  misc_feature (466)..(466): "n" may be a, t, c, g, other or unknown
gntttgntgntgntgntgntttgnttttggttttagaaagcctcacactgtaacccgggctggagtgcaatggcatgatcttggctcactgcaacctccacctcccaggttcaaacgattctcctgcctcagcctcctgagtagctaagactacaggtgccatccaccacgcccaactaattttttgtatttttttttttttagaagagatagggtttccctatgtttaccaggttggtctcgaactcctcacctcgtgatctgcccaccttggcctcccaaagtgctgggattacaggcgcgagccactgcactcgaccgccctgagctttntttcctgcaactagagggtctgatctgtctgcttgttaagaaactgcacaacttccaaaccatcagggtaaggncgngtgtgtcgtcttgagcatttncntaaatngtaaacatnacacgtaaagttcacagnccaaattttcctgcagcttt

SEQ ID NO: 8913 - DNA, 514 bp, Homo sapiens
  misc_feature (42)..(42): "n" may be a, t, c, g, other or unknown
  misc_feature (76)..(76): "n" may be a, t, c, g, other or unknown
  misc_feature (381)..(381): "n" may be a, t, c, g, other or unknown
  misc_feature (433)..(433): "n" may be a, t, c, g, other or unknown
  misc_feature (438)..(438): "n" may be a, t, c, g, other or unknown
  misc_feature (442)..(442): "n" may be a, t, c, g, other or unknown
  misc_feature (456)..(456): "n" may be a, t, c, g, other or unknown
  misc_feature (491)..(491): "n" may be a, t, c, g, other or unknown
  misc_feature (497)..(497): "n" may be a, t, c, g, other or unknown
  misc_feature (502)..(502): "n" may be a, t, c, g, other or unknown
acaagattaaaagaacatatttcctattataccattggtagnactagggattacttggtatttcacctcttagggnccttatttcaaattctaactcgaaacactagggaaaaataacttattggcaccctgactctcaaactctcatctccaccaacaatgtcttactgtttgtaatcaccaaaattatctgttttttccggggttgaaattgtagaaagcactcaaaattaggatcatatttcaatgtgtgtaggtgaactaactgccccaaagacctacttaattaaactacatgcccttgttttttaacaaagcatctttaagtctcctggttgggttaagtgaatttgataaccttaaaaaagtcctgtggattgngtaatttttttctccactgtagaagggttaactatttcactttcacagatgnactanatgnatcatgttaccctntaataaaccattgaaaccggatctggttccagaanctggcnagtancaactggtctga

SEQ ID NO: 8914 - DNA, 509 bp, Homo sapiens
  misc_feature (391)..(391): "n" may be a, t, c, g, other or unknown
  misc_feature (422)..(422): "n" may be a, t, c, g, other or unknown
  misc_feature (441)..(441): "n" may be a, t, c, g, other or unknown
  misc_feature (454)..(454): "n" may be a, t, c, g, other or unknown
  misc_feature (464)..(464): "n" may be a, t, c, g, other or unknown
  misc_feature (467)..(467): "n" may be a, t, c, g, other or unknown
  misc_feature (478)..(478): "n" may be a, t, c, g, other or unknown
  misc_feature (493)..(493): "n" may be a, t, c, g, other or unknown
gagatggagtctcgctctgtcgctcaggctggagtgcagtggcgcaatctcggctcactgcaagctctgcctcccaggttcacatcattctcctgcctcagcctcccgagcagctgggactacaggcgcctgccacctcacccggccaattttttgtatttttagtagagatgggttttcaccacattagccaggatggtctcaatctcctgaccttgtgatccgtccacctcggcctcccaaagtgctgggattacaggcgtactgcgcccgacccattttaaccatttttaagtgtacaatccagtgggtatcagttacattcataatggctggtacaaccaacactaccatctatttccaaactttttcatcatccaaatagaacttngttcctattaagaaattaactggccaatttnccaagcctttggtaacctnttctttctgggtncaatgaaccnggnctatgctaganatttcggggtaaatnggaatcacaggattgg

SEQ ID NO: 8915 - DNA, 541 bp, Homo sapiens
  misc_feature (457)..(457): "n" may be a, t, c, g, other or unknown
  misc_feature (504)..(504): "n" may be a, t, c, g, other or unknown
  misc_feature (506)..(506): "n" may be a, t, c, g, other or unknown
  misc_feature (522)..(522): "n" may be a, t, c, g, other or unknown
  misc_feature (531)..(531): "n" may be a, t, c, g, other or unknown
  misc_feature (538)..(538): "n" may be a, t, c, g, other or unknown
  misc_feature (541)..(541): "n" may be a, t, c, g, other or unknown
aaagttatattggctcttttggttttgttcgcacttccatatgaatttcaaatctgcttttcaatttctacaaaaagcctgctagaaatttgattagcactgcattgggaagagttctcattttagcaatactgagacttctgacctttaaacaaagtatatctctccgattatttaggtcttctttaatttatttcagcaatgttttgtagtttttagtgtacaggtcttacacttattttgtcagatttacccataagtatttctttctttttttttgagacagagtctcagtttgttccccaggctggagtacagtggttcaatctcagctccctgcaacctctgcatcccaggttcaagtgattgttgtgtctcagcctcccaagtagctgggattatagggacaggccaccatgcccagctaattttttggatttttagtagaagccaaggntttgcccggtgctcaggaagggctcttaaccttctttcttgagggantnggcataccactccctntggcaaaancctggtngtn

SEQ ID NO: 8916 - DNA, 169 bp, Homo sapiens
  misc_feature (163)..(169): "n" may be a, t, c, g, other or unknown
cagaaaataaactgctttattggaattacaggagtgttggtggccggtgggcagagcctagcagggggtgcagccgccaaggcccgggtgtcccagctgttgctcaggagccgtgggccctgcaggagtatggggaggatatgatgtgtggggagcagggggnnnnnnn

SEQ ID NO: 8917 - DNA, 550 bp, Homo sapiens
  misc_feature (445)..(445): "n" may be a, t, c, g, other or unknown
  misc_feature (488)..(488): "n" may be a, t, c, g, other or unknown
  misc_feature (502)..(502): "n" may be a, t, c, g, other or unknown
  misc_feature (510)..(510): "n" may be a, t, c, g, other or unknown
  misc_feature (517)..(517): "n" may be a, t, c, g, other or unknown
  misc_feature (535)..(535): "n" may be a, t, c, g, other or unknown
  misc_feature (544)..(544): "n" may be a, t, c, g, other or unknown
  misc_feature (549)..(549): "n" may be a, t, c, g, other or unknown
aaatttaaatgcttttattaacaatcttcttacattacaaggataatatgacaaaaagaaagtttctgcgtacatattatgataaaccaacatagctctatttgtatccagtgttctaggtcccgtcacacaggtactataaagcgtagtctgcaaaataataacatcaagaggttttttttaaagaaagtattaacatattaatatgtatgtgataatagactcctaggtatttccccccatccccacttatttttcctttgtgattgacatgaaaatggttcagcagcgttgtcctgagtacagccagcagcagctgctgcgcggagcgggctgggccaaagccctgcttctggactggagtagccattgaatttatgagtgtgcagatatgtctctcccaccgtttcctgctagctgatgccccctgccctggccagaaagncttgtggatggtgggcagcgctgcctggcgatgctcatgctgnccacatcctttctnctgacagnggttgancagtgagggaaggcccgnacggttgcncttang

SEQ ID NO: 8918 - DNA, 551 bp, Homo sapiens; identical to SEQ ID NO: 7449
  misc_feature (1)..(551): "n" may be a, t, c, g, other or unknown

SEQ ID NO: 8919 - DNA, 553 bp, Homo sapiens
  misc_feature (431)..(431): "n" may be a, t, c, g, other or unknown
  misc_feature (475)..(475): "n" may be a, t, c, g, other or unknown
  misc_feature (480)..(480): "n" may be a, t, c, g, other or unknown
  misc_feature (486)..(486): "n" may be a, t, c, g, other or unknown
  misc_feature (537)..(537): "n" may be a, t, c, g, other or unknown
aaattagccaagcgaggtggctcacacctgtaatcccagcttcctgggagtctgaggtgggaggttcactggagcccaagagttcgagactgcgctgagctgtgatggtgctactgcaccccagcctgggtgacagagtgagaccccattaaaaaaaaaagaagaagaagaaagaaagaactgtttatggagcttgcaaaatcctcatcttcctacaggacacatacactatactccccacactcaaaccctgactcttccatggctggggctatcctgagtgacactatttttctcaacaatagaaaatagtttgattatagtccctatttcctgactccggaggagctcatccaactgacccaggtggcagcctcaggtgttggcgtcaccttctgggtagacatctgctggacaccggaagggagtcnaagctggcaatcttgaaggccacagtctacaacattttgggtanaggtnctcagngattttttaaaaatgggaatctgaatgccttttaggcagttttccttaagncccaacacttctatac

SEQ ID NO: 8920 - DNA, 379 bp, Homo sapiens
  misc_feature (49)..(49): "n" may be a, t, c, g, other or unknown
  misc_feature (107)..(108): "n" may be a, t, c, g, other or unknown
  misc_feature (125)..(125): "n" may be a, t, c, g, other or unknown
  misc_feature (167)..(167): "n" may be a, t, c, g, other or unknown
  misc_feature (212)..(212): "n" may be a, t, c, g, other or unknown
  misc_feature (296)..(296): "n" may be a, t, c, g, other or unknown
  misc_feature (322)..(322): "n" may be a, t, c, g, other or unknown
  misc_feature (348)..(348): "n" may be a, t, c, g, other or unknown
  misc_feature (369)..(369): "n" may be a, t, c, g, other or unknown
  misc_feature (374)..(374): "n" may be a, t, c, g, other or unknown
  misc_feature (376)..(377): "n" may be a, t, c, g, other or unknown
ccgcggtaaggcctgtgctttattgtgggtcaatctcgggggacgcggnggccagcaggggcgacgccccactcttgggtcccagcagcacagtgagcagcagccgnnccaccctgagccgccgnacagaaacagacacgcgccggcatgcggccaccgccagcctnagggccaggagcccccaaggcgaggagccacccaggactcgcctntgaaacgtccttccagccgtcgtcgaccgtggtgtctccacgtggcctggccagttcagtccagctcgatggggctgccgtcgntggggctctcctcccaatcctcctgntctgaggagcccatgaggctggtcanaaggttcccgagcaggccccngtagnannac

SEQ ID NO: 8921 - DNA, 541 bp, Homo sapiens
  misc_feature (483)..(483): "n" may be a, t, c, g, other or unknown
  misc_feature (488)..(488): "n" may be a, t, c, g, other or unknown
  misc_feature (497)..(497): "n" may be a, t, c, g, other or unknown
  misc_feature (514)..(514): "n" may be a, t, c, g, other or unknown
  misc_feature (520)..(520): "n" may be a, t, c, g, other or unknown
  misc_feature (522)..(522): "n" may be a, t, c, g, other or unknown
  misc_feature (536)..(536): "n" may be a, t, c, g, other or unknown
cttttttttgagacagagactctgtcgcccagtctggagtgcagtggcgggatctcagctcactgcaagctccgcctaccgggctcaagcgattctcccgcctcagcctcctgagtagctgggattacagaggaaggagtcagtaaacttacaaagagatcaatagaaattatctaatctgaaaaacaggagaaaagattttttaaaaaaatgaacaaagcttcagagagctgtgaaacaatatcaaaacatctatcacttttgtatttgaagttccagaaggggaatggaaagatattagtacataaaacatttattttgaagaaataatggcagaaaagttctctaatttagtgaaagatataaacttatgaaaatcaaaaagtttggccaactccagatgggataaactcaaatcaaatattttatgtatttatatgtgtaaaattcctcaccagcagactttatttctttttttgaganggccnactttggantgggcccccatgaggtncccccncnaacccaagggggcncttct

SEQ ID NO: 8922 - DNA, 550 bp, Homo sapiens
  misc_feature (474)..(474): "n" may be a, t, c, g, other or unknown
  misc_feature (496)..(496): "n" may be a, t, c, g, other or unknown
  misc_feature (499)..(499): "n" may be a, t, c, g, other or unknown
  misc_feature (508)..(508): "n" may be a, t, c, g, other or unknown
  misc_feature (513)..(513): "n" may be a, t, c, g, other or unknown
  misc_feature (550)..(550): "n" may be a, t, c, g, other or unknown
gagacagagttttgctcttgttgcccaggctggagtgcaatggtgcaatcttggctgaccacaacctccacctcccaggttcaagcgattctcctgcctcagcctcccaagtagctgggattacaggcatgtgccgccacacccggctaattttgtatttttgtttaccagagatggggtttctccatgttggtcaagctggtctcaaactcctgaccttaggtgatccatccgcctcggcctcccaaagtgctgggattacaggcgtgagccaccacgcccagccaaaagcaagtttacctctacgttgaacagaaggagctagcagctttggctgtggaacacgggccatgggaagggttttgtggggagcactaggaaggaagggctgagcagaaacagggcctctcacttctcctgggcaaagcgctgcacttcctgggcgatcctgcgcacagcggaacccccctgctncttctgggccaacacgggcatnatngcctgggcnaacanggacctgtgcttcccggggacaccattttgggaaatn

SEQ ID NO: 8923 - DNA, 554 bp, Homo sapiens
  misc_feature (442)..(442): "n" may be a, t, c, g, other or unknown
  misc_feature (483)..(483): "n" may be a, t, c, g, other or unknown
  misc_feature (485)..(485): "n" may be a, t, c, g, other or unknown
  misc_feature (497)..(497): "n" may be a, t, c, g, other or unknown
  misc_feature (515)..(516): "n" may be a, t, c, g, other or unknown
  misc_feature (539)..(539): "n" may be a, t, c, g, other or unknown
  misc_feature (548)..(548): "n" may be a, t, c, g, other or unknown
aaaggcaaataaaataagtttattgggatgtaaccccatcataaattgaggagcatccatacaggcaagctataaaatctggaaaatttaaatcaaattaaattctgcttttaaaaaggtgccttaagttaaccaagcattttgataacacattcaaatttaatatataaaaatagatgtatcctggaagatataatgaagaacatgccatgtgtacaaattcagaatacgctttttacacaaagaactacaaaaagttacaaagacagccttcaggaaccacacttaggaaaagtgagccgagcagccttcacgcaaagcctccttcaaagaagtctcacaaagactccagaaccagccgagtccgtcctcggggctccgtgtctttcaacacaccgtggacaggggaggaaatgggttctgcttgctgaccaccagcttntgatgctgatgcgatatgtagccctttgccgggcccatgtntntcaagttagccngaatacactgaactttgnnaatgggccacgtcttcaactggntggaacttnaaggga

SEQ ID NO: 8924 - DNA, 581 bp, Homo sapiens
  misc_feature (431)..(431): "n" may be a, t, c, g, other or unknown
  misc_feature (469)..(469): "n" may be a, t, c, g, other or unknown
  misc_feature (484)..(484): "n" may be a, t, c, g, other or unknown
  misc_feature (522)..(522): "n" may be a, t, c, g, other or unknown
  misc_feature (546)..(546): "n" may be a, t, c, g, other or unknown
  misc_feature (562)..(562): "n" may be a, t, c, g, other or unknown
  misc_feature (573)..(573): "n" may be a, t, c, g, other or unknown
cttttttaaacagtgatttattgtgtttcttaaggtaaaacaacaaaaacaaattctaaaattgtaactttaaattaagtggttaaaatttcagatgacagagccgataactggtaacagcttcttgaagttcatattaagagtccaattagaaacactaacaactacctggcaatagtttgaaagaatcagaagggttcggtgaagtgaaaaaaaaatccgaacatgcaaaataccccccaaaacacatgaccttctttttcattttataatctaaacttgtaaaatatttataaatacatgatcattctacacaatacagatcttctagagcatttctaaaggatattatagtttttggtcttaaggaataaagactaagatggaaaaggagatgaaaacagtgaaatctgaggaagcaatacactctntacacacaagcaaactagttcatccagtcaaggttagncggttcaggtcagtncaatgatttcaaggcacctaagaaatcaggacccgatntttcccctcctagagttacaattntttcaaaagctccaangtttccttaanggggggcg

SEQ ID NO: 8925 - DNA, 565 bp, Homo sapiens
  misc_feature (489)..(489): "n" may be a, t, c, g, other or unknown
  misc_feature (502)..(502): "n" may be a, t, c, g, other or unknown
  misc_feature (538)..(538): "n" may be a, t, c, g, other or unknown
cagatatagggtcttgctgtgttgcccggctagagtgcagcggcacaaagctcaccatggccttcaacttcttggctcaagagatcctcctacctcagccacctgggtaaaaagactacaggcatgtgctactatgcccggctaattttttgttattttttgtagagacagagtattgctatattgcccaggatggtcttgaactcctggcctcaagcaatcctcccacctttgcttcccaaagtgctgggattacaagcatggtgaggcccagcatgaacagaataaagaactcatttaatcagaataaacacaattatcctacttaccttaatcacactcccaatatggttctgttgaattaagagatctgttagttctgcagtgttcacagggagcctttagaaaaagctaaaaggaggaaaaaattattttaaattaagatcaaagcatgattctaatacttcaaatcctattttcaaatccaancatgaaattctgnggcttaagatgatgatctagaaaagcaaccccaganggaaagaaaagccccggagagtcaaat

SEQ ID NO: 8926 - DNA, 459 bp, Homo sapiens
  misc_feature (60)..(60): "n" may be a, t, c, g, other or unknown
  misc_feature (123)..(123): "n" may be a, t, c, g, other or unknown
  misc_feature (138)..(138): "n" may be a, t, c, g, other or unknown
  misc_feature (179)..(179): "n" may be a, t, c, g, other or unknown
  misc_feature (260)..(260): "n" may be a, t, c, g, other or unknown
  misc_feature (326)..(326): "n" may be a, t, c, g, other or unknown
  misc_feature (361)..(361): "n" may be a, t, c, g, other or unknown
  misc_feature (388)..(388): "n" may be a, t, c, g, other or unknown
  misc_feature (408)..(408): "n" may be a, t, c, g, other or unknown
  misc_feature (433)..(433): "n" may be a, t, c, g, other or unknown
  misc_feature (449)..(449): "n" may be a, t, c, g, other or unknown
  misc_feature (451)..(451): "n" may be a, t, c, g, other or unknown
  misc_feature (457)..(457): "n" may be a, t, c, g, other or unknown
agctttgatacatgcatatatttaataatgaaacaattcatcaacagcaaaaagaaagtngaaaaattcgtaagacctcagggctgtggaagagaatgggacatcaaggaaaaaagatatatntagcaaccaacccanaaggctgcatgatgagtgaagcaaaggcaagtttggctaanatagtattatatgctctgaaaagagaatggctggataggtacccacttatgtgactgcttactagcaggcagccttactgnatgcctcatggaatggaggcaaaaagccagggaaaggtgggaggggagaaggaagagaactgtatnaaacccagggtaaacaaatgagtggggcagaattnccgagagaggactctaaagtcttttgnttccttgaaagtctaaaatnaaccttaaggttttaactatgtcantcaaattcaatggacncntaatgngt

SEQ ID NO: 8927 - DNA, 570 bp, Homo sapiens
  misc_feature (491)..(491): "n" may be a, t, c, g, other or unknown
  misc_feature (534)..(534): "n" may be a, t, c, g, other or unknown
  misc_feature (539)..(539): "n" may be a, t, c, g, other or unknown
  misc_feature (557)..(557): "n" may be a, t, c, g, other or unknown
  misc_feature (569)..(570): "n" may be a, t, c, g, other or unknown
ataaaacataaataatcatttatactccatgattagcaatggatcctgtctgaagtaaacaaggacaattaatacagtacaagatatttgtggttttgttttttataacccactaagccaagatttgtatctctgtatggaactgattttcaaatggacagaaatggtctttgatctttctgaaccacttgtcttcaaattcttctgaggatacagtcaccaaggcagtcagggctacggagccaacacacttcacctctgggtgaacttcatcttttattttttctgggatatcttctcccataacctcagctatcaacagcaaagtgtcttctttgaagctgaaccctttcattttatcttcaatttcctgctgagtccttaagttcctctccaaagcaaacgatgtttgctgaggttgggtaaactgaagcagaagcctggttcgtataaaagaggccatgctttagctgagtctctatcaacactgnttctctcttttctgccatacagttttggatatttgcaaaagcnttctnattttctggctatactgntattcgctttcnn

SEQ ID NO: 8928 - DNA, 563 bp, Homo sapiens
  misc_feature (61)..(61): "n" may be a, t, c, g, other or unknown
  misc_feature (472)..(472): "n" may be a, t, c, g, other or unknown
  misc_feature (489)..(489): "n" may be a, t, c, g, other or unknown
  misc_feature (493)..(493): "n" may be a, t, c, g, other or unknown
  misc_feature (536)..(536): "n" may be a, t, c, g, other or unknown
  misc_feature (544)..(544): "n" may be a, t, c, g, other or unknown
  misc_feature (552)..(552): "n" may be a, t, c, g, other or unknown
  misc_feature (555)..(555): "n" may be a, t, c, g, other or unknown
gaaatggagtctcactctgtcgcccaggctggagtgcaacggcgtgatctcggctcactgnaacctctgcctcccaggttcaagcgattctcctgcctcagcctccagagtagcttctgtaaggctataaaccacagagattttcaagtaccactcagtgttcaggaagctgaacattaattacaagtgcttcttgaaagtacaagggtgaggatcttcctggaagtactattggttagataaaatctctcctggtggcagtgcctctaatcagagtctggggaatccaaatgagacgtggcaatcaagaataagtacaataaaagtccaaaaaggcttcaaaatttccatctggaggaagccaagtgtcataaggagactcaaactgggtcaggtacagagaatggtaaaagcagcattctaaacctagccaagagccatttgctgtacactcagccgcaaaatgtgcatnaagactctgtttggganctanaaattgtttcaggccagcccttttaaaaggtcccccaggctantggcattnttttggcnctngctaaaaa

SEQ ID NO: 8929 - DNA, 530 bp, Homo sapiens
  misc_feature (445)..(445): "n" may be a, t, c, g, other or unknown
  misc_feature (460)..(460): "n" may be a, t, c, g, other or unknown
  misc_feature (488)..(488): "n" may be a, t, c, g, other or unknown
  misc_feature (496)..(496): "n" may be a, t, c, g, other or unknown
  misc_feature (500)..(500): "n" may be a, t, c, g, other or unknown
  misc_feature (507)..(507): "n" may be a, t, c, g, other or unknown
  misc_feature (526)..(526): "n" may be a, t, c, g, other or unknown
gagggaaaggggagtttatttctgaggaaattcctaaggcacaaggaaaaagcaaggctttcaggtaaaaactgatgccatgggtatctagttgcatcccttcttctcaagactactcagtatgtatgtgtatgccagcagtttatactaatatttttatggcttagaatattatctcactttacagtgaaggaggcatagtattcaggattcacaataacctaccaaagtaaactgtccaaggagtttgttgtctccagccatctctctttcaccctgacacactttaatttccacttgcgtttgaccatcagcggcagtagagaatacctagggaagaagaaaccctcctgggttgtcaatgtgattaacctactccatttctatagaaaaaatgaaagccaaaggtttacattccaagactggaagactcctaatttaccgnatgttcagaacaaangctgatgtctttatagggaattgaagtngggattantacngcaaatnggccttccattccaactgnttca

SEQ ID NO: 8930 - DNA, 542 bp, Homo sapiens
  misc_feature (479)..(479): "n" may be a, t, c, g, other or unknown
  misc_feature (501)..(501): "n" may be a, t, c, g, other or unknown
  misc_feature (511)..(511): "n" may be a, t, c, g, other or unknown
  misc_feature (518)..(518): "n" may be a, t, c, g, other or unknown
  misc_feature (521)..(521): "n" may be a, t, c, g, other or unknown
  misc_feature (528)..(528): "n" may be a, t, c, g, other or unknown
  misc_feature (536)..(536): "n" may be a, t, c, g, other or unknown
agcaaagcagctgccactacagattgaatgcatctgggccatctgcgggttactgggttaaggatttttgataggaaggcctcagtgctttcgggatacgcccttgtttacactgactacactgacaacaaagtggtattagagtgttacagggttacgaagaatacctttaattatcaattataggtttcaaatttaccttggcttttaaaggaatagggtatactgtttttttcttaagtacttgtatatttctttctctttttctctctttgactttctgtctctctctctctgactttccttttgcctctgtctcttcctctttctgcctctctctttctctgtctctctttctcttttcttgactccttctttgtctctctgtctcttcctgtcttttcctctctttgtctctgctggtctttccttgcctctgccaacccgcttatgctgctggtctcttaactactggggcngggaaaggggtctaaaaaccanctggaactgnctatganggnaactggnctgggtgncttggg

SEQ ID NO: 8931 - DNA, 536 bp, Homo sapiens
  misc_feature (185)..(185): "n" may be a, t, c, g, other or unknown
  misc_feature (484)..(484): "n" may be a, t, c, g, other or unknown
  misc_feature (497)..(497): "n" may be a, t, c, g, other or unknown
  misc_feature (501)..(501): "n" may be a, t, c, g, other or unknown
  misc_feature (506)..(506): "n" may be a, t, c, g, other or unknown
  misc_feature (508)..(508): "n" may be a, t, c, g, other or unknown
  misc_feature (517)..(517): "n" may be a, t, c, g, other or unknown
  misc_feature (521)..(521): "n" may be a, t, c, g, other or unknown
gagctttacagacttgttcatgtttttgagaacctatggggatactcattgggcagaatcagagcccagcagaacacggggacggggaagggtaaagaggggaaaccgacagagtcctgaggtcatcccgggaggaagggagactacttccagaagcagcagcacaaagggctctgccgagactntgcggagggggtccagggtactgggggtggaggggtcccctcttgcagtgtggggttactgtttgggtaaagcgaagtcccaggcagtttcctgtgcacatttccacatggcctgcatgaggcgagtgaaacccatgtctttgggcttttccaggcctctcatcagccgttgcttcatgatggaaacaaattccttattgctcagttcgccattgccatcacaagtcaaaagagtgcaaacaccacattacacaccttggtctgaaaactccactttagcccttgtcctggccacctgntgcatgggtcacntttntcaananatgctccancctnttggtaaaacctcaa

SEQ ID NO: 8932 - DNA, 538 bp, Homo sapiens
  misc_feature (495)..(495): "n" may be a, t, c, g, other or unknown
  misc_feature (497)..(497): "n" may be a, t, c, g, other or unknown
  misc_feature (502)..(502): "n" may be a, t, c, g, other or unknown
  misc_feature (518)..(519): "n" may be a, t, c, g, other or unknown
  misc_feature (531)..(531): "n" may be a, t, c, g, other or unknown
  misc_feature (538)..(538): "n" may be a, t, c, g, other or unknown
gagatggagtctcactctgctgcccaggctggagtgcagtggcgccatctcggctcactgcaacctccgcctcctaggttcaagcgattctcctgcctcagcctccccagtagctggggttacaggcatgcgctaccacgcccggctaatttttgtatttttagtagaggtggggtttcgccatgttggccaggctggtctcaaacccctgacctcaggtgatctacccacctcagcctctcaaagtgctaggattacaggcatgagccaccacgcctgacccactgtacgctttttacaagcagcgtgcttttctttttcttttttttaaagacagggtctcactctgtcacccaggctggagtgcagtggcatgatcacggctcattgcagcctcaacttcctggtctcaagtgattctcctgcctcagcctcctgaatagctgagaccacaggcatgccccttcacacctggctaaatttttaaatttttgnanaaatngagtctactttaatgnncaggcttggctnaaattcn

SEQ ID NO: 8933 - DNA, 579 bp, Homo sapiens
  misc_feature (456)..(456): "n" may be a, t, c, g, other or unknown
  misc_feature (536)..(536): "n" may be a, t, c, g, other or unknown
  misc_feature (549)..(549): "n" may be a, t, c, g, other or unknown
  misc_feature (557)..(557): "n" may be a, t, c, g, other or unknown
  misc_feature (575)..(575): "n" may be a, t, c, g, other or unknown
ctcacttccctttttatttcctctaagacttgcaagcagcagcaccagagagggaacctgccctcctggccctggaaggggccgacccccaacccctaacccaggacacagctggcacctcaggcccctttccttctgaaaggagggctgtgtctctctcacattcacacatacacagacacatgcatgtgtgcacactcatggcacatgggacctcaggggtagcctgtttgccgatccccccaagaggtaccaggaggcagaccgctagaaggagataagaggcaccctggtctcctccaacccaaggaggaagaaagctcaacccctctaggatagggactgtcttcagtcaatggagcgttgacttagggggcgtttttgaaggttttttttcctcctttttgcaagtctttacaaaaatagaacttctcttggtatttataaatctacggncatggctctatgtgcattgtacaggtagaaaagccatatggggcacttcctttgggtggttaaggccttgatggcctgtnatcaggtcccttnggcttganaagtctttgcggcacctnaaat

SEQ ID NO: 8934 - DNA, 569 bp, Homo sapiens
  misc_feature (480)..(480): "n" may be a, t, c, g, other or unknown
  misc_feature (534)..(534): "n" may be a, t, c, g, other or unknown
  misc_feature (542)..(542): "n" may be a, t, c, g, other or unknown
  misc_feature (556)..(556): "n" may be a, t, c, g, other or unknown
aaatgggcaaagaacaatcatttattggtttattttgtctctactaaacacattagtcatttatcatttaaataccggacttcattagaagccgttgtaacactttttctccctcctgccataaaaatacagtaagtaatttgcttaaaaaaaacaacacaacactaggaacaagtgttctggtttcttctcactgaactaaagacatttctcagtgatttcagtttgtaaatcagtaagacagtgcaggctacaaatcagtgcaggctgaagactgagattcaaatgatcttccacttaaaagtgctgagctatggaacctgctctctctatacctctccatttcctaacatatatacaactgaaaccactgatttataaactattaagtagtgctgaattctgtctgctctattagtttaaatgaatgcaacttacctttagcattatattcagaaaaatacttacttaagcctcaanggccccaataatttggagtcctggactagataccccccttagacacttttggcncaagtaanccttcctttagcanggttccaaccctg

SEQ ID NO: 8935 - DNA, 576 bp, Homo sapiens
  misc_feature (416)..(416): "n" may be a, t, c, g, other or unknown
  misc_feature (518)..(518): "n" may be a, t, c, g, other or unknown
  misc_feature (520)..(521): "n" may be a, t, c, g, other or unknown
  misc_feature (533)..(533): "n" may be a, t, c, g, other or unknown
  misc_feature (547)..(547): "n" may be a, t, c, g, other or unknown
  misc_feature (567)..(567): "n" may be a, t, c, g, other or unknown
  misc_feature (576)..(576): "n" may be a, t, c, g, other or unknown
gtgttataagatgtgtacaccttcatggtttattgtggttttccttaagttttatccttattaggatgaagttcatgcatttctacactactcttaactaaggctcaagagacaataaaaacatagaagtaattttttaataaaaggaaataaaataatcaagtactctgagtattttcctccattctcttatccagaattttaaggcctctgaaaaataatgaaataataaaaatagtggttttgagatctaaatttattaatattttggattccttttctcagccaaaagctactatctgaattaagcttttcagtttaaaagcctggaagaccatccttagaagacattaaaaaattacttctgatacacacactcctaataatttagatagatatgaaaacaatctcaaatnaagatcaaaaaataaagtccctgtaaaaataacctttggttgctcccacccacaccgtcatatggatgatttaaactgcaatcatgaaatttggaaaaaatngnncgatcttatctnttaaaacccttccntccaaacttgaacctaaaanggttcttgn

SEQ ID NO: 8936 - DNA, 572 bp, Homo sapiens
  misc_feature (493)..(493): "n" may be a, t, c, g, other or unknown
  misc_feature (562)..(562): "n" may be a, t, c, g, other or unknown
gcaaaacaatcagaaaacatttattatactgaaatgtgtacatcctactattaaaaaaacaaagtaacaaatttgctggtgccaaaatttatttagcctgtttcactgggacgaactcacgttcaatgccactcagtataatttcaagtctgataagcatctaagtatttttaccccgcttctaaaacctgatgaggaattcaaaataagcacacagcattaaatgacatttattgttccataaatcttgagacccaaaaaggaatgctaaatagacaagcaaaacttttaaaacaaacgagataaactcacttctttccccagtgactggtacagaaaacatgtggtcacacgaaagcaaagggaaaaagtcagaaaggaaaactctctgcctatagggatctataggagttacagatattttcaaatcgatgatgaaaaatagatcgtgcttctttggagcaaataattaaccccctttatgaataaaccntaaaatgtcaaactttactcactgaagtagttggcttctggggagagattcaactcaaaattcccattnctatttttgg

SEQ ID NO: 8937 - DNA, 569 bp, Homo sapiens
  misc_feature (396)..(396): "n" may be a, t, c, g, other or unknown
  misc_feature (484)..(484): "n" may be a, t, c, g, other or unknown
  misc_feature (509)..(509): "n" may be a, t, c, g, other or unknown
atgagttcaatatttttatttctttacaatgatttcagaagagattacaaagagattaatatacttaaagaatcagactcttgcaaacagtgacatcattaaaaagagcttattttcattaacatgtgattaacaggaaggagatgattggtgagttttcttcgtaaccaggttcactgtggataggaagggcctgccttccttcccaccatggagatcctaaaatcacaagctccagcctccatcaatgatgacagggttaccagttacataagcagattcatcagaagccaaatacacgcagagcatggctatttcttctgcagttgcgaatcttccgtcttttgtctcttcaggaaatcattccgtgcctcttcaggatttcctctggcttgnattctttcttgtagagaatggcgtatcaactgttcctgggcacacacagtttgcacctgatgccctgctgggatgaaatctgcagccncagatttgtgagggccaatcacggntgccttggttgggctgtcacacattggtccaactcctgagggtggaggaaaggtcaccaa

SEQ ID NO: 8938 - DNA, 578 bp, Homo sapiens
  misc_feature (468)..(468): "n" may be a, t, c, g, other or unknown
  misc_feature (499)..(499): "n" may be a, t, c, g, other or unknown
  misc_feature (530)..(530): "n" may be a, t, c, g, other or unknown
  misc_feature (533)..(533): "n" may be a, t, c, g, other or unknown
  misc_feature (545)..(545): "n" may be a, t, c, g, other or unknown
  misc_feature (558)..(558): "n" may be a, t, c, g, other or unknown
  misc_feature (578)..(578): "n" may be a, t, c, g, other or unknown
aagatgaaacagtgttcactcacaaatctcccagttgccgttgtgttccccaggcttcacagacagcctggaaaaactcctctagggcttgcagacttagctggaaactaatcctgagcaggaagcttggcttgaagggataagaggggaccctccaggttggcaatcacgccgtttattcgcacttggcagcaagacaatggatgatgtgggaggtgccaggcccctgggttggcactaatttggagtatggttgagacagggctggagagaggcatcttagaggtggcccccaaatccgcaatcgggagaaaaaggcaagaatcgactagagattgtcaggataaagggaggcactgccacccctgctatgtctgtctgcccccacaggggcttctttaatacctggggttccctgggtgatgaatggtcctcctacccttggcaaggggcctaccctgtcgccgnggccccataggcaacccctgatgaaagagtntcatttccaagggggcttttggttctggggnggncccaccttgtcnggggtaaatggcnctgaaatgcttactgagccn

SEQ ID NO: 8939 - DNA, 539 bp, Homo sapiens
  misc_feature (17)..(17): "n" may be a, t, c, g, other or unknown
  misc_feature (34)..(34): "n" may be a, t, c, g, other or unknown
  misc_feature (51)..(51): "n" may be a, t, c, g, other or unknown
  misc_feature (76)..(76): "n" may be a, t, c, g, other or unknown
  misc_feature (80)..(80): "n" may be a, t, c, g, other or unknown
  misc_feature (88)..(88): "n" may be a, t, c, g, other or unknown
  misc_feature (116)..(116): "n" may be a, t, c, g, other or unknown
  misc_feature (183)..(183): "n" may be a, t, c, g, other or unknown
  misc_feature (321)..(321): "n" may be a, t, c, g, other or unknown
  misc_feature (342)..(342): "n" may be a, t, c, g, other or unknown
  misc_feature (361)..(361): "n" may be a, t, c, g, other or unknown
  misc_feature (384)..(384): "n" may be a, t, c, g, other or unknown
  misc_feature (450)..(450): "n" may be a, t, c, g, other or unknown
  misc_feature (458)..(458): "n" may be a, t, c, g, other or unknown
  misc_feature (478)..(478): "n" may be a, t, c, g, other or unknown
  misc_feature (517)..(517): "n" may be a, t, c, g, other or unknown
  misc_feature (523)..(523): "n" may be a, t, c, g, other or unknown
  misc_feature (532)..(532): "n" may be a, t, c, g, other or unknown
  misc_feature (536)..(536): "n" may be a, t, c, g, other or unknown
gtgtcatatccatagtntattttaaaaaactggntaaaaactaaccatacnggtttattaatatacttaaaaagtntgtnccctatgntgaagtaaaatacattagcaacatcttncggacaccatctttataaaagtaaaacttctagatcctgaaatgtactacagtagagtctatagttnacacttttaatcacagattggaattcattctccttactcccctacttcccacatgtggcagttattacttcaaaattaatgacattcactcatgttatactaccacagatccttaaatagagtacatactgcataatnactaacagagccagtcttctntatttggtgtcacatattncatataagcatttgacttaaagnacaaatagaaatactacatcccacaattgtaaacattcaccaggagcttccatagtacagtaagtnacagaggnggcccaagagtcagtcaagnggtcttcactcctggaaactggtgaaatttggaaaaccngtttgnagggaaatnttcnaag

SEQ ID NO: 8940 - DNA, 579 bp, Homo sapiens
  misc_feature (392)..(392): "n" may be a, t, c, g, other or unknown
  misc_feature (497)..(497): "n" may be a, t, c, g, other or unknown
  misc_feature (512)..(512): "n" may be a, t, c, g, other or unknown
  misc_feature (542)..(542): "n" may be a, t, c, g, other or unknown
  misc_feature (565)..(565): "n" may be a, t, c, g, other or unknown
  misc_feature (570)..(570): "n" may be a, t, c, g, other or unknown
  misc_feature (578)..(578): "n" may be a, t, c, g, other or unknown
ggaggtatgtcctgaacttccatactattaactagacacagaactgcacagcaggatgcctgctgtgtgcattccagatatagtacatagctcagctctcaaatcagcaacaaagaagataagcacaccaggtccacatagcagagaacttcacattatcaagtttctatccaaagcttcaaagaagcaaataatattttgaaagactatgtgataaaaggatcaatttttagaaagtttcatgatctgtcatggatcaatagtttataaaggacactgaaacttggatgttgaggcaatgtcaaattgccccaagtttctaaatgcttactcttcatttctgtacttaatgtggacttggatcaaatagggcatgaacccacattggtccntggactggattttgactagtattgggttaaagaagttgtcgttactcctcgaggtagtctcagatctaatttctcttggattaattgacactaatacttgaagcnctttacttactactngagaatctatctactgggtatgctttacgncttagctttatcaaattttaagntttgntaaaaccnc

SEQ ID NO: 8941 - DNA, 581 bp, Homo sapiens
  misc_feature (458)..(458): "n" may be a, t, c, g, other or unknown
  misc_feature (467)..(467): "n" may be a, t, c, g, other or unknown
  misc_feature (509)..(509): "n" may be a, t, c, g, other or unknown
  misc_feature (545)..(545): "n" may be a, t, c, g, other or unknown
  misc_feature (547)..(547): "n" may be a, t, c, g, other or unknown
  misc_feature (559)..(559): "n" may be a, t, c, g, other or unknown
  misc_feature (569)..(569): "n" may be a, t, c, g, other or unknown
  misc_feature (577)..(578): "n" may be a, t, c, g, other or unknown
gcttcatgtgaaatttattcctcaaaaaaaaatcattttttctaaacgtaactcaacattatagtaattatgcaagattttatgcagcttcaagagttagccaagagaaaagttgactcttgcaagaagatattttcaatgtctatgcagatcaggtaggtaagagttaagtgcgggggagttggcatcatctaaaagactgtagaaattggaccaaaaatgtggagttctaaagcagtatctccttatggcatgccattatttggagcaacaaggttacctactcgaatcactggatcctgagttgacacaaaacgcatctgttgactcagggtttgtataaccacgtgcagtatttactaggctatccaattctgggtccgtacaacttctggggcctgcaaattattggagagtgagtgaagggcaaccgaaaagatagcataaaaggccccgtntcgaaaggnaactggcaacatgcactccacgtttttagaaccgattcaatnggccccggtggaagccttaatggaccattcagaaantnaccctttggacnattggaaatncccttgcnnata

SEQ ID NO: 8942 - DNA, 497 bp, Homo sapiens
  misc_feature (391)..(391): "n" may be a, t, c, g, other or unknown
  misc_feature (425)..(425): "n" may be a, t, c, g, other or unknown
  misc_feature (432)..(432): "n" may be a, t, c, g, other or unknown
  misc_feature (448)..(448): "n" may be a, t, c, g, other or unknown
  misc_feature (454)..(454): "n" may be a, t, c, g, other or unknown
  misc_feature (481)..(481): "n" may be a, t, c, g, other or unknown
  misc_feature (490)..(491): "n" may be a, t, c, g, other or unknown
cttttctttctttttttttttttttttgagacagaatctcactctgtcatcgaggctggagtgcagtggcatgatcttgactcactgcaacctccacttcccaggttcaaggaattctcctgcctcagcctccccaataggtgggattacaggctcccgccaccacacctagctaatttttttgaattttcagtggagacagggtttcaccatgttggccatcctggtctcgaactcctgaccccaagtgattcacccaccttggcctcccaaaatgctgggattacaggctttgagccattgtgcccaaccacaagcacgtaagattctgaaggaggatccaacatttacatgaatttttaagccagaattgggcttcaagagattttgnccttcctgaggcttggcctggctacttccccagntacaaanaagtggtgtgtgcctntgcctncaccattaggagcagggtttggaaacncccatggtnncaagaa

SEQ ID NO: 8943 - DNA, 581 bp, Homo sapiens
  misc_feature (80)..(80): "n" may be a, t, c, g, other or unknown
  misc_feature (417)..(417): "n" may be a, t, c, g, other or unknown
  misc_feature (467)..(467): "n" may be a, t, c, g, other or unknown
  misc_feature (515)..(515): "n" may be a, t, c, g, other or unknown
  misc_feature (517)..(517): "n" may be a, t, c, g, other or unknown
  misc_feature (528)..(528): "n" may be a, t, c, g, other or unknown
  misc_feature (538)..(538): "n" may be a, t, c, g, other or unknown
  misc_feature (545)..(545): "n" may be a, t, c, g, other or unknown
  misc_feature (555)..(555): "n" may be a, t, c, g, other or unknown
  misc_feature (580)..(580): "n" may be a, t, c, g, other or unknown
gaaaattcacagcattttattcaagttaatcaatttcattcaataatctgccatattgttcccagcaccactattactgngtattatttctctttgaggaagaccaggtattaagaaatctggtttgaatttccatgatgcctaactctatggttaaaaatccttttccttaccaaaaaggaacttcttaatcaccagagaaacagagggaagactgagatatgtttgcagaaatttatctctactagagacaattcatagttcataatctttcagggttgtgctttacttgggggctccgttttcgggagcgggttgtttcccataaatgtttgcttaatacaaataatttgccccactgtaccacagaaggggaaatgagggctagtgtccccagaaagcaagcaggcagtcctncagggaagaagccctaatggctcctaatggtgacagagtcattctggctncccagcctgtgagccaatattaaagtttacctaagtggacccggagangnaatactagccngataacccanggcttanaactttaacngaaatgcctggggtttgaataatcna

SEQ ID NO: 8944 - DNA, 587 bp, Homo sapiens
  misc_feature (454)..(454): "n" may be a, t, c, g, other or unknown
  misc_feature (463)..(463): "n" may be a, t, c, g, other or unknown
  misc_feature (465)..(466): "n" may be a, t, c, g, other or unknown
  misc_feature (472)..(472): "n" may be a, t, c, g, other or unknown
  misc_feature (518)..(518): "n" may be a, t, c, g, other or unknown
  misc_feature (529)..(529): "n" may be a, t, c, g, other or unknown
  misc_feature (563)..(563): "n" may be a, t, c, g, other or unknown
  misc_feature (568)..(568): "n" may be a, t, c, g, other or unknown
  misc_feature (585)..(585): "n" may be a, t, c, g, other or unknown
aaagaaggaaggggtttattaggccggaggcatcagcaagactcctgtctcaagagccgagcccccgccccgagtgagcaattcctgtcccttttaaggactcgcaagtctaagggggtgtgcgtgagagggtcgtgatcgattgagcaagcaggaggtacgtgggtacgtgactgggggctgcacgcaccagtaattagattggaacaaaacaggaatgagattttcacaatgcttttctatacaatgtctgtaatctatagataacataaccgattaggtccgggattgattttcaactaccagtcccagggtgtggcgcccgggctgtctgcttgtggatttcatttctgccttttaagtttttactttttctttctttggaggcagaaattggcataagacaatatgaaggggtggtctcctccctttattcccccactttgagactctnactcaatancnnggagtngttcaaggttactacccatgtcttctttgctagacagatcaatagngattatatagnacccttgggctgatgccatttgggcactaagganccatnaacttttatctttgaanaa

SEQ ID NO: 8945 - DNA, 292 bp, Homo sapiens
  misc_feature (54)..(54): "n" may be a, t, c, g, other or unknown
  misc_feature (234)..(234): "n" may be a, t, c, g, other or unknown
  misc_feature (265)..(265): "n" may be a, t, c, g, other or unknown
  misc_feature (271)..(271): "n" may be a, t, c, g, other or unknown
  misc_feature (276)..(277): "n" may be a, t, c, g, other or unknown
  misc_feature (289)..(289): "n" may be a, t, c, g, other or unknown
  misc_feature (291)..(291): "n" may be a, t, c, g, other or unknown
aaaataaattcttttattgagatgagagacggacacacactgggagggttttgntttttgttgttgatttttttgtgactgagtcccagtactcagggaggctcagactggaggcggcggagcaggcaggcggcggcaaggctggccccctggcgctggggccgcgcatacttgaggaagactgcggcgcgacccggcgcgggacctcggagcgcagcgcgggccatgcacggntcgagggtgcccagttcctcggggctgcagnaggganatggnnaaactgatgcangnc

SEQ ID NO: 8946 - DNA, 564 bp, Homo sapiens
  misc_feature (59)..(59): "n" may be a, t, c, g, other or unknown
  misc_feature (264)..(264): "n" may be a, t, c, g, other or unknown
  misc_feature (266)..(266): "n" may be a, t, c, g, other or unknown
  misc_feature (340)..(340): "n" may be a, t, c, g, other or unknown
  misc_feature (474)..(474): "n" may be a, t, c, g, other or unknown
  misc_feature (482)..(482): "n" may be a, t, c, g, other or unknown
  misc_feature (494)..(494): "n" may be a, t, c, g, other or unknown
  misc_feature (502)..(502): "n" may be a, t, c, g, other or unknown
  misc_feature (533)..(533): "n" may be a, t, c, g, other or unknown
  misc_feature (542)..(542): "n" may be a, t, c, g, other or unknown
  misc_feature (547)..(547): "n" may be a, t, c, g, other or unknown
cattaaaagtaaatttattgtttgtttaaaaaaaacaacaactgtgcaatatgtgctgntcaagacatgttttgaatcgctttgttgttcatctcttctcgggcttcagtttggcaaggctgaacatgtctcccaagcccttcagcattcccttcttggctttcattttatccttctccttatctctatctttcttcttttcttttccagttttatccttttttctatcagtcttatcacctttctcttggtttccattcattngnctctccagagagtgggaaggctgatcactggctgtggatacagactctctccctgatcttgaactttcttctgngtcttcttccaaggtctccatgccttcatcatcatcatctaccgcgggtttatcataagatttgtcgatggcagctctgaagctctcattgcatcccctgcctctgattatccgcggccgtggaccatggaaanggaatatncccattcaaagnccctcggnaactgggggctggagacttttcaaagggctngctttttanacccngggagggccccattttt

SEQ ID NO: 8947 - DNA, 587 bp, Homo sapiens
  misc_feature (275)..(275): "n" may be a, t, c, g, other or unknown
  misc_feature (340)..(340): "n" may be a, t, c, g, other or unknown
  misc_feature (386)..(386): "n" may be a, t, c, g, other or unknown
  misc_feature (407)..(407): "n" may be a, t, c, g, other or unknown
  misc_feature (450)..(450): "n" may be a, t, c, g, other or unknown
  misc_feature (469)..(469): "n" may be a, t, c, g, other or unknown
  misc_feature (518)..(518): "n" may be a, t, c, g, other or unknown
  misc_feature (528)..(528): "n" may be a, t, c, g, other or unknown
  misc_feature (532)..(532): "n" may be a, t, c, g, other or unknown
  misc_feature (558)..(558): "n" may be a, t, c, g, other or unknown
  misc_feature (570)..(570): "n" may be a, t, c, g, other or unknown
  misc_feature (572)..(572): "n" may be a, t, c, g, other or unknown
gcaagtgggttctttagctctacaaatttttaatatatattataatacagttaattgacaattacagagctgcatttcttggctgggatttaacaagtttaaacaaggtaatgaaatgaagaaaaaaaaagtctaaatcaacttactctatatgcaatagctcttcccaagtattacgaaactagaaagcatcattcattcccaatccattgcactaatccatcaatttctcaatcatcactcattcttaacactcacaatctttctcttcctgntagtcattcattaatttaataaatatttaatgagtcctcacaatgtgcagggcacaagtagaatntggaaaacaccgtactgccaaaataggtcactaaagtcactaaggnacactaaaggcggggcgaaangtggtgttggagacagttccagagcttaatgctttttgcttgncaagagtattcttaatccncagtaggatgacccactggtctttccagtgaaaggttaatggaaaatgnggcaataagncctnttttccttttaacaattagaatgttnttgaaaaaatangngagactaaaggcccc

SEQ ID NO: 8948 - DNA, 601 bp, Homo sapiens
  misc_feature (528)..(528): "n" may be a, t, c, g, other or unknown
  misc_feature (546)..(546): "n" may be a, t, c, g, other or unknown
gagatggagtcttgctctgttgcccaggctatagtgcagtggcatgatctcggctcactgcaatctccgcctcccaggttcatgcaattctcctgcctcagcctcccaagtagctgggattataggcaggcgccactacaccagataatttttgtatttttagtagagatggggtttcaccatgttggccaggctagtctcgaactcctgacctccagtgatctgccccccttggcctcccaaagtgctgggattatagatgtgagccaccgtgcccagacatcgaccatatatcttaatgaagcaaaaaactcaggggcaagaatagcaagcatgataccacagtaagaaagtaggtcgtgtgtatagtcagatttgtacaattactcctcaaatggaataggaaaatgaatggaaaggaattgtattaaaatgatctgatcccaaacgtcttgcttttctgggattaaggtaatgggttacaccaaaacgtctggtctctgcactattggatctttccccattggnttctaaataattgttgcnccgggactaaatctctttcaattaatttaatccaaaggaattaggaaaacccaat

SEQ ID NO: 8949 - DNA, 571 bp, Homo sapiens
  misc_feature (441)..(441): "n" may be a, t, c, g, other or unknown
  misc_feature (467)..(467): "n" may be a, t, c, g, other or unknown
  misc_feature (479)..(479): "n" may be a, t, c, g, other or unknown
  misc_feature (508)..(508): "n" may be a, t, c, g, other or unknown
  misc_feature (513)..(513): "n" may be a, t, c, g, other or unknown
  misc_feature (539)..(539): "n" may be a, t, c, g, other or unknown
  misc_feature (557)..(557): "n" may be a, t, c, g, other or unknown
  misc_feature (566)..(566): "n" may be a, t, c, g, other or unknown
  misc_feature (570)..(570): "n" may be a, t, c, g, other or unknown
gaggcagagtcttgctctgttgccccggctggagtgcagtgacacgatcttggctcactgcaacctccacctcccgggttcaagcaattctcctgactcagcacccaagcagctaggattacaggcatgcaccagcacgcccgactaatttttgtatttttagtagagacggagttttgccatgttgggcaggctggtttctaactcccgacatctggtgatctgtctgcctgggcctcccaaagtgctgggattacaggcgtgagccaccttgcccggcaagcagcctctgatttcaactcaagagacagaagaggatcccaaattccaagcaactcccaagatgcaaatcaaaatatggaaatgttaaacaaattgaaggatttcccaatagttacctgcaacacctaaaggcactggtttccaaatgggcaagaactntgcaaacaatatgttggttgctggtnaaatcaaggccnggacctttttaccggtttaacattttggnttggnccttttgaatttgggggaaactttanaccccctgtttaacttanggaggcctnaaant

SEQ ID NO: 8950 - DNA, 567 bp, Homo sapiens
  misc_feature (416)..(416): "n" may be a, t, c, g, other or unknown
gagatggagtctttctctgtcgggaagaaagaaagaaaaagaaaagaaaagaaaaaagaaaagaaagagaagggagggagggaattagtgaccaaaaagaaaatgacatgatcagtgttcttttaatcactcacacctgagaatcaaattcattaacagtcaacttgcgcagaccgtagcaggtttcaccccagccttagggagtttatttttaaatgcacggccttgtgcatagtttttcctcgaatatgtatttcacaagtccttcccacaccttccctggtgagagaaagcaattaagactacacaatggcatgacttacagaaagcaatttatgaaaggtagcctcactaatgttttgcttccaggcttttcgatagggtgttcttcttgcctggaatgcttgttcctcctncacattcacttccctttgcctaactaattgctcttctaagtggctcatcgcattgatctcatacgtcttaaaaaccctcattagttcctaacactggatcgggacctttcatgctttccaaagcatcctgctttaccctacaccagccccc

SEQ ID NO: 8951 - DNA, 562 bp, Homo sapiens
  misc_feature (413)..(413): "n" may be a, t, c, g, other or unknown
  misc_feature (482)..(482): "n" may be a, t, c, g, other or unknown
  misc_feature (487)..(487): "n" may be a, t, c, g, other or unknown
  misc_feature (514)..(514): "n" may be a, t, c, g, other or unknown
  misc_feature (516)..(516): "n" may be a, t, c, g, other or unknown
  misc_feature (523)..(523): "n" may be a, t, c, g, other or unknown
  misc_feature (542)..(542): "n" may be a, t, c, g, other or unknown
  misc_feature (547)..(547): "n" may be a, t, c, g, other or unknown
gggagtataaaaataggacttttttccttatcacatcaattatcaaagaaacagtacgtaacaaaaatacaaagctctggtggatttttttgtcttttgtcccccccaccaccacttctacccaacagccccttgccagggagcccttggctgaagcctggacgctgtccctgaggtgaccccagggctcaggagaaacggtggtccaggtctctctgggggctagcagagtatgagtaggccttgcccaataccaagcggtcccggagcagcttgaagaaggcatagtagttgctgaagaggatgagggccagcgagatggtctggtgccacttttcagaggacattagggagtacagctgatagacaatgacagcgccctccagcagcaggaggatgttgaggatccgcangggtttgctgaaaaagaaatggaaaccggaagtgggaaacctcagaagggatagccccgttgtaatggnctacngctttgtagaccgtcttgctgggcttnancaacacnccctggggcacatgcattnttaanccacgggtgctggaa

SEQ ID NO: 8952 - DNA, 535 bp, Homo sapiens
  misc_feature (400)..(400): "n" may be a, t, c, g, other or unknown
  misc_feature (481)..(482): "n" may be a, t, c, g, other or unknown
  misc_feature (492)..(492): "n" may be a, t, c, g, other or unknown
  misc_feature (510)..(510): "n" may be a, t, c, g, other or unknown
  misc_feature (516)..(516): "n" may be a, t, c, g, other or unknown
  misc_feature (519)..(519): "n" may be a, t, c, g, other or unknown
  misc_feature (530)..(530): "n" may be a, t, c, g, other or unknown
gctgtcacatcatgtatgtatttaatttatacaaatatacaccaagggaggaaaggtagatgggggagcggggaagatacattatgatttgaatagtgtgggtgattctgtccacgctctacatttaatcgacatgatccagtgtgagcagagatgggagaggtgaatccactgtttcttcgggcctgtccacaatgtgagtatctctgtcctgaatgtggtcctaatatttcatgaagtgtatattccaaattaacataaacctgaacagaagccaactacttcatctggtgcttaaccaaagaaactgctacacaatgtttcaaacacaggagaaaacctggttgttacatatgctgtacagtataccatacttaattataatttaacagcaaagtanaattttgaccacacaggacttttgcttttagatagactttagaatctaacttttcccccttttaaagctggactttactgnntatcctcttnccacaaccttttccaaanggatcnttnttttccacttnagggc

SEQ ID NO: 8953 - DNA, 513 bp, Homo sapiens
  misc_feature (220)..(220): "n" may be a, t, c, g, other or unknown
  misc_feature (449)..(449): "n" may be a, t, c, g, other or unknown
  misc_feature (464)..(464): "n" may be a, t, c, g, other or unknown
  misc_feature (475)..(475): "n" may be a, t, c, g, other or unknown
  misc_feature (479)..(479): "n" may be a, t, c, g, other or unknown
  misc_feature (482)..(483): "n" may be a, t, c, g, other or unknown
  misc_feature (500)..(500): "n" may be a, t, c, g, other or unknown
gagacagagtttcactcttgttgcctaggctggagtgcaatggcatgatctcagctcactgcaacctctgcctcccgggttcaagtgattctcctgcctcagcctccttagtagctgggattacaggcaggcgccaccacgcccggctaattttgcgtttttagtagagatggggtttctccatgttggtcagtctggtctcaaactcctgacctcaggngatccgcccatcttggcctcccaaagtgttgagattacaggcgtgagccaccgtgcccggcctagatttttttttgcttaaagacagggtcttgctctgttgccaaggctggagtataagtggtccaatcatagctacagtagccttgactatctgggctcaagcaatcctcctgccttacctcccgagtagctgggactataggcatgcaccaccaggcccagctaantttttttttttttgnggcggaatttnactntgnncccaggctggaatgcantggcccgacttag

SEQ ID NO: 8954 - DNA, 523 bp, Homo sapiens
  misc_feature (299)..(299): "n" may be a, t, c, g, other or unknown
  misc_feature (335)..(335): "n" may be a, t, c, g, other or unknown
  misc_feature (338)..(338): "n" may be a, t, c, g, other or unknown
  misc_feature (344)..(344): "n" may be a, t, c, g, other or unknown
  misc_feature (432)..(432): "n" may be a, t, c, g, other or unknown
  misc_feature (469)..(469): "n" may be a, t, c, g, other or unknown
  misc_feature (479)..(479): "n" may be a, t, c, g, other or unknown
  misc_feature (482)..(482): "n" may be a, t, c, g, other or unknown
  misc_feature (487)..(487): "n" may be a, t, c, g, other or unknown
  misc_feature (510)..(510): "n" may be a, t, c, g, other or unknown
  misc_feature (518)..(518): "n" may be a, t, c, g, other or unknown
gagtttttaaatagtcaagctctcacttttcaaatgttggcaaatatttttaaaaatttaaatgtgcaggccaaacaagaggcacagggaaacaggcaggccacggcctctgcagccctgggaaacgctctgagtgatggtgtacaggctatgcagtggggaaggaagaactcagcacagcctccaaggacaacttggcagtatctatggaaattttacattcaatagccttcgacccagcaattccatgtctaggagttgattcttttgaataatcacttgtgaacaaaacacaggtncaagaatgttccctgcagtcaagtttcagctgggcncantggttnacacctgtaatcccagcactttgggaggccaaggcaggggcgatcacctgaggtcaggaattcaagaccagcctgggcaacatggcanaactccgctttactaaaaatccaaaaattaccttggncttggtggcntgncttgnaatcccggttagccggaaggttnaaccccanaattg

SEQ ID NO: 8955 - DNA, 474 bp, Homo sapiens
  misc_feature (289)..(289): "n" may be a, t, c, g, other or unknown
  misc_feature (390)..(390): "n" may be a, t, c, g, other or unknown
  misc_feature (405)..(405): "n" may be a, t, c, g, other or unknown
  misc_feature (419)..(419): "n" may be a, t, c, g, other or unknown
  misc_feature (426)..(426): "n" may be a, t, c, g, other or unknown
  misc_feature (429)..(429): "n" may be a, t, c, g, other or unknown
  misc_feature (463)..(463): "n" may be a, t, c, g, other or unknown
  misc_feature (472)..(472): "n" may be a, t, c, g, other or unknown
cctgtaactgtgtttaaattccttatagatgctagatattagccccttgtcagatgcatagtttgcaaaaattttctgtcatttggtagattgtctgccctgttgtttattttgctatgaaaaagctcttaaatccaatttgtccatttttgcttttgttacaattgcttttggtgtcttcatcatgaaatctttgccagttcctatgtccagaatggtattgcctaagttatcttcaggatttttataattttgggttttaactctttaaaccatcttaatttttgtncatagtaaaaggggtccagttacgatcttctgcatatggccaaccagttatcccagcaccatttattgaatagggagacctttccccattgcttggttttngcaactttgttgaanacaaatggctgganggtttgnggnctaatttttgggctctctattctggcccactggncctgggggncc

SEQ ID NO: 8956 - DNA, 571 bp, Homo sapiens
  misc_feature (23)..(23): "n" may be a, t, c, g, other or unknown
  misc_feature (450)..(450): "n" may be a, t, c, g, other or unknown
  misc_feature (494)..(494): "n" may be a, t, c, g, other or unknown
  misc_feature (497)..(497): "n" may be a, t, c, g, other or unknown
  misc_feature (571)..(571): "n" may be a, t, c, g, other or unknown
gctttaaaaaattttgctattgntataattttgatgcaatggatcaaaatcaagataccaaaagaatatgctcagcaagtttcagaggtcaatatttccatttaaaattatattgaaaattaaactagttgaatcataattattttatttagcaataaaatagctacttctttgaaaaattacttaaacctataaacctcttttaaaaattgataaatgttttatgatcttactttacttttttttccttaagattctgagtcttgaaagtttatttcaaagaaaagacaatgcctgtgccacatatttgacttgggtgagtgactagaaactccaagagcgggataaaccaaatttggctagctgaactgtataattttaaaatatttccttttatctcttattctggctttacctgacatgatggcagcatgtgagcaaggacaattncaacatggccctgaaaaagtcagtaagaccaaccagttagcttnggnccccagcttttcctcatctggaaccccatcttggccaataaaacctggaccttgatgggatttgaaaagccatn

SEQ ID NO: 8957 - DNA, 507 bp, Homo sapiens
  misc_feature (433)..(433): "n" may be a, t, c, g, other or unknown
  misc_feature (442)..(442): "n" may be a, t, c, g, other or unknown
  misc_feature (455)..(455): "n" may be a, t, c, g, other or unknown
  misc_feature (457)..(457): "n" may be a, t, c, g, other or unknown
  misc_feature (461)..(461): "n" may be a, t, c, g, other or unknown
  misc_feature (503)..(503): "n" may be a, t, c, g, other or unknown
  misc_feature (507)..(507): "n" may be a, t, c, g, other or unknown
atcaagatagggtttcactgcattgcccacactggtctcaaactcctagcctcaagcagtcttcccaccttggcctcccaagtgctaggattgagtgtgagccactgcacctgacctataattctggttttagcaatagacttacgtaagttggttataaataccatgagtaatttaagtgatagtaagagaagtaggatagagactatatcaaggtttgagatccttttgtcatttgtaagtgtgatgactgggcattcacacgtgtgagatgtgcctccctcaaaccttgttatgacgtcggcactttacccatgaaaaaggggttgaactgcagactggaagaaataggaagccaattaaatagatcattgagaagatcagtagtttgtgcctcttgtaaccatttagcttgcttggaaattctttctgngcaagtctntactttacccgangngtcnatgtaagtgcaacaggcctgtgagctctggcaaacttcttgnccan

SEQ ID NO: 8958 - DNA, 584 bp, Homo sapiens
  misc_feature (468)..(468): "n" may be a, t, c, g, other or unknown
  misc_feature (485)..(485): "n" may be a, t, c, g, other or unknown
  misc_feature (512)..(512): "n" may be a, t, c, g, other or unknown
  misc_feature (540)..(540): "n" may be a, t, c, g, other or unknown
  misc_feature (546)..(546): "n" may be a, t, c, g, other or unknown
  misc_feature (557)..(557): "n" may be a, t, c, g, other or unknown
  misc_feature (561)..(561): "n" may be a, t, c, g, other or unknown
  misc_feature (574)..(574): "n" may be a, t, c, g, other or unknown
agtagagacggggtttcacccgtgttagccaggatggtgtcgatctcctggcctcgtgatccgcctgtctcggcctcccaaagtgctgggattacaggcgtgagccaccgtgcctggcctgtggtgtttatttttctatgccaggcttatttcacctaagataatgccctccagttgcattcatgttgccacaaatgacaggattttgttctttattataacttaatagtattccattatatatgtatgtcacattttctttatccattcatctgttgatggacacttatgttgattccatatcttggctattgtgaatagtgctgtaataaacatgggggtgcaggtaaggctttgatatattgattttctttcctttggacatatattgaaaaccatatgattaaaatcaataaacacaatgaaagcatttggcaaaattaaacgttcttacatgacaaaagcctntaaaccaatttaagtgnggaaaacatatgccttaaccacaaaangggcgtaaagacaacccttcagcttaanatcatnctggacctggnaaangggaaaaatggtnccttgaaaat

SEQ ID NO: 8959 - DNA, 560 bp, Homo sapiens
  misc_feature (289)..(289): "n" may be a, t, c, g, other or unknown
  misc_feature (373)..(373): "n" may be a, t, c, g, other or unknown
  misc_feature (463)..(463): "n" may be a, t, c, g, other or unknown
  misc_feature (469)..(469): "n" may be a, t, c, g, other or unknown
  misc_feature (482)..(482): "n" may be a, t, c, g, other or unknown
  misc_feature (500)..(500): "n" may be a, t, c, g, other or unknown
  misc_feature (508)..(508): "n" may be a, t, c, g, other or unknown
  misc_feature (515)..(515): "n" may be a, t, c, g, other or unknown
  misc_feature (548)..(548): "n" may be a, t, c, g, other or unknown
cagttgtatgccaagtgtttaagctttacttaaagtaaaattagagtatgaaacctatttgacaatatatgaatacaaatccataaaccctgaaacaaagcatatataaatgctcttaccaatgcaaaaacttccatctgttagatacataaagagcacttccttaaaagcgacatgtattttatactgaccgctgtagtcaattttaatcaaaaactacacaaatattttatttgtattttagagacggggttttgctctgttgctcaggctggattccaactcctgngcttaagcgatcctcctgcctcagcctcccaagtagctgggactacagatgcacaccactgtgcccagctaaatattttaatgngattggtttcaacagtttatacccacagttttgatgtgaaactggcaaacctatgggctgacagccacagcccatgtagagggatgactntaagcncacttaattttgnttaaaaaaaaaaaatctngaccctgntaaaggncaaatctgaatggaaaatggggggatttaatcntccatgggggac

SEQ ID NO: 8960 - DNA, 502 bp, Homo sapiens
  misc_feature (404)..(404): "n" may be a, t, c, g, other or unknown
  misc_feature (421)..(421): "n" may be a, t, c, g, other or unknown
  misc_feature (439)..(439): "n" may be a, t, c, g, other or unknown
  misc_feature (442)..(442): "n" may be a, t, c, g, other or unknown
  misc_feature (455)..(455): "n" may be a, t, c, g, other or unknown
  misc_feature (458)..(458): "n" may be a, t, c, g, other or unknown
  misc_feature (493)..(493): "n" may be a, t, c, g, other or unknown
agagggtaaaacactccaatgccaatttattttcaaaaagggctctgtgttatcctatagtttgccttttttttttttttgtataattgtacaacctttgaaagttacataagttgtgatgatctaatactattaatagccattcagaaaacactttccctccctcccaacaaccatccagggggaaataaaagtcctgaaaagaggccagttcaacatggcctctaccctggtagaaacaaaaagtgaaaagagaagaaaacagaaatcaactaagaggtgttgccagtgtctctcaggagtggggccctggctgttgcctggggtcatgaaaggcagagcctgcagcatgcagtatggcagccgggagaccttgcagccacatcttcctaccccggcacatncacattccaacttaggngtcatgggaatctttcancangggtcttcttcgntgnttccgctttatgcatctgggtcttcaagtcccctntggcatact

SEQ ID NO: 8961 - DNA, 576 bp, Homo sapiens
  misc_feature (362)..(362): "n" may be a, t, c, g, other or unknown
  misc_feature (434)..(434): "n" may be a, t, c, g, other or unknown
  misc_feature (474)..(474): "n" may be a, t, c, g, other or unknown
  misc_feature (487)..(487): "n" may be a, t, c, g, other or unknown
  misc_feature (494)..(494): "n" may be a, t, c, g, other or unknown
  misc_feature (528)..(528): "n" may be a, t, c, g, other or unknown
  misc_feature (539)..(539): "n" may be a, t, c, g, other or unknown
  misc_feature (555)..(555): "n" may be a, t, c, g, other or unknown
  misc_feature (574)..(574): "n" may be a, t, c, g, other or unknown
gtatttttagtagagacggggtttcaccatgttggccaggatggcttcaatctcctgaccttgtgatccacccaactcagcctcccaaagtgctggtattacaggtgtgagccaccgtgcctggccagtctctgtctgctttgttaactactgaaggtcttaaaacttaaaggagaatgtaaactacaaatgacccaatactaaagctagttaacggaagtactgatactttttattcttttcagggaccgtttatctaaaaaatgttaaggcttatgctttcagatctcagtccaatttctagaaattaacaatgagtccttttatagcacttacctttctcttcctgccttccccacctncaccccaaacttgctttgggtgttctttaatctttcaagggagtgataaatgtcacaaactcttaaataaanggctgaaatggcaaccgtatgactggtttgactggctttnaagtagtattagncttctanaatctaatctaaatcttagaaccggaaacccganggaactcaatngtccaaagggaagttnataataattggattcttcncg

SEQ ID NO: 8962 - DNA, 548 bp, Homo sapiens
  misc_feature (5)..(5): "n" may be a, t, c, g, other or unknown
  misc_feature (43)..(43): "n" may be a, t, c, g, other or unknown
  misc_feature (439)..(439): "n" may be a, t, c, g, other or unknown
  misc_feature (457)..(457): "n" may be a, t, c, g, other or unknown
  misc_feature (487)..(487): "n" may be a, t, c, g, other or unknown
  misc_feature (500)..(500): "n" may be a, t, c, g, other or unknown
  misc_feature (511)..(511): "n" may be a, t, c, g, other or unknown
  misc_feature (529)..(530): "n" may be a, t, c, g, other or unknown
  misc_feature (541)..(541): "n" may be a, t, c, g, other or unknown
aaagngtagcaaccctttaatggatgttcaatacaatacccgntcatatcacttatacaaactttctcagtacaattttgttcacgatcatgataatgctgaatgacagagtgaggaagtgggattaacaaaaaagtaaaagcttccagaccagccagagctaaagtcaaattaaggctctgctcttgccagccactccaaccttaaagaagttatgttattatcatggataaatttttacacaagattgtaaaaattaaacgttaaggataaaagcccacaacacgtgactgatattcctcaaatattaatttcactatttgtgacccctaaataaatgcatcttccaggtgttctgaacacctaggttatagctgctcagcatgtaagcccctatgataacttgagccctttcccctttccttccccagtggtgaanggagaatgacattccttntcctggccactggctcaaaggtggcttatnggctatgcacagntcccccaatanttcctggttggagctccnntttcaagggcnaggccaa

SEQ ID NO: 8963 - DNA, 507 bp, Homo sapiens
  misc_feature (34)..(34): "n" may be a, t, c, g, other or unknown
  misc_feature (75)..(75): "n" may be a, t, c, g, other or unknown
  misc_feature (89)..(90): "n" may be a, t, c, g, other or unknown
  misc_feature (410)..(410): "n" may be a, t, c, g, other or unknown
  misc_feature (431)..(431): "n" may be a, t, c, g, other or unknown
  misc_feature (444)..(444): "n" may be a, t, c, g, other or unknown
  misc_feature (458)..(458): "n" may be a, t, c, g, other or unknown
  misc_feature (490)..(490): "n" may be a, t, c, g, other or unknown
  misc_feature (492)..(492): "n" may be a, t, c, g, other or unknown
  misc_feature (497)..(497): "n" may be a, t, c, g, other or unknown
gatttaattcttcagctaaaacagcggaagaggngatttattatatgggtggtacacttcgggcccaaataaacnccagaaatagtccnngaatgtcacaaggtccagggcagaggactgaaatttgtggcgagctgcatggaaccgttggttgatccctacttggtacgatgactggtagccagggctgctagctgatgaccccaataaacgcttagtgagtaccggcgaagagcaaggagaggatgttagagaggaggaggcagtgctgctgggagacagtgagctcccactggaagagaggggactgggcattgggactggagtctcaatccccacaggacacccaccattctccactggtttctcttgggccaatgccacagatttttcccgtggaggcacttggntttctacattggtgcctgcantcaacttcctggnagtttggatctctnggtcacaatggcccttgggttttgcattttantnaaccngaattgcagg

SEQ ID NO: 8964 - DNA, 292 bp, Homo sapiens
  misc_feature (14)..(14): "n" may be a, t, c, g, other or unknown
  misc_feature (56)..(56): "n" may be a, t, c, g, other or unknown
  misc_feature (68)..(68): "n" may be a, t, c, g, other or unknown
  misc_feature (85)..(85): "n" may be a, t, c, g, other or unknown
  misc_feature (97)..(97): "n" may be a, t, c, g, other or unknown
  misc_feature (100)..(100): "n" may be a, t, c, g, other or unknown
  misc_feature (156)..(156): "n" may be a, t, c, g, other or unknown
  misc_feature (214)..(214): "n" may be a, t, c, g, other or unknown
  misc_feature (237)..(237): "n" may be a, t, c, g, other or unknown
  misc_feature (240)..(240): "n" may be a, t, c, g, other or unknown
  misc_feature (243)..(243): "n" may be a, t, c, g, other or unknown
  misc_feature (258)..(258): "n" may be a, t, c, g, other or unknown
  misc_feature (263)..(263): "n" may be a, t, c, g, other or unknown
  misc_feature (277)..(277): "n" may be a, t, c, g, other or unknown
cctgagcagtcggncccaacagtgggcttaaaatactcagtccactatgatgtaancagacatgctgncatccaggctttgttgntccatttataangcncaggcagagtagattcaccaaattctaagggtcctaggattatcagaatgataaangagcactagcttccacttaaaagtgaccagctgcattatccactaatgagagttagcntgtcctttcaaagcagatgttgnctnctntctagttatgaaagncctanacggcaccttcttncaatggaaggctgaa

SEQ ID NO: 8965 - DNA, 570 bp, Homo sapiens
  misc_feature (455)..(455): "n" may be a, t, c, g, other or unknown
  misc_feature (489)..(489): "n" may be a, t, c, g, other or unknown
  misc_feature (524)..(524): "n" may be a, t, c, g, other or unknown
  misc_feature (554)..(554): "n" may be a, t, c, g, other or unknown
  misc_feature (570)..(570): "n" may be a, t, c, g, other or unknown
aagtgttacaaattttattaaaaattaacatttcaagaggtcatacgtatacaaatcaaactgcaaaaaattccaggcataaaaactattatctgggttagtgtgccatctttcttctccaaatgtcaaaatgtccacaaaaaaagtctttagaaagtcaaatccactgtccatttgtgttgggtaagagacctatgtcttcattcactgcatggaatccatgttaaaagaaccctgtcttggttgtatattatcacaggactcttgtattaatccatttttcctcaattccccatagtagactgccatcttgatttctcagtggtagggtccatttgaaactcttcaagctgactgggtgtaaatgtttccaccaatgtctacttcattggatggggcctttagaggattcaagtttgaggttcatatttttgctatataaaatactgactttnccaaagatttcctttatcctctaggataaaactncacggtctcagcttcaaaatggcatacctcaaatnaaagacccattattggtcagaaccaaccgnacccaatttatttttn

SEQ ID NO: 8966 - DNA, 464 bp, Homo sapiens
  misc_feature (393)..(393): "n" may be a, t, c, g, other or unknown
  misc_feature (400)..(400): "n" may be a, t, c, g, other or unknown
  misc_feature (418)..(418): "n" may be a, t, c, g, other or unknown
  misc_feature (439)..(439): "n" may be a, t, c, g, other or unknown
  misc_feature (453)..(453): "n" may be a, t, c, g, other or unknown
  misc_feature (456)..(456): "n" may be a, t, c, g, other or unknown
  misc_feature (458)..(458): "n" may be a, t, c, g, other or unknown
gagaaccagaatgcttatattttattagtatccaagactggggagagggatggggtgggagagatcaagaattggggagcagatgggaggcgctacctcactcaggagacacgagttcttatccaagttcaaggtgaaagaagtgagggcaggaagagaaatctccctgctagcaacagcgactcagggagaaactctgggcccatagctagctggaggcagggtgacattgctcccaccaatgggccatcttcttagctacacctttgtagctgtggtgccaggcagaagaaccacctggaaactgagctaaggcaggttccttcttccaacagaagacacagctgggcagggactgtgcagactcaacagggccaggccagctagtggccnagtcagngttcatgtctctcaccantgcctggagggtccccaaccnaggaaagaactggncantnctgcca

SEQ ID NO: 8967 - DNA, 440 bp, Homo sapiens
  misc_feature (135)..(135): "n" may be a, t, c, g, other or unknown
  misc_feature (182)..(182): "n" may be a, t, c, g, other or unknown
  misc_feature (273)..(273): "n" may be a, t, c, g, other or unknown
  misc_feature (309)..(309): "n" may be a, t, c, g, other or unknown
  misc_feature (373)..(373): "n" may be a, t, c, g, other or unknown
  misc_feature (376)..(376): "n" may be a, t, c, g, other or unknown
  misc_feature (385)..(385): "n" may be a, t, c, g, other or unknown
  misc_feature (387)..(387): "n" may be a, t, c, g, other or unknown
  misc_feature (397)..(398): "n" may be a, t, c, g, other or unknown
  misc_feature (412)..(412): "n" may be a, t, c, g, other or unknown
gagtaatgccgactttatatcagcacacccagtgcccccccgttcccgctggcccaggtcccggagaccatgatggcacccacagtggacttcgcaaaggagcgtggggaccccgaaggccaggccacccctcanatgggggtcccatgctaaagcagacggtgccggtgccgcagggcgtntgagacccacggtggagcctgggcctggcgtgcgggaggcggccacgacggcgcctttctcccaggaactccgggagggaccccaggactnagcgccagggcagccttggcaggtgcagtgaggcantgacttgtgggggttagatgtgggcctgccccacgtgggcagggatcagccaggcatgggggtncancgggatccnantggggcacanncaccatgttttcgnaccattaccaaagccccattgttttaag

SEQ ID NO: 8968 - DNA, 565 bp, Homo sapiens
  misc_feature (340)..(340): "n" may be a, t, c, g, other or unknown
  misc_feature (360)..(360): "n" may be a, t, c, g, other or unknown
  misc_feature (364)..(364): "n" may be a, t, c, g, other or unknown
  misc_feature (402)..(402): "n" may be a, t, c, g, other or unknown
  misc_feature (422)..(422): "n" may be a, t, c, g, other or unknown
  misc_feature (436)..(436): "n" may be a, t, c, g, other or unknown
  misc_feature (448)..(448): "n" may be a, t, c, g, other or unknown
  misc_feature (478)..(478): "n" may be a, t, c, g, other or unknown
  misc_feature (481)..(481): "n" may be a, t, c, g, other or unknown
  misc_feature (486)..(486): "n" may be a, t, c, g, other or unknown
  misc_feature (504)..(504): "n" may be a, t, c, g, other or unknown
  misc_feature (528)..(528): "n" may be a, t, c, g, other or unknown
  misc_feature (546)..(546): "n" may be a, t, c, g, other or unknown
  misc_feature (558)..(558): "n" may be a, t, c, g, other or unknown
cagttgacacctgggtcaggtgctctattaaagagtcattaaaatcatgtggccagggaacaaatacagtcttcgaatgtgacgattcaagcttcctcattgctgaacatgtttaggcaggtacaggcatccttaggtgtccacgtatttgggacatgtaagtggagaggcatgaacctgattcatttcctgatccagtgatgctcccagcccacccccaaacagacacagcgtagcccgggccagctcttaaggagttcaggagtgagaagaggccctcagagatctgacagaacaagtcttacgtagtggcctgtaaaccttcccagaaaaagggctnttaacaatttcacctgggtnctgnacactttggacagaagtcctttagggttccagactggnttgctctttggctgaccttnaattccctttccangacttcgaccantcccctaaacccagagcatttttttccctnatnttttngggcttgtcctggttaancctttgttgggaggctgaactggnacttttggggaacctgancttttaaaggangggtttt

SEQ ID NO: 8969 - DNA, 357 bp, Homo sapiens
  misc_feature (88)..(88): "n" may be a, t, c, g, other or unknown
  misc_feature (110)..(110): "n" may be a, t, c, g, other or unknown
  misc_feature (290)..(290): "n" may be a, t, c, g, other or unknown
  misc_feature (306)..(306): "n" may be a, t, c, g, other or unknown
  misc_feature (311)..(311): "n" may be a, t, c, g, other or unknown
  misc_feature (314)..(314): "n" may be a, t, c, g, other or unknown
  misc_feature (317)..(317): "n" may be a, t, c, g, other or unknown
  misc_feature (337)..(337): "n" may be a, t, c, g, other or unknown
  misc_feature (346)..(346): "n" may be a, t, c, g, other or unknown
gctagcaggggattgggccagacaacccttgaagccatgtccctctctttgattctatgaaatggcagcacagtcacctacagacatntgaccttaaacactggcccatntgcaatgccacggctgagtttcccaaccacaggtaaaggccccacccaaaagccaaattctttcagtcaaagctcaaaaatttcagcccagcaattggatccctgtgaaggctacgtaataagcatagacaaaaacgtaaaatcaaaagaaaggtttggaaatgaaagtttaaatatggnaactgaagtccaaccnatggnatnatntacccccacccttttttccncataaatgngattcaaaatg

SEQ ID NO: 8970 - DNA, 489 bp, Homo sapiens
  misc_feature (39)..(39): "n" may be a, t, c, g, other or unknown
  misc_feature (188)..(188): "n" may be a, t, c, g, other or unknown
  misc_feature (191)..(191): "n" may be a, t, c, g, other or unknown
  misc_feature (194)..(194): "n" may be a, t, c, g, other or unknown
  misc_feature (223)..(223): "n" may be a, t, c, g, other or unknown
  misc_feature (313)..(313): "n" may be a, t, c, g, other or unknown
  misc_feature (351)..(351): "n" may be a, t, c, g, other or unknown
  misc_feature (381)..(381): "n" may be a, t, c, g, other or unknown
  misc_feature (414)..(414): "n" may be a, t, c, g, other or unknown
  misc_feature (424)..(424): "n" may be a, t, c, g, other or unknown
  misc_feature (436)..(436): "n" may be a, t, c, g, other or unknown
  misc_feature (450)..(450): "n" may be a, t, c, g, other or unknown
  misc_feature (463)..(463): "n" may be a, t, c, g, other or unknown
  misc_feature (480)..(481): "n" may be a, t, c, g, other or unknown
gccattaagggccttttattcgtattcatcacatcgganatcatctcttcctaggaagcttttaaaaaatccccaggttggattagggcactccctctgggtccctggcaatttcctccaggttagggatcccaaggggtcgctgccttcctgggtctctggcctggcccttggggcacacagtcatnaanaantgctggggggaagtgagctctttatttanacatagctctgctgagtggaaagtgggcaccagccccattaatgcttgctggctggtggcttccaagcacgccccactgccaaggctcanctctgcagttcttggaagtattgcgaccgaaggcgcanatgcaagctgactcagcaggcacagtgaanctcgccaggctccactgagagtccacgtactgnccaatcatangccccaccttgnccacgccaaccaangcggaaccgcggntgaagccggtttcctgnnagccaaaa

SEQ ID NO: 8971 - DNA, 410 bp, Homo sapiens
  misc_feature (387)..(387): "n" may be a, t, c, g, other or unknown
  misc_feature (397)..(397): "n" may be a, t, c, g, other or unknown
  misc_feature (399)..(399): "n" may be a, t, c, g, other or unknown
  misc_feature (402)..(403): "n" may be a, t, c, g, other or unknown
  misc_feature (405)..(405): "n" may be a, t, c, g, other or unknown
  misc_feature (407)..(407): "n" may be a, t, c, g, other or unknown
gcacagatttcttttcttctccaccttcttgatccttcttggctttggaagtcttggtctgggcagagaaggtaagggtaagtttggcgaaaagttcattgttctcaaagcggtcctccttcacctttgtccagaagcagtcctgggagaggtcctcagccacaagcttggaccagtttggcctccggagctgcacctctggcttataaagctttttgggggttaatccaaatggcagaactggggctgcaggaactccaaatccaaatgggggaggtggaggcatacccattccgggtggaggtggaggaatgccagggcctccgggaaatggaggaggtggagggattccaggaccaccaggaagagggggaggaggaggtggcnttcctgcttntncanncnangga

SEQ ID NO: 8972 - DNA, 386 bp, Homo sapiens
  misc_feature (349)..(349): "n" may be a, t, c, g, other or unknown
  misc_feature (366)..(366): "n" may be a, t, c, g, other or unknown
  misc_feature (368)..(368): "n" may be a, t, c, g, other or unknown
  misc_feature (370)..(370): "n" may be a, t, c, g, other or unknown
  misc_feature (372)..(372): "n" may be a, t, c, g, other or unknown
  misc_feature (379)..(379): "n" may be a, t, c, g, other or unknown
  misc_feature (381)..(381): "n" may be a, t, c, g, other or unknown
gaattctcaggaagaatgacaacacatcacaaaaacgggtttctttttgagggtctcactcctgtcacccagactggagtgcaatggcgcgctctcggctcattgcaacctccgcctcctgggttcaagcaattcctgtgcctcagcctcccaagtcatggggatcacaggcatatgccaccacacctggctcatttttatatttttagtagagataaggtttcgctacgttggccaggctgctctcaaactcctggcttcaagtgatccacccctctcagcctcccaaagtgctgggattgcagagccatcatgccccacctaaaaaaaccggtattaaatggaaagncaagtttaaatgttccngncncnatggctnangcctg

SEQ ID NO: 8973 - DNA, 496 bp, Homo sapiens
  misc_feature (424)..(424): "n" may be a, t, c, g, other or unknown
  misc_feature (428)..(428): "n" may be a, t, c, g, other or unknown
  misc_feature (430)..(430): "n" may be a, t, c, g, other or unknown
  misc_feature (439)..(439): "n" may be a, t, c, g, other or unknown
  misc_feature (446)..(446): "n" may be a, t, c, g, other or unknown
  misc_feature (451)..(451): "n" may be a, t, c, g, other or unknown
  misc_feature (458)..(458): "n" may be a, t, c, g, other or unknown
gagacagagtctccgttgcccaggctggagtgcagtgtccgtgatcttggctcaactgcaacctccacctctcaggtttaagtgattctcatgcctcagcctcctaagtagctgggactacaggcacgcaccaccacgctcggctaatttttgtatttttagtagagacaggttttcaccatgttggccaggctggtttcaaactcctggcctcaagtgatccacctgcctcggcctcccaaagtgctgggattacaggcatgagccaccatgcctggcctttcatccatctttaaacaaattcaatgaccatctagagacagatgtgaccaaagtgttacaaatttctatgcattttctatgaattgctctgtgcagttcacacatgggttcattcaccccgcaggctgtgaacttccttatnctgnangctgcaggncttaagnttcancaactcncgaaccaaaagacttaaagggggacttggttaaaataa

SEQ ID NO: 8974 - DNA, 583 bp, Homo sapiens
  misc_feature (445)..(445): "n" may be a, t, c, g, other or unknown
  misc_feature (472)..(472): "n" may be a, t, c, g, other or unknown
  misc_feature (525)..(525): "n" may be a, t, c, g, other or unknown
  misc_feature (534)..(535): "n" may be a, t, c, g, other or unknown
  misc_feature (561)..(561): "n" may be a, t, c, g, other or unknown
  misc_feature (566)..(566): "n" may be a, t, c, g, other or unknown
  misc_feature (576)..(576): "n" may be a, t, c, g, other or unknown
  misc_feature (583)..(583): "n" may be a, t, c, g, other or unknown
gttgtcattgctttattactcatagtttccaagcaatattacatatataaaagtcattttaaaaacaaccaggtttgctagaaaagtgttttttcttggaatcatggatttctacaccattcatacctggagtcctttatattaaatatattatttacgcaggcactaggcaaaattgaagaagttttgagttatctcctccataacccccaccttcccacattcccacaaaaaaatcccaccctttccctattatatgggttattaacattaaaaacaataggaaaatacacaggcatttcaatttgaatcacttttccctatttttacatgtctggagatgttggcttggttatgaattcaaaagttctcccagagttcttgatgatgattcatagagaaatctttcaatgctatcctcttccaaagtaatttccatgaatgnctttagttttctgtgaacagtggctgnaaccttccttacttttggcctttatggtacccgctttataacccggattattntgcccgcannccggagggcacaaggccttaaaatcnttttnagcccccatngcctttn

SEQ ID NO: 8975 - DNA, 349 bp, Homo sapiens
  misc_feature (298)..(298): "n" may be a, t, c, g, other or unknown
  misc_feature (300)..(300): "n" may be a, t, c, g, other or unknown
  misc_feature (303)..(303): "n" may be a, t, c, g, other or unknown
  misc_feature (308)..(308): "n" may be a, t, c, g, other or unknown
  misc_feature (321)..(321): "n" may be a, t, c, g, other or unknown
  misc_feature (331)..(331): "n" may be a, t, c, g, other or unknown
  misc_feature (348)..(348): "n" may be a, t, c, g, other or unknown
cagttcagtatatgaaaattcatttatttagtgaaaccctacattaaagcgtcccaacacaaagcagattcgaacataacaactggtgattggctcatctcacaggctcacatcatcagtgtgttaactaacatacaataggactgtacccttttacaggattgagtgttttggatcccactcacacactaaaaccctgccataaagttgtatcaattagggctgttcaaatgtgaaactgtattggaaaatgggaaactttatctccttatatatgtatattttttgagatggcgtntngcnctttngcccatgctggantgaagtggcnctatcctgggtcactgna

SEQ ID NO: 8976 - DNA, 563 bp, Homo sapiens
  misc_feature (63)..(63): "n" may be a, t, c, g, other or unknown
  misc_feature (485)..(485): "n" may be a, t, c, g, other or unknown
  misc_feature (539)..(539): "n" may be a, t, c, g, other or unknown
  misc_feature (542)..(542): "n" may be a, t, c, g, other or unknown
gagacggagtcttgctctgttgcccagtgtggagtgcagtggtgccgtctcggctcactgcangctccacatcctgggctcatgccattctcctgcctcagcctcccaagtagctgggactacaggcatccactaccactcccggctaactttttgtatttttagtagagacggggtgaccgtgttacccaggatggtctcgatctcctgacctcgtgatccacctgcctcggcctcccaaagtactgggattacaggagtgagcaacagcgcccggcctcctttgccacttttaattaagttctagacaaaggactcacagactaccagattattttaagaatatttgattataatctagaaataggtatgttctgaaaaagtactactgatacagaaaaggtagttttatagatggatggatttaaatttggagtattatgagttggttcagaagaatttaagaaaggcagtctcacaaaacncaccaaattttattgagggaaaagactttgcatgaaattaattttgaattttgnccngccatttcattccactgattt

SEQ ID NO: 8977 - DNA, 548 bp, Homo sapiens
  misc_feature (451)..(451): "n" may be a, t, c, g, other or unknown
  misc_feature (467)..(467): "n" may be a, t, c, g, other or unknown
  misc_feature (485)..(485): "n" may be a, t, c, g, other or unknown
  misc_feature (487)..(487): "n" may be a, t, c, g, other or unknown
  misc_feature (506)..(506): "n" may be a, t, c, g, other or unknown
  misc_feature (540)..(541): "n" may be a, t, c, g, other or unknown
cccctagcatgtccttaagcattttctccccagcttttcacaatctttcttctaaggctgtaatgtcttacatccttaataggcatgattagatttctcccaaattttccaaattaactttctttcaatgtaaccaaaacaaaaccatggcatacagtaaactaaaagggtagacaggagagaaaggttgctgcaattacagaaaatttagaaatcagcctttaccagttacatctgagacaaggtaaactttccaacacattggaatcatcagaagggctttaaaaaatacaactgccagccgggcatggtggctcatacctgtaatcctagcactttgggaggccaaggcgggcagattgcctgagctcaggagtttgagaccagcctgggcaacacagtgaaaccctgtctctactaaaaaatacaaaaaattagctgggcgcggcantgtgtgcctgtagttncagctactcgggaagctnangcaggaaaattgcttggancccggaaggcaaaggttcaatgagcccaaatcgnnccatgga

SEQ ID NO: 8978 - DNA, 517 bp, Homo sapiens
  misc_feature (3)..(3): "n" may be a, t, c, g, other or unknown
  misc_feature (31)..(31): "n" may be a, t, c, g, other or unknown
  misc_feature (46)..(46): "n" may be a, t, c, g, other or unknown
  misc_feature (64)..(64): "n" may be a, t, c, g, other or unknown
  misc_feature (325)..(325): "n" may be a, t, c, g, other or unknown
  misc_feature (472)..(472): "n" may be a, t, c, g, other or unknown
  misc_feature (479)..(479): "n" may be a, t, c, g, other or unknown
  misc_feature (481)..(481): "n" may be a, t, c, g, other or unknown
  misc_feature (495)..(495): "n" may be a, t, c, g, other or unknown
  misc_feature (500)..(500): "n" may be a, t, c, g, other or unknown
  misc_feature (510)..(510): "n" may be a, t, c, g, other or unknown
  misc_feature (516)..(516): "n" may be a, t, c, g, other or unknown
ggnagttgatgtccacttagaaagcaggtgntgttacaaaaatggngttaattatataaatggnccttgcacagcatgtgggttcatatcaagctggcacctctgccaaaaaatgaagttgcttaagtaatgggtgcagaagtccataagcaccctcgctcctggaacattaaccactctgagatcctcaggggaaaggcagtctataaatacgaagctttacggttacccttagttacttcacttttcagagcataatgcaatctgtcccaagtcccatgttttatttctgtagtggattctgctgtcctattttatatattgnatatcatgcattatgttgctctagtaatttttttgaagatattgttccactattatttttacttgtcttgaaaaatggaaataggcggtaatggaaaggaaggcctgctggcagaatccttatttaatttgcacagtagaaagttgncttatgngnctgctactggtcanggatnccaactcgtngaagana

SEQ ID NO: 8979 - DNA, 564 bp, Homo sapiens
  misc_feature (558)..(558): "n" may be a, t, c, g, other or unknown
gagaggggagtctcgctctattgcttaggctggaatgcagtgggtgccgatcttggttcactgcaacctccacctcccgggttcaagcaattctcctgctttggcctcctgagtagctgggattacaggcacatgcaccaaccctggctaatttttctgtatttttagtagagacagggtttcaccatgttggccaggctggtctcgaactcctgacctcaagtgatccacccacctcagcctcccaaagtgctgggattacaggtgtgagccactgcactggcctaagattttcattttaacagggaactgttagaacagaaaagaagcttcccaagaggcactcattttaaaaataaattatagcttaaattattactatgtggattatatcagcaaaggcagaaagaattaatgttttcctcctttcatgaaccttgtaaggctagtgttgagtggcttacaaatgtcatataatggactgtaaatcatctgccatattgatcaatcatgttaatttaaggttttcttaacattagagatttttaatggggagtntaaaat

SEQ ID NO: 8980 - DNA, 560 bp, Homo sapiens
  misc_feature (60)..(60): "n" may be a, t, c, g, other or unknown
  misc_feature (66)..(66): "n" may be a, t, c, g, other or unknown
  misc_feature (72)..(72): "n" may be a, t, c, g, other or unknown
  misc_feature (100)..(100): "n" may be a, t, c, g, other or unknown
  misc_feature (413)..(414): "n" may be a, t, c, g, other or unknown
  misc_feature (423)..(423): "n" may be a, t, c, g, other or unknown
  misc_feature (504)..(504): "n" may be a, t, c, g, other or unknown
  misc_feature (518)..(518): "n" may be a, t, c, g, other or unknown
gataagagtctcactctgtcgctagggctggaacacagtggtgtgatcttggctcactgnaacctncgcctnacgggttcaagcgattctcctgtctcancctcccaagtagctgggattcaggtgcccaccaccacgcccagctaattgttgtatttttagtagagacggggtttcaccgtgacccgcctcggcctcccaaagcgctgggattacaggcgtgagccactgcgcccggccaggatattcttttttgaccaatattagttaatctaattggcacagttagcattaatgtggcaatgtacagtgcgcagtggttcatggaagagggaatttggggatgtaaatgtaagtgcacccttaagactatcaaaacacaatcccttatgtctcctccatctagatcttannaataatttnattcatttcatttctgaattggggtctgacctgggtcttaattgcgtcagataaacatttccatggggggaacccataatnggtccttaactcanggaagaacctattggtttgaccaaacatgtcctttccaatac

SEQ ID NO: 8981 - DNA, 537 bp, Homo sapiens
  misc_feature (453)..(453): "n" may be a, t, c, g, other or unknown
  misc_feature (471)..(471): "n" may be a, t, c, g, other or unknown
  misc_feature (507)..(507): "n" may be a, t, c, g, other or unknown
  misc_feature (517)..(517): "n" may be a, t, c, g, other or unknown
  misc_feature (522)..(522): "n" may be a, t, c, g, other or unknown
  misc_feature (527)..(527): "n" may be a, t, c, g, other or unknown
  misc_feature (537)..(537): "n" may be a, t, c, g, other or unknown
gagacggagtctcactctgtcacacaggctggagtgcagtggcacgatcttggctcactgcaaactccgccttccaggttcacgccattctcctgcctcagcctcccaagtagctgggactataggcacctactaccacgcctggctaattttttgtatttttagtagagacggggtttcaccatgttagccaggatggtctccatctcctgaccttgtgatccacccacctcggcttcccccagctaattttttatattttagtagagacaaggtttcgccatgttggccaggctggtcttgaactcctgacctcaggtgatccgtctgctttggcctcccaaagtgctgggattagaagcgtgagccaccacgcccagcctttttttgtatttttagtagagatggggtttcgccatgttggccaggctggtctcaaactcctgaccttangtgatctggccaccttanccttccaaagtgcttggattcccggataagccctgngacctggccngggtntcctngggaaaaagn

SEQ ID NO: 8982 - DNA, 555 bp, Homo sapiens
  misc_feature (479)..(479): "n" may be a, t, c, g, other or unknown
  misc_feature (520)..(520): "n" may be a, t, c, g, other or unknown
  misc_feature (529)..(529): "n" may be a, t, c, g, other or unknown
  misc_feature (536)..(536): "n" may be a, t, c, g, other or unknown
  misc_feature (546)..(546): "n" may be a, t, c, g, other or unknown
  misc_feature (548)..(548): "n" may be a, t, c, g, other or unknown
agtagagacgggggtttctccacgttggtcacgctggtctcgaactcccgacctcaggtgatctgcctgcctgggcctcccaaggtgctgggattacagacgtgagccaccgcacccagcctcttaattcttaatggggccaaataatcctttccctccgaaatataaaaccaggacaagagaaaaatgtgagttctctcaccacctattcccactaccttcccccttcagaggccaagtttggctgcatgtgatgatccctgctgctctgtgctgttcctcacccatctccactgacccaacagaaggtggcgctattaatattatgcctcctctgacacctgctacctgtcgattagcagaggatgtttacccctctgcccttgaaatcaaatgtcatttgtctgattacatagaggctatgtgagaatgtttttcaagaagtctaataggaaagtgacttttaaaactggaaatgncttgagtcatggggtaaatggttctttaatcctattcaccncatcttggntctttcncttaaatttncncaaaatt

SEQ ID NO: 8983 - DNA, 555 bp, Homo sapiens
  misc_feature (425)..(425): "n" may be a, t, c, g, other or unknown
  misc_feature (481)..(481): "n" may be a, t, c, g, other or unknown
  misc_feature (495)..(495): "n" may be a, t, c, g, other or unknown
  misc_feature (498)..(498): "n" may be a, t, c, g, other or unknown
  misc_feature (513)..(513): "n" may be a, t, c, g, other or unknown
  misc_feature (516)..(516): "n" may be a, t, c, g, other or unknown
  misc_feature (527)..(527): "n" may be a, t, c, g, other or unknown
  misc_feature (536)..(536): "n" may be a, t, c, g, other or unknown
gacattttttgctttattaaacatcattcactgagaatttccaaagcactgcgtggtgcctagacctgtgtaccagcgctctgggggtcaggagaagtctaaggcacgggccctgccctggcgcacggctccttctccctgggaaggcagctccactggtgaaaggccactgaccaagtccagaccctgaggacgacgaaggcctcggggcagaagcctgagagaatcatgccccactggcagtgggaggcggtgcaggctgggagccctgcccaggccccaggctgagctgtggggaaagctatgacccagtttgctgagagctgcaatgacgaacattggctctgtgcccagaggcccaagaaggccatggactgggctggcctttcctgggaaagggggaaggaggaagaactggggcctancagggccgtctataccctggagaggcaggcctgacttcttccttagagcttgcatnaagaggaggctcanganaaagagacttgcatnaanaacacttcagncagccgatntccactcagtatttctttt

SEQ ID NO: 8984 - DNA, 500 bp, Homo sapiens
  misc_feature (452)..(452): "n" may be a, t, c, g, other or unknown
  misc_feature (473)..(473): "n" may be a, t, c, g, other or unknown
  misc_feature (475)..(476): "n" may be a, t, c, g, other or unknown
  misc_feature (485)..(486): "n" may be a, t, c, g, other or unknown
  misc_feature (492)..(492): "n" may be a, t, c, g, other or unknown
gttcagcttttactggaaactgctgtctaggaccacctgccctaaccaggaataaaggcaagacagcctggagaccagtttgtttcttcagctgcaaacagctgcctgggcaggcaggtgacacaaggcctctgtccccagggatgggagagggcagaggtggcggctgggtgagttgccggcctcagctgggggcctgggggaggcccttcttcagcagagatgtgaggaagctccccagctcctcgtcctggtaggtccaggagaccagcagcaccttggtgcctgggtcctcagaaggggcggcggcctggaggaggacggactccacagtcacagagccgtctgggaggtgctgcacacagtggtccttcaggacgctcttgaggtggctgtagacgcgcaatgccgtctcctgctccttgcgtgtgtcatgcaagtgcacgccgcangtgaaacccaactggtgcttnanncagacccanntttttnagggcttt

SEQ ID NO: 8985 - DNA, 537 bp, Homo sapiens
  misc_feature (407)..(407): "n" may be a, t, c, g, other or unknown
  misc_feature (454)..(454): "n" may be a, t, c, g, other or unknown
  misc_feature (461)..(461): "n" may be a, t, c, g, other or unknown
  misc_feature (471)..(471): "n" may be a, t, c, g, other or unknown
  misc_feature (474)..(474): "n" may be a, t, c, g, other or unknown
  misc_feature (487)..(487): "n" may be a, t, c, g, other or unknown
  misc_feature (504)..(504): "n" may be a, t, c, g, other or unknown
  misc_feature (535)..(535): "n" may be a, t, c, g, other or unknown
gagatggagtttcgctcttgttgcccaggctggagagcaacggcgtgatcttggctcaccgcaacctccggttcctgcattcaagcgattctcctgcctcagcctcccgagtagctgggattactggcatgtgccaccacgcctggctaattttgtatttttagtggagacggggcttccccatgttggtcaggctggtctcaaactccagacctcaggtgatccactgccttggcctcccaaagtgctgggattacaggcgtgaggcaccgtgcccggcataagctttattttcaccaggtaaatacttaagtacaaatgatagaagggcggggggtggagtaagacctaagggttagagtcatcaaaaataatatcagcattaaccagtgaccccaatttactgncttcctacatcacaacatcatgtcagctttaagatgaaattaaaccnagtgaanctagggcgtntgnttctaagggagcnctttaaaattaatggangggaattcccacggggtttttggtttccccntt

SEQ ID NO: 8986 - DNA, 548 bp, Homo sapiens
  misc_feature (482)..(482): "n" may be a, t, c, g, other or unknown
  misc_feature (497)..(497): "n" may be a, t, c, g, other or unknown
  misc_feature (500)..(500): "n" may be a, t, c, g, other or unknown
  misc_feature (547)..(547): "n" may be a, t, c, g, other or unknown
gttttattcagttatcacctccagctttgtacttcagcagctgactttccttcttcactggggagcaaatctgcacttgccttaaatgaatttctatttttgactacttttcaaatttatcacatttttttcctaaagtaccgagaactaacctcatcttgtatttcttgcagcttcccaatgctgagggagtcttagaggcatttgctttgtttttattaggagtatggtttatagtcacccagccagaatgtgatatacaagggtttacaaggaaaagtagaaatgggtgtagatgtatgtgcttgttgtaagaaaaatttacacttacagatgaaagatccatatataatccagccacataccatggaaaggaaaaacaagaagaatatgtaatagtgatggttgccaaaacctatgcaccgtccagtccacaggcagtgttgatcatatcgagcccacagcagttgcatacatggcantggagtgaccctaanggntttcctatctaaaaggggcatttaaaaaaggccttacccaaaacccng

SEQ ID NO: 8987 - DNA, 525 bp, Homo sapiens
  misc_feature (474)..(474): "n" may be a, t, c, g, other or unknown
  misc_feature (480)..(480): "n" may be a, t, c, g, other or unknown
  misc_feature (489)..(489): "n" may be a, t, c, g, other or unknown
  misc_feature (496)..(496): "n" may be a, t, c, g, other or unknown
  misc_feature (512)..(512): "n" may be a, t, c, g, other or unknown
  misc_feature (519)..(519): "n" may be a, t, c, g, other or unknown
  misc_feature (524)..(524): "n" may be a, t, c, g, other or unknown
ctttttcctttttttttttcttacagtaccatgggaacaacagtgattgacttgcaaagttttctgtctctatggaaaatgcaaaacagtactacagaaatacacaatgcactgtaagcagcggtttgctgtagtggtccaacaggtacaagcaaacattttggctcagctaggcagtaatccacttaaaccacatcccggggctacggccgacccaaccacagctcctgtgggatcaaaaagaatgggtctgtttaaaaataaaaattgttatgttttgtgctgctgtccaaaggactcaaaggacagagtcatgaggcagaagtttcccaaccagatctagaatcactgggaccacttccttcctttcccttctaccaacctagagacttggactatggtttcaaagtgaaattggcatttctagcaatgaatacccacagccctcacttctttaaatatcaacagagaggntccttncaccaaggntcattgnctcctcccagattggnaaaaggnaaccnt

SEQ ID NO: 8988 - DNA, 527 bp, Homo sapiens
  misc_feature (71)..(71): "n" may be a, t, c, g, other or unknown
  misc_feature (196)..(196): "n" may be a, t, c, g, other or unknown
  misc_feature (217)..(217): "n" may be a, t, c, g, other or unknown
  misc_feature (320)..(320): "n" may be a, t, c, g, other or unknown
  misc_feature (369)..(369): "n" may be a, t, c, g, other or unknown
  misc_feature (384)..(384): "n" may be a, t, c, g, other or unknown
  misc_feature (400)..(400): "n" may be a, t, c, g, other or unknown
  misc_feature (410)..(410): "n" may be a, t, c, g, other or unknown
  misc_feature (445)..(445): "n" may be a, t, c, g, other or unknown
  misc_feature (458)..(458): "n" may be a, t, c, g, other or unknown
  misc_feature (468)..(468): "n" may be a, t, c, g, other or unknown
  misc_feature (472)..(472): "n" may be a, t, c, g, other or unknown
  misc_feature (495)..(495): "n" may be a, t, c, g, other or unknown
  misc_feature (510)..(510): "n" may be a, t, c, g, other or unknown
  misc_feature (515)..(515): "n" may be a, t, c, g, other or unknown
gcatgttcccgtatgctttattggaatgctgtcaggtccgcgccttccacctgggccctcacacacagcanggagagccacagagggttacgaccgacgcgggtctgacagcacaggcccaggcaggcgtggactcgggagccgagggtggtcggatggcagcgtgagcgccagtatcatttccagcatttccatntttaccactccagtcactctnttcaaaaagaaagaactagagcaaaaccaaagttaaatatctcaacgagaagggacacctcacgtcgctgacagctcggcacgtggctggtcccaggccccanagatactgcgtagtgaactggccgctggaacgcagtcacaggcctctgngctgcagcccacctnccagcaagccacgcanagccccgggncttgagtccaaaaatgcccaagggaatgtgggacnggacgggccccanacaggtgganaagnaagccggccccaagccccgaaanttcccacgccaaggnggggnaaccggttttct

SEQ ID NO: 8989 - DNA, 548 bp, Homo sapiens
  misc_feature (473)..(473): "n" may be a, t, c, g, other or unknown
  misc_feature (490)..(490): "n" may be a, t, c, g, other or unknown
  misc_feature (519)..(519): "n" may be a, t, c, g, other or unknown
  misc_feature (537)..(537): "n" may be a, t, c, g, other or unknown
  misc_feature (539)..(539): "n" may be a, t, c, g, other or unknown
gaatgctaagaaaagttttaattgtgcaaatgtggtacataacatttcaaatgtaagtggaaggatcatcagtagtgttatcaaaatgcataatacagaaactttttaagaaaggataaaaaattacactcaggacccataactcttcctcattataagcatatgtagtgattcattcatgcaggtttttatatgtagataggatttttttttccttttcaagaattccattgtagccatgagatgaaaaatgtattatggtaatggtatagctttcttctattttgcttttagtgttaggtttgctaaaagcttatttaaaattcccaactgacataatgtgttttcaataaggaggacgctgccgtgtccaatacccttcccctgtcattgttcggtaccatatctcctggcttccttctacatgggtcacttaagttaagagggaggccaagggaagttcccgatttcangcagtgtgtggcagggntacctggcctaacaacctggctactcctnctgggaccgttctcaaangnggcataatg

SEQ ID NO: 8990 - DNA, 541 bp, Homo sapiens
  misc_feature (408)..(408): "n" may be a, t, c, g, other or unknown
  misc_feature (508)..(508): "n" may be a, t, c, g, other or unknown
aaagacagggtctcactctgtcacccaggctggagtgcagtggcatgatcacggctcattgcagcctcaacttcctggtctcaagtgattctcctgcctcagcctcctgaatagctgagaccacaggcatgcccctccacacctggctaatttttaaattttttgtagagatggagtctcacttagttgtccaggctagtctaaaactcctgggctcaagtgatcctcccaccttggcctcctgagtagctggacccaagggcgcttgccaccactcccagctaagtacttttcatattaaaaaaaaagaagaagaaaaaagaaaaaaaccaactccacttctaatttcacaacagaaaaattcttctagtgctattactctacttaattcaatcctggggttgttgnttttttaaatcagaaacatgaatctgtccaacactttttcttaattggctccttcccctacagaacacttaggtagcgagctgcaggaaactggctttgncctggggtgggcactatggctttggccacttta

SEQ ID NO: 8991 - DNA, 562 bp, Homo sapiens
  misc_feature (326)..(326): "n" may be a, t, c, g, other or unknown
  misc_feature (352)..(352): "n" may be a, t, c, g, other or unknown
  misc_feature (445)..(445): "n" may be a, t, c, g, other or unknown
  misc_feature (473)..(473): "n" may be a, t, c, g, other or unknown
  misc_feature (496)..(496): "n" may be a, t, c, g, other or unknown
  misc_feature (510)..(510): "n" may be a, t, c, g, other or unknown
  misc_feature (523)..(523): "n" may be a, t, c, g, other or unknown
  misc_feature (562)..(562): "n" may be a, t, c, g, other or unknown
aatagttagatgactttatttagaatatacattgcaatgattccctcccacagaaatcacttcaaaccgtaattctcaaatactgtgcaacattcaaccagctaaggatttcacgtgactttcaggaaataaatgacccacaattacccagtgaattccatgtagtgttaagaataattgcaggtaacttcttcatgtaattaccatgaaattgagtataatttagagaataaaatcaggaacatactcctaattgcttttttgatccattaagcatcattctcaatctctcactaaatgcttgggtgcctcaaactagtttttgnttataggctagattttaaaacactgntttattataactctgttaatgtatctctacatagcacttttaaggcagatgtgaagagatcaactggaataagctgccaaccatttatatacnatataaatattttggccaagaatgcagntttaccagcttaagcctgggctntaaacccatcaacntttctatgataanccagggacttttaaagggttctaatcaggtttacctatn

SEQ ID NO: 8992 - DNA, 565 bp, Homo sapiens
  misc_feature (456)..(456): "n" may be a, t, c, g, other or unknown
  misc_feature (460)..(460): "n" may be a, t, c, g, other or unknown
  misc_feature (524)..(524): "n" may be a, t, c, g, other or unknown
  misc_feature (539)..(539): "n" may be a, t, c, g, other or unknown
  misc_feature (557)..(557): "n" may be a, t, c, g, other or unknown
ctgtaccacttttagcagcagatgaaagagtttcttttcctgcaattgagacagcactggtatgacttggttttctgtttgcaccacttccattggttatacaggacatgggaataactgctcgagggcttggttggcctttacttgagactgattttttcactgaggccacatgatcttcagagattgcaagacgcctcaaaacatcagccaaagccgcctttagcacagtgatttcatcttcttgttgctgaactcgtgactcaagagctgacaggcgatcttgaacatcagaagtacttgcagcagaaatactatcatcgagactgccggcgaaaccgtcgagttgcacacaagaaattaagggactgttcctcattatgacttagaaaaggcagcacctctctagtagactaagagcatgtctggacatccactggtagtggtaagaaaacnggantttttaaagaagcacaccattggacttggcaaactgaagttttcttaattaaaaattttcattnccatttgggtgaaanggtttttaatagagtccntttttttg

SEQ ID NO: 8993 - DNA, 577 bp, Homo sapiens; identical to SEQ ID NO: 5815
  misc_feature (1)..(577): "n" may be a, t, c, g, other or unknown

SEQ ID NO: 8994 - DNA, 500 bp, Homo sapiens
  misc_feature (349)..(349): "n" may be a, t, c, g, other or unknown
  misc_feature (439)..(439): "n" may be a, t, c, g, other or unknown
  misc_feature (460)..(460): "n" may be a, t, c, g, other or unknown
  misc_feature (482)..(482): "n" may be a, t, c, g, other or unknown
  misc_feature (485)..(485): "n" may be a, t, c, g, other or unknown
  misc_feature (487)..(488): "n" may be a, t, c, g, other or unknown
  misc_feature (490)..(490): "n" may be a, t, c, g, other or unknown
gagacggagcttcacacttgttgcccaggctggagtgcagtggtgcgatctcggctcactgcaaactctgccttctgggttcaagcgattctcccacctcagcctcccaagtggctgggattacaggcgtgcaccaccacgcctggctaattttgtatttttagtagagacaggatttcaccatattggtcaggctggtctcgaactcctgacctcgaatgattcacacaccttggcctcccaaagtgctgggattataggcgtaagccaccacacccaggcagcgcacgtttttttctttttttttttgacacggagtctccctctgtcacccaagctggagtgcagnggcaccatctcggctcactgcaaccgccacatcctgggttcaagcaattcttctgcctcagcctcccaagtagctgggactacaggcgcnagccaccatgcctggctaaantttggatttttgggagaaacanggngnnancctattggcc

SEQ ID NO: 8995 - DNA, 543 bp, Homo sapiens
  misc_feature (446)..(446): "n" may be a, t, c, g, other or unknown
  misc_feature (487)..(487): "n" may be a, t, c, g, other or unknown
  misc_feature (489)..(489): "n" may be a, t, c, g, other or unknown
  misc_feature (513)..(513): "n" may be a, t, c, g, other or unknown
  misc_feature (523)..(523): "n" may be a, t, c, g, other or unknown
  misc_feature (525)..(525): "n" may be a, t, c, g, other or unknown
  misc_feature (529)..(529): "n" may be a, t, c, g, other or unknown
cctcttacatttcaggtatcattttgctttctgtctttgggcaatccactcgcaggaagttactaaccaaccttattggtaatacctattattcattccctggtccaatctctccccttagctctaggataaatatggccaactgaccaccaatccattccaatctttaaataccctgagaattgattatataatcttccctccaaatctgctcttcctctatttacctatcttggttgtcatccacagtcacacaaaaacaacttggaagccaactgagctcttccttcaccctctgcatggccctccatcaaatttattgtgaagtccttagaaattctgtttcttccttcacttccatccccactgcctgtttgttcctcatcatggtgcatgaactcctgtcagaaccttgtaactgacttccctacatcctttaaacatgnggatatcttcctaaagttcaactactaatcttcctttcaangnaccaacactggctttatggatagnatctaaactncntggnaagggaatcaaagc

SEQ ID NO: 8996 - DNA, 562 bp, Homo sapiens
  misc_feature (464)..(464): "n" may be a, t, c, g, other or unknown
  misc_feature (471)..(471): "n" may be a, t, c, g, other or unknown
  misc_feature (473)..(473): "n" may be a, t, c, g, other or unknown
  misc_feature (530)..(530): "n" may be a, t, c, g, other or unknown
  misc_feature (533)..(533): "n" may be a, t, c, g, other or unknown
  misc_feature (553)..(553): "n" may be a, t, c, g, other or unknown
  misc_feature (556)..(556): "n" may be a, t, c, g, other or unknown
cagatttgaaccacacaatttattaacaagcatgatttgtggcctcgtttataaccagcccccaccccagcacttggtgcacattctccttaagcgcagaatttggcctcaaggtaatattttaggaataaataaaaagaggccgggcacggtggctcacacctgtaatcccagcactttgggaggccgaggtgggcggatcacgaggtcaggagttcgtgactagcctggccaacatagtgaatcaccgtctctaccaacaatacaaaaaaattacctgggcgtgatggcgggcgcctgtaatcccagctactcgggaggctgaggcaggagaatcgcttgaacccaggaggcagaggttgcagtgaacccgagatcgtgtcattgcactccagcctgggcaacaagagcaaaactctgtgtcaaaaaaaaaagaaagaaagaaagaaagaggattaaaattncccttangnctggaccctttgatcaagcccgatgcttaacgggtggtggtgactgacagggggttnaanggccccgctttgccggaggnganccttca

SEQ ID NO: 8997 - DNA, 556 bp, Homo sapiens
  misc_feature (246)..(246): "n" may be a, t, c, g, other or unknown
  misc_feature (343)..(343): "n" may be a, t, c, g, other or unknown
  misc_feature (345)..(345): "n" may be a, t, c, g, other or unknown
  misc_feature (400)..(400): "n" may be a, t, c, g, other or unknown
  misc_feature (460)..(460): "n" may be a, t, c, g, other or unknown
  misc_feature (465)..(465): "n" may be a, t, c, g, other or unknown
gaggctaaaatcatttaattatacacaggccacaattgcaggatggaaaggcagtgggcacttggaagtgactacacatggcaataagcagcctatcttctttaccaaccagaagtttcttggggcatgtgatggtaggccagaccctttccaagggaatactactacactaagcctacactgtactgtgagagtcatggtggaacaaggccacaggcagtgggaggaaatgtgatgactcactgngtcagaattctaaggcccagcatgatcaggatgtaaggctccataattttctaaaccagaaattatgagaagaacaaaattctgcaatcacttatgntnttttcttcttttttttttttgagacagagtttcacccttgttgcccaggctggantgcaatggccaatcttcggttactggaaccttcggcttctggggtcaaccaattttctgnccaanctcctgagtaactgggaatacaggcatgtgcccccacgcccagttaatttggaattttaggaaaaaagggggttctccaggtttgcaggcg

SEQ ID NO: 8998 - DNA, 568 bp, Homo sapiens
  misc_feature (331)..(331): "n" may be a, t, c, g, other or unknown
  misc_feature (397)..(397): "n" may be a, t, c, g, other or unknown
  misc_feature (473)..(473): "n" may be a, t, c, g, other or unknown
  misc_feature (479)..(479): "n" may be a, t, c, g, other or unknown
  misc_feature (497)..(497): "n" may be a, t, c, g, other or unknown
  misc_feature (543)..(543): "n" may be a, t, c, g, other or unknown
gaagacaaaacaaggatttatttgcctctgcgggccttgattttcctaagatagaactccaactctttgccctctagcacatagccatctgctcggccacactgtcccggccttgaagcgatgcacgcaagaagcttgccctgctggaactgctcctccaggagactgctgattttggcattctttttcctttcatcgtatttcttctgaatttttttagatcgttttttgtttaaaatctcttcttcctcaggagtcagcttggctcccttcttgcggcccaggggcagcgcatagtgggactcgtaccactgtcggtacggtgtgctgncgatgagcacgatgcaattcttcaccagggtcttggtacgaaccagctcgttattagatgcattgnagacaacatcgatgatccttggtttacgagtccacacttttgagccccaggagaaatttcccacgtccaacctcanggcacnggatttcttggtaccctncccggacacggctgggtggatcccgccgggggccaacttgggggtngcaacttgggcgcccccaacttaaa

SEQ ID NO: 8999 - DNA, 538 bp, Homo sapiens
  misc_feature (428)..(428): "n" may be a, t, c, g, other or unknown
  misc_feature (449)..(449): "n" may be a, t, c, g, other or unknown
  misc_feature (462)..(462): "n" may be a, t, c, g, other or unknown
  misc_feature (468)..(468): "n" may be a, t, c, g, other or unknown
  misc_feature (474)..(474): "n" may be a, t, c, g, other or unknown
  misc_feature (494)..(494): "n" may be a, t, c, g, other or unknown
  misc_feature (520)..(520): "n" may be a, t, c, g, other or unknown
  misc_feature (534)..(534): "n" may be a, t, c, g, other or unknown
gatcgtaaactttattacttttctatttgttgtcctaatcatgtaatgcaggggttgagagttcctttactgttttgcaacttccttttttttttttttttttgaggcagagtctcactctgtcacccaggctggagcgtagtggctcgatctcggctcactgcaacctccgcctcttggattcaagcagttctcatacctcagcttcccaagtagctgggattacaggcatgtaccagtatgcctggctaatttttttttgtatttttagtagacacaggatctcaccatgtttgccaagctggttttgaactcctgacctcaagttatccacctgccttggcctcccaaagtgctgggattacaggcatgagccactacacttggcctttgaaacttacttttacaaaagataggtcatttctctnctgggaagaccagcgaacatnccctgggttgganggcctncagctntttcaaaattttgagcccanggaaaactggctaaagaaatggaagnctggtggggccccnaagg

SEQ ID NO: 9000 - DNA, 560 bp, Homo sapiens
  misc_feature (511)..(511): "n" may be a, t, c, g, other or unknown
  misc_feature (518)..(518): "n" may be a, t, c, g, other or unknown
  misc_feature (542)..(542): "n" may be a, t, c, g, other or unknown
  misc_feature (546)..(546): "n" may be a, t, c, g, other or unknown
  misc_feature (558)..(558): "n" may be a, t, c, g, other or unknown
aaacaaacaaaaaagaagtttactaaatttaaacactgacatcctgtgaagatgccagtctttacaggcgtttgtaaaagtagactgtggggagtatgttacactaatacaaagttttacaaatgaatacaagtgaaatatataaattacaatgaaatagaggaagattgtggctctgtcctgggttggttcttttagcagtcatattgctgtagagaaaataaaataccattaggctataatcaggataaataacgatgacattttagtcctttaagttcctattttaagcaaacataaacagactgatcttagcttcagcaaagcttaggccaaccatacttagggcttggacaatgctcacaaaatgtttcctaaacaaacccagatcccttgtcttccatgagtaaaggctgcagaaagggcccatagaaactgcaggatctgatggtggggttgctttgagtgcatttgtgtgggggtttaatcttagggattaaaagatatggcntggaagnttcacactggtatgaactcaaggngggnaaccttcaaatnaa

SEQ ID NO: 9001 - DNA, 565 bp, Homo sapiens
  misc_feature (564)..(565): "n" may be a, t, c, g, other or unknown
attgcagttaaagggccattgccagtcagctgaagaaggaaatgtttgcttctccctttaaggtgttaaagtaatgcacagaaaataaaaatagcagccacataaatctgcacggcattgcattcaagcaaaggacaatatgagtaacttagagaaatagccacattcaatgcacttaatgaaatcctgttttctttggagttacatgaggcagcagtactagctagtgtctgatattgcacttttatagcataaacacagctaaacatagtgttaaacactgacagcatcagtacctgttctaattgcatcagtgtttacctctcagtctagcatgctgactatagtcctatgctttaaaaggttataattatttgacagttaaggcattagaggaaaaaggtttaaggctatcataatatatataagcattcacttctggtcaagttagtgtattggtttctagaatacactggttcaaatggctcacttctgggatattaaaaactatgggaattctcttattaaagtccaaccatcattatgaaaaaagtccatttaaann

SEQ ID NO: 9002 - DNA, 561 bp, Homo sapiens
  misc_feature (422)..(422): "n" may be a, t, c, g, other or unknown
  misc_feature (471)..(471): "n" may be a, t, c, g, other or unknown
  misc_feature (488)..(488): "n" may be a, t, c, g, other or unknown
ggcaatcacgccgtttattcgcacttggcagcaagacaatggatgatgtgggaggtgccaggcccctgggttggcactaatttggagtatggttgagacagggctggagagaggcatcttagaggtggcccccaaatccgcaatcgggagaaaaaggcaagaatcgactagagattgtcaggataaagggaggcactgcccacccctgctatgtctgtctgcccccacaggggcttctttaatacctggggttccctgggtgatgaatgtcctcctaccctggcaaggggccatacctgtcgccgtggccccataggcaaccctgatgaaagagtatcatttccaagggggctttggtttctgggtggccccacctcgtcgtggggtagatggcactgaaatgctaactgagcgagccctgnaagtcaccagggggctccggaaggtcacccctgacgtggaaggcctganatcctgaggcccatttntgtgggggggcactggtgccctccttgggccgggccaatggctaccctgggggtaggtggtggcgtcacaaaa

SEQ ID NO: 9003 - DNA, 565 bp, Homo sapiens
  misc_feature (474)..(474): "n" may be a, t, c, g, other or unknown
  misc_feature (524)..(524): "n" may be a, t, c, g, other or unknown
  misc_feature (551)..(551): "n" may be a, t, c, g, other or unknown
  misc_feature (554)..(554): "n" may be a, t, c, g, other or unknown
acattgtcttaaaaccaggttgtttattggtacgtacacacccacactcacacccacccacacacacccatacacccattcctgatgcactgagcaaatacagtactgagaagggacctgatgagatacgggaggctggtgtggagggctcgggtcactggtgactcgccaaaaaaaaaatatattgactatgaggcaagggatacaccaagacaacagccttccatcactgtttgcacagagttctcttcttaacacctccctgcaacacttctcaaggtgctctgaatggacccagctatcctggcacagctgctgccttacgacatggccaacagtggcaggagttgtagaggggagaggctgggactgagtctcccttacagccagcccatcaagagcaccctgaaggagtcagatggctatgcattgcccaactccaccaatcttaggaatctccatcatcttaccatncattacccaagggatgggagctggttatctccatccaacttaatttctgntaataatcctcattttcacttccaagnaanctgatgggagg

SEQ ID NO: 9004 - DNA, 538 bp, Homo sapiens
  misc_feature (459)..(459): "n" may be a, t, c, g, other or unknown
  misc_feature (505)..(505): "n" may be a, t, c, g, other or unknown
  misc_feature (511)..(511): "n" may be a, t, c, g, other or unknown
  misc_feature (514)..(514): "n" may be a, t, c, g, other or unknown
  misc_feature (518)..(518): "n" may be a, t, c, g, other or unknown
  misc_feature (532)..(533): "n" may be a, t, c, g, other or unknown
aatgagtcagggtctccctctgtcacccacactggagtgcagtggtgtgatcacagttcactgcagcctgcagcctcgaactcctgggctcaggcaatactcccacttcagcctcccaagtagctgggaccacaggcacacttcaccatgcccagctttttaaaacatattttttgtgaagatgcggtctcattatgttggccaggctggtctcaaactgccggactcaagtgattctcccaccttgttccccaaagtgctgggattacaggtgtgacccaccttgcctggcccggggtgtcttttttttctgagatggagtctcactctatcgcccaagcctggagtgcagtggtgtgatctcagctcactgcaacctccacctcctgggttcaagcgattctcctgcctcagcatccccagtagctggaattacaggcacacaccaccatgcccggntattttctggatttttaagtagaccaaggtttcaccatgttggccngctggnctnaaangggggctttaactnncatgg

SEQ ID NO: 9005 - DNA, 553 bp, Homo sapiens
  misc_feature (456)..(456): "n" may be a, t, c, g, other or unknown
  misc_feature (502)..(502): "n" may be a, t, c, g, other or unknown
  misc_feature (520)..(520): "n" may be a, t, c, g, other or unknown
  misc_feature (524)..(524): "n" may be a, t, c, g, other or unknown
ggtagagactgggtcttgctatgtttacgaagctggtttcgaactggaactcctagcctcaaataatcctcccacatcactgtcctagaatgctgagattatagacatgagccaccctgcccagccagctgatccttttttttaacctatctatgcttttgcttgcatagccacttaacatttctagttgatcatctttggtgaaaactacaaaaacaaaggagaaaagggcagattgaaagctccactctcctaaaaatgtaaacttatcacaagaaaatgccaggttttgtatgtaccattcgcattttggtgataattaactctctgtagaaaattttggaaatctaattaattagtaccttcaatacctttagttgtctcccacacacgcgtgtgtgtgtgaaatcttctacaatatcttcccttttttagaccatgttcactgtcaaaaangtgctttaagagcagtctttggctgggcacggtggctcacacctgnaatcccagcctttggganggcnaggcagcggatcacgaaggtcaggaaaca

SEQ ID NO: 9006 - DNA, 560 bp, Homo sapiens
  misc_feature (430)..(430): "n" may be a, t, c, g, other or unknown
  misc_feature (522)..(522): "n" may be a, t, c, g, other or unknown
acaagccatgaaataataaaacacagtcaaggttctctccatgtcaaaccaccagcatccccacctgaatgccccggaagtctgacggttaacctgtgcaggccctggtcaggcctgtggtccccaagggctgccggcagcaaaggcaccacggaagctgcaggggacaggggaggccgctgcttcttgcatttttgtctgaaaggtccctgtggagtcgacgagggaattctcactgaagcagctataaaagaaagcggagggcacggcgcctccctgaagcaccagcagctgttctgtagacggttgttgggccacacgcaaaggacttggttcctgtccccagcttagtggtccgtcagaggaaaggtctcttcctgcctggctggccacagcatggccgcctcttccatgacgggcacctgtgtangccagcctctctctcctgccgccctgctgggacggaagcccggacgtacctgcacaagccacaagtgccggtgcttggcttaaaccttttgngagctcatccttcttgggcttcttcaaaatatccctga

SEQ ID NO: 9007 - DNA, 554 bp, Homo sapiens; identical to SEQ ID NO: 5801
  misc_feature (1)..(554): "n" may be a, t, c, g, other or unknown

SEQ ID NO: 9008 - DNA, 562 bp, Homo sapiens
  misc_feature (2)..(2): "n" may be a, t, c, g, other or unknown
  misc_feature (497)..(497): "n" may be a, t, c, g, other or unknown
  misc_feature (514)..(514): "n" may be a, t, c, g, other or unknown
  misc_feature (523)..(523): "n" may be a, t, c, g, other or unknown
  misc_feature (525)..(525): "n" may be a, t, c, g, other or unknown
  misc_feature (540)..(540): "n" may be a, t, c, g, other or unknown
  misc_feature (551)..(551): "n" may be a, t, c, g, other or unknown
gnttttgacctagttttattaaatattgcttccttggggtgtgtttataacaactcccagaacatttcatgtaaggattcaaagcggtcatattaaaatacagcttcaatataaagtttatcacagttttacagtattcaaaaatgacagacctgccttaaaaaacaaaacaaaaaccaaaaaaggactattacacccaaaacataagaaaacaattaaataaacaagtttggcattttcataactttatagtataaaacagaatattaaatttattactggcaaacggacactgatttatttcctttgaaatgtgtcccatttaaacacactatacaagttcattatacaaaagatggatgatcattttgatgaaagaagtgcaccctgaaaatttttgccagtttagaatatttagctcttaaaggttaaaaaaaaagccttttccttttttaaactgaaggctgaattcagaatttttttggtggctcatctgncaagcctttctgggttnaaaaccatngnggctattggcccccncaagggggcanggaagaatact

SEQ ID NO: 9009 - DNA, 560 bp, Homo sapiens
  misc_feature (491)..(491): "n" may be a, t, c, g, other or unknown
  misc_feature (497)..(497): "n" may be a, t, c, g, other or unknown
  misc_feature (507)..(508): "n" may be a, t, c, g, other or unknown
  misc_feature (541)..(541): "n" may be a, t, c, g, other or unknown
  misc_feature (547)..(547): "n" may be a, t, c, g, other or unknown
aatgtcttcaatttattatcttttccacagtacacatttttcacaaaccgtaaatcctttgcagttattcaaagtgtgtaaacaactgcctgaatccccatatccccccacctcggcttaaggttgtgaatgttttaagtccttcaatcaagtttcaactcttccacttgcataaggaatcaagagccttctctctttaaattatgtgtgttttatcatacagcctacaatgcagtaaatcacagtgaaagccctggggaaaacaaaacaacatgatctttacagcgggacttgaaacttcacaatagtaaatgcagttcaagaagcttcccataataaaagcgcgggttttcatttccagaaatcaagtcaattagaaaccctaggttctacttaaaaacccattttgatctaaaagtgaaaacagtcccctatccataggcattttataaactctatacagtttcacttgcagagattttttttttttncagctnggaaacagtnntggcgaaggttaagcccgggatgccctggaaanctggtnatggctcaaggat

SEQ ID NO: 9010 - DNA, 487 bp, Homo sapiens
  misc_feature (51)..(51): "n" may be a, t, c, g, other or unknown
  misc_feature (278)..(278): "n" may be a, t, c, g, other or unknown
  misc_feature (426)..(426): "n" may be a, t, c, g, other or unknown
  misc_feature (439)..(439): "n" may be a, t, c, g, other or unknown
  misc_feature (460)..(460): "n" may be a, t, c, g, other or unknown
  misc_feature (463)..(463): "n" may be a, t, c, g, other or unknown
  misc_feature (483)..(484): "n" may be a, t, c, g, other or unknown
  misc_feature (487)..(487): "n" may be a, t, c, g, other or unknown
aagcaacgcacatttattaccttacagtcaagggggtcagatgtctgaggnggggtcccagaactaaaatccaggtgttggcagggctggttcctcctggaactccaggggaaaaatccatcccttgccttttctggcctctggcggcacttgcactccttggctcctcgtcccttcttccgtctttaaagccagcagcgtccccttgttctgtctctgaccacggctgggaaggagtctctgcttttgggcacacgtggctaatccaggctaccctntcactgcagatcttcaactcaatcacacacctacaaagtccctttggtctgggaggtaacactttcccaggctccagggattagggcttggacatcttggggactttattctgcccaggaaaggtggtatcaagggagtctgagcatntgaaccttcccangggactgaaggaaaggccttnagnggcctcttcctcctccttannaan

SEQ ID NO: 9011 - DNA, 541 bp, Homo sapiens
  misc_feature (431)..(431): "n" may be a, t, c, g, other or unknown
  misc_feature (446)..(446): "n" may be a, t, c, g, other or unknown
  misc_feature (480)..(480): "n" may be a, t, c, g, other or unknown
  misc_feature (488)..(488): "n" may be a, t, c, g, other or unknown
  misc_feature (518)..(519): "n" may be a, t, c, g, other or unknown
  misc_feature (526)..(526): "n" may be a, t, c, g, other or unknown
  misc_feature (532)..(532): "n" may be a, t, c, g, other or unknown
acaaataccaaaagatttattgtagacaattttgttacacaattatacacattatgatacacgtttgaaacattaacacacgtggagactgctaaatcatttaatatttcttttgcaaaaagataatttctttaggctgtgatacctgcaataaccaatctgttctcatttggatcagatctttctccctctgtcctggagatctcacagttcactttgctgaagcaatctatccacttccctatcgaccttgcttatagcagttcaggtatagactatttgagccttatatactaaactgttaagccagtgcgtgccctatgccctgctgagaatagattccttctgtacttgcagccctcagatgctgaattgatcaatcaatttttgagacggggtctcctctggcaccagggctggaactggtgcangtcctccagtttgcngcaaaaggttggcagcagaggagaatggatgatnggcacttnggcttggtggcaactgggcaacacgtcctnnatggagncccggnattcctaag

SEQ ID NO: 9012 - DNA, 537 bp, Homo sapiens
  misc_feature (443)..(443): "n" may be a, t, c, g, other or unknown
  misc_feature (459)..(459): "n" may be a, t, c, g, other or unknown
  misc_feature (463)..(463): "n" may be a, t, c, g, other or unknown
  misc_feature (488)..(488): "n" may be a, t, c, g, other or unknown
  misc_feature (510)..(510): "n" may be a, t, c, g, other or unknown
  misc_feature (520)..(520): "n" may be a, t, c, g, other or unknown
  misc_feature (536)..(536): "n" may be a, t, c, g, other or unknown
gcttgttacaatctatacattttatgttttttaaccacttcaaagtaagtttcagacaccaacacattttttaaatgatccctaccattttttaaatgatccctaccaaaatggaaggctggtatcccaaggttttgttccatttctcaattctagtctgtgaaattgaagtctgatgaccactcttaagagggctgttcattagggtgcgggctgggcattatgagtgtgtttttcatgagtcagtggaaggaggggcttgttgtgagcagtgcatgagaaaaacggcttggctttgcttctttttccagctctgtggccttggtcaggttaccgtctcttcagtatcgtaacttttacgtctcacttacggcattcggtggcatggattgtacaggcagctggatttgctctctttttactctactggtccttctccattnggctcatgaaaatagncttntccaaggttttggcctgggtttctnttgggccatggaggatggcttnaggttggganatcctggaagcggatnt

SEQ ID NO: 9013 - DNA, 520 bp, Homo sapiens
  misc_feature (79)..(79): "n" may be a, t, c, g, other or unknown
  misc_feature (170)..(170): "n" may be a, t, c, g, other or unknown
  misc_feature (417)..(417): "n" may be a, t, c, g, other or unknown
  misc_feature (443)..(443): "n" may be a, t, c, g, other or unknown
  misc_feature (448)..(448): "n" may be a, t, c, g, other or unknown
  misc_feature (466)..(466): "n" may be a, t, c, g, other or unknown
  misc_feature (481)..(481): "n" may be a, t, c, g, other or unknown
  misc_feature (484)..(484): "n" may be a, t, c, g, other or unknown
  misc_feature (515)..(515): "n" may be a, t, c, g, other or unknown
  misc_feature (517)..(517): "n" may be a, t, c, g, other or unknown
caccaagtcatattttaatcaagttactcagaaccaatttaaaaaattataaaagtaatcagaaataaatatttatgtncagacgaagaatgatatgagtgagaacacatttattgtcagagacaatatgtattcatctgttctcacactgctatgaagaaatatctganactgggtaatttataaagaaaagaggcttaattgattcacagttccacatagctgaggagacctcaggaaacttacaatcatggcaaaaggcaaaggagaagcaggcacctttgtcagatccgggggtctgggtctagcccatgctgaagtatgagggaagtgggtggatgggcagaaagaacactcagggggccttaggcaggtgaatatggttttattcagcagcagctctcattaacaactttntcacactagctctttatgctggcttncctgnctaactgcttgagctagnggttccacatacagntgnccagccggtttggcctgctttcgggcacagntnact

SEQ ID NO: 9014 - DNA, 578 bp, Homo sapiens
  misc_feature (456)..(456): "n" may be a, t, c, g, other or unknown
  misc_feature (503)..(503): "n" may be a, t, c, g, other or unknown
  misc_feature (549)..(549): "n" may be a, t, c, g, other or unknown
  misc_feature (555)..(555): "n" may be a, t, c, g, other or unknown
  misc_feature (558)..(558): "n" may be a, t, c, g, other or unknown
  misc_feature (574)..(574): "n" may be a, t, c, g, other or unknown
  misc_feature (577)..(577): "n" may be a, t, c, g, other or unknown
ggagtaaatacatttattgatacccatttcatatatagttcaatgaaataatctataaatataaaaagcatttttcttttggatatcaccatggtccatgtaaatactcaagtcagaatcatctgcaggaagcactccaagtcacactgttagctttacagacctgaatatacatattgcattaaacagtggcacttatgtactcaagtggtccagtggctttggaatatatgtctactgggcatgtggaatagaaataatgtgttaggtttaaatcaatggaaagggtatcaaccatcaacaaaagcaacaattatgaattcatatcctaggcaaagaaagtaccacagttgacacttggtgtcagaatactggagacaaagtatgtaaaacaatgcctgttgcagcaccacgtgctcactccaactcccagtggacagtcccccaatgccttanggtcactcgtgggcaaccaaatgcaatcaagaagctcgatagcttanaataaaaggctgtaaagctgatatcaagattaaggaagcttaacanttcagngcncatgagttctccctanaang

SEQ ID NO: 9015 - DNA, 573 bp, Homo sapiens
  misc_feature (250)..(250): "n" may be a, t, c, g, other or unknown
  misc_feature (447)..(447): "n" may be a, t, c, g, other or unknown
  misc_feature (506)..(506): "n" may be a, t, c, g, other or unknown
  misc_feature (520)..(520): "n" may be a, t, c, g, other or unknown
  misc_feature (522)..(522): "n" may be a, t, c, g, other or unknown
  misc_feature (531)..(531): "n" may be a, t, c, g, other or unknown
  misc_feature (548)..(548): "n" may be a, t, c, g, other or unknown
  misc_feature (567)..(567): "n" may be a, t, c, g, other or unknown
caataacaaaaggcttaacattttatttaaaaaaattagaatatcattatttcattattgtaatgggacgaatcctccctcctttctgccctggttggagagaaaggagtgcagaactagggtaatggccagttggggagtgagggtagtgtgcacacacacaaaaccctagggaggtctctcctgctttaggctgcttgtcttgtgcaggttgtcaaagtctgggacagacgtgcatgtgctatgtggnggtacacaatagttcgagtctgttttcgtttacaaatcctcatcaaagagttcatgagagagggttacttatctctgtttcacagatgagtaaaacgaggcttaaaggctaagtgcatctcctatgtaaaaatgctggatttcagccactgtgtgcagtcaggtgctgggcctgggttccgcaagtggacactggangccccttctcattaatgtagcacagccacattgagggcggtcattttggcagggtaaanatgaaaaaagtccnanaagggcaanggatatcctggggggcntacctttaggcctttaggngttttt

SEQ ID NO: 9016 - DNA, 575 bp, Homo sapiens
  misc_feature (438)..(438): "n" may be a, t, c, g, other or unknown
  misc_feature (441)..(441): "n" may be a, t, c, g, other or unknown
  misc_feature (462)..(462): "n" may be a, t, c, g, other or unknown
  misc_feature (476)..(476): "n" may be a, t, c, g, other or unknown
  misc_feature (551)..(551): "n" may be a, t, c, g, other or unknown
  misc_feature (558)..(558): "n" may be a, t, c, g, other or unknown
  misc_feature (565)..(565): "n" may be a, t, c, g, other or unknown
  misc_feature (569)..(569): "n" may be a, t, c, g, other or unknown
gaaattaacaaactaattttaaaaatcaacacctgactggggacctggtcatacaaacttcctttagatacagttgagaagaaaacatcacatttttatgaagcccctctcctgacaggggactggaggaggaacaccattatgcattgttatcagcgtggtgtaatttgactgttgacaaagtatccgtggcagtgcgaatgagcgcagttagaagtgtggcggattgtaatcaagaagatgcttagctgtgcaacactgcatctcgagcagatttgaatcaacattgccttaaggggacacacacacataccaaaagaaaaaaaatccattaatttttagagggaaaattagagtggcacttgatgaagtgaaatttgacatgcgttaattggtgtgcagctctcctaattagagattttcaaattcttttactgntgncaccatgaatggcacattgcnttgctggacaaatnctaaaattgcaaattggcttggtccggaagttttacgtttgaagataccctggatccttaagccattccaaaggngggccantggaaancaanatactt

SEQ ID NO: 9017 - DNA, 585 bp, Homo sapiens
  misc_feature (439)..(439): "n" may be a, t, c, g, other or unknown
  misc_feature (475)..(475): "n" may be a, t, c, g, other or unknown
  misc_feature (478)..(478): "n" may be a, t, c, g, other or unknown
  misc_feature (543)..(543): "n" may be a, t, c, g, other or unknown
  misc_feature (566)..(566): "n" may be a, t, c, g, other or unknown
  misc_feature (568)..(568): "n" may be a, t, c, g, other or unknown
  misc_feature (581)..(581): "n" may be a, t, c, g, other or unknown
gcatcatcagagggttttactgaacttacaaccgacttgcccgctcagtatgcagttcagatgtgagaggcgcttctctgtacagcagcctgtactgtcttcaatcctatgcgtgcaggtgtctaccacaggcaaacagttttctccccattttgtagtaatgcgattttcctattagcaaaaagaggtcaccagcccctgtagacttaagggactcaagtcacaggatggggatttcctcttaatattttttattttgttgtttgaactcttgatgcaacattgtagagcagggtgttcaggacctgctgtgcccaagggactgataaaggaaaaagctctatttattctttttgtgatttgatgcacagatgaaaaacttaacacacaataacagaagttggtcgttaataaatcacatcctagctttcaacgcttncgtaagcagacgacatcttcagtttctagctcttgnagnttcaacactgcacatcaatgatgcatatgtccagaatcagtaccaagaccattcgaatcttttcncttagttaaccaattttcacggntnttgggcccaaagntttt

SEQ ID NO: 9018 - DNA, 570 bp, Homo sapiens
  misc_feature (453)..(453): "n" may be a, t, c, g, other or unknown
  misc_feature (462)..(462): "n" may be a, t, c, g, other or unknown
  misc_feature (492)..(492): "n" may be a, t, c, g, other or unknown
  misc_feature (500)..(500): "n" may be a, t, c, g, other or unknown
  misc_feature (548)..(548): "n" may be a, t, c, g, other or unknown
  misc_feature (561)..(561): "n" may be a, t, c, g, other or unknown
  misc_feature (568)..(568): "n" may be a, t, c, g, other or unknown
  misc_feature (570)..(570): "n" may be a, t, c, g, other or unknown
ggagatggagtcttgctccgttgcccaggatggagtgcagtggcgcaatctcggctcactgcaagctccgcctcctgggttcatgccattctcctgcctcagcctctcgagtagctgggactacaggcgcccgccaccatgcccagctaagtttttgtatttgtagtagagacggggtttcattgtgttggccaggctggtctcgaactcctgacctcaactcatctgcccgcctcggcctcccaaagtgttgggattacaggtgtgagccaccacgcccggccaacgttccattttaattaacttaaatacgagcagccacatgtggcctctggttcctgccacggactcgggagcaacccctcctggtcgcggcttatgcgccttctctgtgtgctgctggggttaagtttgcatgtaacctcttgaggaccccacgtgtgcattcctaangggtgcggncttccgtttccgtatgaatgggaagaagtnccacctgntgattcttggaaagagctgtgaaggatggggtaaatcttccttactgntttaaaaaatttnttgggangn

SEQ ID NO: 9019 - DNA, 576 bp, Homo sapiens
  misc_feature (463)..(463): "n" may be a, t, c, g, other or unknown
  misc_feature (510)..(510): "n" may be a, t, c, g, other or unknown
  misc_feature (516)..(516): "n" may be a, t, c, g, other or unknown
  misc_feature (532)..(532): "n" may be a, t, c, g, other or unknown
  misc_feature (549)..(549): "n" may be a, t, c, g, other or unknown
aatttttatagcgtctttatttggatctagctctttcatcttgtgtaactcttttaagtaaatgactcctcccttctggtacaggttgaatatccataaaagggtgccttggcatgtgctcagtcctgaaattctactttgatctactgctctcatctttgaaactgctctaaacactcccccaaattattgatcctatgggcctgattatgaacttggctcttctgacaatacttctcaaatcctgtacctttggtaacatctctcctgactggcagagtacccagacacttaattaatgctgatgaaaattaagatttaagcaaagaagaaattggtgtaagaatgcaagccttaggatctgaaacttgatgactgtgggatctaacttctgcttcttttgctacaagctctgtttttgaataatcaactttcaaagacaaattgcttgatgaatctctgnattgtcagaatggttctttgatttcccatcaaaagccctgtatgtgnactagnaattaggacctacganctggatataaatatcantattttaggagcccttatttggtttgg

SEQ ID NO: 9020 - DNA, 563 bp, Homo sapiens
  misc_feature (379)..(379): "n" may be a, t, c, g, other or unknown
  misc_feature (514)..(514): "n" may be a, t, c, g, other or unknown
  misc_feature (517)..(517): "n" may be a, t, c, g, other or unknown
  misc_feature (524)..(524): "n" may be a, t, c, g, other or unknown
  misc_feature (528)..(528): "n" may be a, t, c, g, other or unknown
  misc_feature (533)..(533): "n" may be a, t, c, g, other or unknown
  misc_feature (537)..(537): "n" may be a, t, c, g, other or unknown
  misc_feature (544)..(544): "n" may be a, t, c, g, other or unknown
ccattttactctttttattctgctcattaatgatctgaaagaagaagatggggaaaaggggattccaccacaaggctccaaagaaccaagagtgcaaatcagtccatttcactttcactgtctgagatagggtctctaagacccaggatacaagggtggaatgtagctatatggactcgatttgcttccggaccttttccagagcctttctgtccaattgtcgctgacgaatgatgacaagacaagcgaagatcagggccacacacacgacagccccttcgaacttccaaaataagcgttgttccatcaaagctgagcggcagcttttgaactcatttctcttagatgagctgcatgtgattttctctacatatcctgngggaccacactcaggggtagttttagcccggaaattagagcatggagagcctcttctggtccacaaactttttcaccagccacatgggcaaatttgagggcttgctgacaggttctttttctgcacgggagcctntgnttggcanaacntttangggnaagtccngagcaacccccaaaggggg

SEQ ID NO: 9021 - DNA, 579 bp, Homo sapiens
  misc_feature (380)..(380): "n" may be a, t, c, g, other or unknown
  misc_feature (531)..(531): "n" may be a, t, c, g, other or unknown
  misc_feature (545)..(545): "n" may be a, t, c, g, other or unknown
  misc_feature (577)..(577): "n" may be a, t, c, g, other or unknown
aagattagtaactatgacttacatatgtgatccatgtaagtcacttagcacagtgctggcatgcatgctggctcaaaaatggcagctctcatcactatcaatacaaaaacataaagcaagacattctctgccctttcttcttgtttctggatgtataaatgaatatttctctatggaggaaaagtcatgaacatgaggttaactccacgacacaaagtccatggctgacttcccactccttagccagatgaaaggtcacagcttagaggaacgggtctttatgtgcttatgacttggtgttggaaggagttccctgaccatgggagagctcagctctgtgatgatttagcaaagcaattcagaatgaaatttggcctggntatacactaaattaatgtaccaaatccacctacctttctagctaatggggaattatgaaggttgccttggaagaacaaatatttcccaatagaattcaccgggtcccaccaaaacagtcaagaatttggagttctggggggttgcccattntcccgaattggaancctacttaactttattgggggtcttaaagctnaa

SEQ ID NO: 9022 - DNA, 556 bp, Homo sapiens
  misc_feature (470)..(470): "n" may be a, t, c, g, other or unknown
  misc_feature (492)..(492): "n" may be a, t, c, g, other or unknown
  misc_feature (497)..(497): "n" may be a, t, c, g, other or unknown
  misc_feature (548)..(548): "n" may be a, t, c, g, other or unknown
gattgaaagaataaatttattcaattggctccaatgtaatcctattgtcaccagatcattgacaccaaattgttatttttccctttgctagtaaaggtataagcagaaacaattgcaaaagaacacataacatctagtagggataatgatgaaagccaaaaatggattatttgaaaataattttggaagtaaaaaaaccataggtgtgaggaaaaaagagagaaactacaaataaactgcattgtgataaaacaataaagcacatagctaaaagcctattaaggattttttaaaaattatattttgagaaacacttggtgctaataattttctcaaaagtcaaatatccaaaagtcatacagaaaataaaacaacctactttccatcaaaagtttctaattttattctgagaaaagataacccaagaaaacaattttaactccagaaacaatgggtagcgtaaaaattantaatcaaaagataaccctgttntaggncttacaacttataaccatttcttcatacaatctcatatttaaggtcatccnggtgatat

SEQ ID NO: 9023 - DNA, 479 bp, Homo sapiens
  misc_feature (352)..(352): "n" may be a, t, c, g, other or unknown
  misc_feature (383)..(383): "n" may be a, t, c, g, other or unknown
  misc_feature (413)..(413): "n" may be a, t, c, g, other or unknown
  misc_feature (427)..(427): "n" may be a, t, c, g, other or unknown
  misc_feature (430)..(430): "n" may be a, t, c, g, other or unknown
  misc_feature (455)..(455): "n" may be a, t, c, g, other or unknown
  misc_feature (467)..(467): "n" may be a, t, c, g, other or unknown
  misc_feature (478)..(478): "n" may be a, t, c, g, other or unknown
gtatttcagtagagacggggtttcaccatgttggccgggatggtcttgatctcctcaccttgtgatccacccaccttggcctcccaaagtgctgggattacaggcgtgagccaccgtgcccggccgcaacttatatttttaaaataggcttttagatcagttttaagggttattttatagttaactagcagaaaatgtggattaaaattacagtaccatactcaattaaaaatcatgcgctacataatttaagttctcctgttaacttctgtttgggttgaaccccgaagtacaataagtgtagattctcattgtgacctacctgccccttagggcattttgcaaaaattancccctttaccaattggaaaggcaggtgccangggctttatggatttcatttaatctggaanttttatcctattanacnttgaaactgggttaaatatgaatgngccaatttaagnaaatattcatnt

SEQ ID NO: 9024 - DNA, 551 bp, Homo sapiens
  misc_feature (416)..(416): "n" may be a, t, c, g, other or unknown
  misc_feature (418)..(418): "n" may be a, t, c, g, other or unknown
  misc_feature (484)..(484): "n" may be a, t, c, g, other or unknown
  misc_feature (486)..(486): "n" may be a, t, c, g, other or unknown
  misc_feature (490)..(490): "n" may be a, t, c, g, other or unknown
ccaaattcaaggtctttattactagttccacctcacaagctagtgggatgtatctgtgtcacaagctgaattcctcagtaaagaaagcttgagaagacactaaacaaggatgttactaaaagacaatgatttgttaaaattataaagcaatcatcttttggcctgcaaacagtcaacattagaactctccaccactgcggatctggctccccatcacagtattattctgaatccaggataattacaatcacatggcatttttttctgcatgctttcttggcccaaaccctgcatgacaacatatacaatttacaagatgggacttgaaattcccattctcacacaggatagttagggcgtgttaccaataataaagaataaaagttatacaacattgattattataaattatattngntcttatccacccccattctccttaatatggtactttctttcctgcagaaaacatgatggtcctatntnccantacatcattaatgatgattagaatgagctggtaaagaccttggatttgaaaactgtttggg

SEQ ID NO: 9025 - DNA, 562 bp, Homo sapiens
  misc_feature (364)..(364): "n" may be a, t, c, g, other or unknown
  misc_feature (418)..(418): "n" may be a, t, c, g, other or unknown
  misc_feature (437)..(437): "n" may be a, t, c, g, other or unknown
  misc_feature (452)..(452): "n" may be a, t, c, g, other or unknown
  misc_feature (455)..(455): "n" may be a, t, c, g, other or unknown
  misc_feature (486)..(486): "n" may be a, t, c, g, other or unknown
  misc_feature (547)..(548): "n" may be a, t, c, g, other or unknown
  misc_feature (556)..(556): "n" may be a, t, c, g, other or unknown
  misc_feature (562)..(562): "n" may be a, t, c, g, other or unknown
gtttgctcattcattcgttcatttatttacgtatagatagcttatgacacacagattttggcgtggcttattgaaataaaatgaatgcaaactttaaaaatttggggaacaagttttaaacattagaatataaaataaggatcaagagaaaacttagggcagagatacgcagccataaggtcttaaatagcttttatagttgaagcctcattttgggttaaagcttctggtagttaaagggaacaaaaagatagtgctgcagaaagttctggactgggaacctggagatcagatttattactgaccagttttgtgccttttggcaaagcactttatttctatgagccttggtttcctcatctgngtaagcgatgggttattaaaagggattcaatgggatatgggctcaaaccttatngaactccagaatttggagnatcttttatcctcantantagcacatggttaaggggtttttttgcaagncctggaccaaagttttgggggtggcttcttccaccacaagcttggggctttgggccaaccnnttgacttntttgan

SEQ ID NO: 9026 - DNA, 556 bp, Homo sapiens
  misc_feature (404)..(404): "n" may be a, t, c, g, other or unknown
  misc_feature (411)..(411): "n" may be a, t, c, g, other or unknown
  misc_feature (434)..(434): "n" may be a, t, c, g, other or unknown
  misc_feature (440)..(440): "n" may be a, t, c, g, other or unknown
  misc_feature (461)..(461): "n" may be a, t, c, g, other or unknown
  misc_feature (471)..(471): "n" may be a, t, c, g, other or unknown
gtagagacagggtttcaccatgttgcccaggctagtcttgaactcctgggctcaagcaatcctcccatctcagcctcccaaagtgctgggattatagttgtgcggcctatgtgcaattctgaaccagacatgaacgcttaaatcagaactagtattgcaatagctgctaatatttccacaatgttataaattgcaaagtgctttcccatctcacttgattaaaccaagctccatgctaacagcagcctcctcccagggctctttgatttcatttttactgcagtccattctcgacacaaaaaccagggtgatctttttaaaatgttgatcagatcatatcactctcttgctcaaagttttccagtagattccattcccactaagaaaaacatttaaatttctgntggcctnttcgaggtctttctacattcttnctgcangtgcttactggcaacagtggnctttcaattnctagaacatgcccaaccttgggcttttcacaagaaccttggacctggccagctttgcttgaacccttttaatcctttttaaaggg

SEQ ID NO: 9027 - DNA, 394 bp, Homo sapiens
  misc_feature (255)..(255): "n" may be a, t, c, g, other or unknown
  misc_feature (258)..(258): "n" may be a, t, c, g, other or unknown
  misc_feature (304)..(304): "n" may be a, t, c, g, other or unknown
  misc_feature (321)..(321): "n" may be a, t, c, g, other or unknown
  misc_feature (341)..(341): "n" may be a, t, c, g, other or unknown
  misc_feature (353)..(353): "n" may be a, t, c, g, other or unknown
  misc_feature (382)..(382): "n" may be a, t, c, g, other or unknown
  misc_feature (388)..(388): "n" may be a, t, c, g, other or unknown
  misc_feature (394)..(394): "n" may be a, t, c, g, other or unknown
ccttattagccactggcatttatcatatatttgagacacttccaattgattgcacaagtcagatgttgctgatgagaagattttgtggttgtctgcatggtaatttacaaattctatgccaggcacctgtagtcccagcaactcaagagactgaggtgcaaagatcacttaagctcagaagttccaggtagtgtgctatgactgcacctgtggtggccactgtactccagcctgggcaacatagtgagaccctgnctntaaaataattaaaaattctgactattttattaagaaaaagggttanttcttaactggtaccanggcccctatggacctataanttggcaccctgntccacttaattctttttaccctggctttntaaggnctggan

SEQ ID NO: 9028 - DNA, 560 bp, Homo sapiens
  misc_feature (480)..(480): "n" may be a, t, c, g, other or unknown
  misc_feature (506)..(506): "n" may be a, t, c, g, other or unknown
  misc_feature (511)..(511): "n" may be a, t, c, g, other or unknown
  misc_feature (519)..(519): "n" may be a, t, c, g, other or unknown
  misc_feature (543)..(543): "n" may be a, t, c, g, other or unknown
ggtggatgagaaggcgtatttatttttcactgtacagtatttaaaaagagaataaaaaaatccaaatggctgtctggctcctgtgccttctttgtccccagtttggtccatttgtttctctaggactgacctgccctggcccctggctcttgttttctgttcctccacatctgacttctcttcattgtctcttgtcccaaagatggtcttacttctgggaatgactcaggaaacaaaaatggtctccctcctcggcctttcttgccccaggggcagttctgggatttgaggagcaacaggcaccaggaaaggggttggggtggtggtccgggatgctgcccctggagaaggtgaagcggcccgatgaacgcgttcatggtgtggagctccgctcagcgccgccagatggcgcagcagaaccccaagatgccaacttcgagatctccaagcgcctgggccgcgcaatggaactgctggacnaggaccaaaaacgggccttcgtggangaagncaaacggntccggcccaaactggggcgaatancccgactacaagacccg

SEQ ID NO: 9029 - DNA, 558 bp, Homo sapiens
  misc_feature (463)..(463): "n" may be a, t, c, g, other or unknown
  misc_feature (472)..(472): "n" may be a, t, c, g, other or unknown
  misc_feature (501)..(501): "n" may be a, t, c, g, other or unknown
  misc_feature (545)..(545): "n" may be a, t, c, g, other or unknown
gaaatggaagtgtgtttaataatttgaaaccacaggagaggtctgctcatttattacagggccatgttttagctcttcctggatcgtctcagatctgccattcctctggatatgaacctgtggccgtggcagaaacccagaaatcagtaggggcttgttgtgttcttgtttgatcttcacgttaagatgctattgagcttttttatccatggatggtcttccaacaactgcatccctcacagtggcctgagtggaattaccgatatgagaagaagcctgctccaacacatatgcggcaccaaaatcaatagctccgcccagctcacgatattgaccagaatacctgatgtagccccaggtgaggagtgctattaacagtagtccaaccatacagttgaacaactggggctacaacctcaagacctatgaagccagtgaaggcctgaggctatgtccaaagctncaatgcccntgaacaagacttgcaggggttcggaaggngctgaaaacgtcttgtaccatgggcttgaaaagtctcataaatncctggattccccc

SEQ ID NO: 9030 - DNA, 551 bp, Homo sapiens
  misc_feature (434)..(434): "n" may be a, t, c, g, other or unknown
  misc_feature (441)..(441): "n" may be a, t, c, g, other or unknown
  misc_feature (458)..(458): "n" may be a, t, c, g, other or unknown
  misc_feature (466)..(466): "n" may be a, t, c, g, other or unknown
  misc_feature (475)..(475): "n" may be a, t, c, g, other or unknown
  misc_feature (537)..(537): "n" may be a, t, c, g, other or unknown
  misc_feature (540)..(540): "n" may be a, t, c, g, other or unknown
gtgatctgcatgtgtgacactgattctttggaaataaagagtggaagctgcaggtgacacgtgaagggttatttatggttatgatgaccctgtcctgcaacgagggactggcagccactactgaggaggagggtcccatctctctcctgtcggctttcaccgaggtcacagccagacgtggggcaaaggtgttccctgtcctacccagccgttcctgggcctgccgcctaggggctcacagggcccaggagtccccagctcacaggccagggcatcaggccaggcgcgctcggtgcacaccgcacctgtttggttagtttttttacaaagacaggatcttgctgtgttgcccaagctggtcttgaactcctggcctcaacaatcttccaccttgggcttcgaaaagtgctgggaatactggcatgaaccactgngccccgnttgagctcccggttttnaacactgnaccaatctngaaaaactgacctttttctggcctacaagttatctgaacttaatgttaggaacaaaaaaccnttntggacaccgtg

SEQ ID NO: 9031 - DNA, 562 bp, Homo sapiens
  misc_feature (344)..(344): "n" may be a, t, c, g, other or unknown
  misc_feature (386)..(386): "n" may be a, t, c, g, other or unknown
  misc_feature (401)..(401): "n" may be a, t, c, g, other or unknown
  misc_feature (449)..(450): "n" may be a, t, c, g, other or unknown
  misc_feature (495)..(495): "n" may be a, t, c, g, other or unknown
  misc_feature (511)..(511): "n" may be a, t, c, g, other or unknown
  misc_feature (519)..(519): "n" may be a, t, c, g, other or unknown
  misc_feature (522)..(522): "n" may be a, t, c, g, other or unknown
  misc_feature (540)..(540): "n" may be a, t, c, g, other or unknown
atctttggaattcatttcattaaggttttcacaaaatacaaagctcaaacgtaatcatctatgtccaccacaaaacagaatcaaataagtggttagcacaacaaacatagtgatcttttccattttaaaaaatataaataacaatgttcaaggttttacagttttcttagtgtgtgtctttttaaggctttatgttgcagacccttcattaatggtacttgtaccctgccatcaggatacactgcccaccagcaaggaaggccactgtggatacattcctgagggggacacacactgatccatgttgcctcagcctgttaaaaactaaatgatcaaacaccctncaatcagttctcagtttcattaacttctttctctcaaagtantaatagaaaggggtncgtgtccagcagcattcgagctctcagaagatcaatcaggaagggcannaaaggaaaaaggcttcctcctggaaaagaatttttttcctttcancaggaaccaaccccanttaccccnaangttcaaccaggggttggncctgaaacattttcaaataaaa

SEQ ID NO: 9032 - DNA, 531 bp, Homo sapiens
  misc_feature (449)..(449): "n" may be a, t, c, g, other or unknown
  misc_feature (456)..(456): "n" may be a, t, c, g, other or unknown
  misc_feature (474)..(475): "n" may be a, t, c, g, other or unknown
  misc_feature (496)..(496): "n" may be a, t, c, g, other or unknown
  misc_feature (510)..(510): "n" may be a, t, c, g, other or unknown
  misc_feature (525)..(525): "n" may be a, t, c, g, other or unknown
gtagtttatgtaaaaatttatttgaccaaaatgtagaaaaagtgatactattacatatgatacagttgcaagaatctaaagtgtggattttattccattgcacaatttgctagtgtatttcctgggtagtgtggtgctgaataaataggaatagggtggtccctggtctctcctatagtttgaccaacagttgacccaaaaggttatggtcttcagcgttttaattatatccacgactagatactggggtctgtattcttcaaagtgtggggctgcctattctcccaggaaccaaatggcctccgtcttaagaaagtatgcttactaggaaataccctgcctaccttaggaataaatgctacttaaggaaaaaataagagagctgaaaaagctggtgccatttgaaaaaaaaaagggaaggaatgagatttaactgggctcaaagcttntccgatncaaaatatttgggcatgnnttcataattgcttgccatttnccgccaaaccgaanatggcattaccaaanggactt

SEQ ID NO: 9033 - DNA, 507 bp, Homo sapiens
  misc_feature (44)..(44): "n" may be a, t, c, g, other or unknown
  misc_feature (100)..(100): "n" may be a, t, c, g, other or unknown
  misc_feature (169)..(169): "n" may be a, t, c, g, other or unknown
  misc_feature (171)..(171): "n" may be a, t, c, g, other or unknown
  misc_feature (220)..(220): "n" may be a, t, c, g, other or unknown
  misc_feature (234)..(234): "n" may be a, t, c, g, other or unknown
  misc_feature (247)..(247): "n" may be a, t, c, g, other or unknown
  misc_feature (314)..(314): "n" may be a, t, c, g, other or unknown
  misc_feature (365)..(365): "n" may be a, t, c, g, other or unknown
  misc_feature (379)..(379): "n" may be a, t, c, g, other or unknown
  misc_feature (420)..(420): "n" may be a, t, c, g, other or unknown
  misc_feature (425)..(425): "n" may be a, t, c, g, other or unknown
  misc_feature (443)..(443): "n" may be a, t, c, g, other or unknown
  misc_feature (463)..(463): "n" may be a, t, c, g, other or unknown
  misc_feature (471)..(471): "n" may be a, t, c, g, other or unknown
  misc_feature (496)..(496): "n" may be a, t, c, g, other or unknown
  misc_feature (500)..(500): "n" may be a, t, c, g, other or unknown
gagacagagttcttgctctgtcgcccaggctggagtgcaggggngcaatctcaactcactgcaagctccgcctcctgggttcacaccattctcctgcctnaacctcccgagtagctgggactacaggcgcctgccacctcgcctggctaattttttatatttttagtananacggggttttaccatgttagccaggatggtctcgatctcctgacctcgngatccacccacctnagcctcccaaagngctgggattacaggggtgagccactgcgcctggccatgcctggccaatttttatattttcagtaganacggggttttgccatgttggccaggctggtcgcaaacttctgacctcaggnaatcctcctgcctnagcctccacactgctgggattacaggtatgagccccagtgnccggncttgaatccctctatttncccccaaagaaaaatgctgntttacccnccaacagaaccttccaggaacattnaagnattgcat

SEQ ID NO: 9034 - DNA, 564 bp, Homo sapiens; identical to SEQ ID NO: 5716
  misc_feature (1)..(564): "n" may be a, t, c, g, other or unknown

SEQ ID NO: 9035 - DNA, 570 bp, Homo sapiens
  misc_feature (445)..(445): "n" may be a, t, c, g, other or unknown
  misc_feature (453)..(453): "n" may be a, t, c, g, other or unknown
  misc_feature (476)..(476): "n" may be a, t, c, g, other or unknown
  misc_feature (508)..(508): "n" may be a, t, c, g, other or unknown
  misc_feature (541)..(542): "n" may be a, t, c, g, other or unknown
  misc_feature (544)..(544): "n" may be a, t, c, g, other or unknown
  misc_feature (564)..(564): "n" may be a, t, c, g, other or unknown
attaaattagttgctttataaaacattgcagatgtcataattgttaacataacaatttaccaaactgtagttaactggtgcagtttgctgagcatgttttataaaggaaaggaaaggaaatgccaaaaccctggtaaagttgttccattgcagcctaagagaacaaagatttgtttctcagacacttaaatcaggcaaataaaaataagtttccctcccccacctgaagcagttcatcagtagaaatagcctgataaataactagacagtctttgcactcgagagattccacaacatgtaatgcaataatggaaaggtttaccttctttagcttcaaagttggagggttttggtcattttaattttatatcaaactaagtgcttttcaagcccgcagtatcttcactctgagataagcagtcttcttcacaatgggatttttaanatccccangtccaatttttagaccaaagcanttttaatactaggggcacaccccatgccctgntggaaactgggttttcttggccaggttttgaannanttcaaggggggttgggtaangcttgt

SEQ ID NO: 9036 - DNA, 531 bp, Homo sapiens; identical to SEQ ID NO: 8234
  misc_feature (1)..(531): "n" may be a, t, c, g, other or unknown

SEQ ID NO: 9037 - DNA, 547 bp, Homo sapiens
  misc_feature (426)..(426): "n" may be a, t, c, g, other or unknown
  misc_feature (452)..(452): "n" may be a, t, c, g, other or unknown
  misc_feature (454)..(454): "n" may be a, t, c, g, other or unknown
  misc_feature (472)..(472): "n" may be a, t, c, g, other or unknown
  misc_feature (496)..(496): "n" may be a, t, c, g, other or unknown
  misc_feature (500)..(501): "n" may be a, t, c, g, other or unknown
  misc_feature (547)..(547): "n" may be a, t, c, g, other or unknown
atgagaatgatttatttccggtctggccagctctgaaagagacacatgggggattcggaactttatggcacaggcactggtgcatctgctctctttgtccagtcacacttgggatgcttaattttcctgatattatacatgcaaatcacttacttttcatagaatttaccattcatcaaatgactttcaacaataacaatggtctgacattctttcatgtcgtactgagatttcagatatttattagagaaactataagacagattttcctaatatttttgaagtatgagttcctctgaatagttggtataacatccattaaaaaatagaaaaggttaactttttaccatgatcaaagctagagttcacaatgaaacacctgcatagctctgcccaacatctctgtaacaacagccaagggccggncttgaacatcatgcacagcaatagangnatcatccatggagtcgancctgtggcttgccaaaaatctggnaggnntaaaacgcctgaccactgaattgggaagtaggaaactaaccaggtn

SEQ ID NO: 9038 - DNA, 567 bp, Homo sapiens
  misc_feature (452)..(452): "n" may be a, t, c, g, other or unknown
  misc_feature (465)..(465): "n" may be a, t, c, g, other or unknown
  misc_feature (469)..(469): "n" may be a, t, c, g, other or unknown
  misc_feature (472)..(472): "n" may be a, t, c, g, other or unknown
  misc_feature (482)..(482): "n" may be a, t, c, g, other or unknown
  misc_feature (559)..(559): "n" may be a, t, c, g, other or unknown
  misc_feature (566)..(566): "n" may be a, t, c, g, other or unknown
cttctcttggttttattgtttggtagaaaaacaggctctttaacactgaataaacatctcacgaactgtcgctcctagattacaaaaagtcaaaaccaatttcctttgacgccgggcccttgaatctgacattcaagtcaccgtaatagaaaccagagctgctgaaccttacattctggaaggtgcttgaacaaaggcatgttaaggaccgtttaaaacttctagcatgtaagaagatccatctttccttccaacgcctttggataataacagcagaatcccggagatctgctgctgagtttgagaaggccaagtttaaggattccaaactccagccttcaatatttctgcagaaacttagagaagtaacctccccgtcctctccgctggcttccccaagtacagatgcaggatgcaggtctttcttcctgctacccaggcaccgaggactnaaccatttaccgncttnatnctgggctttnttcaatgggctcttggaggaaaaacttttcggttttgccaactttaagcccttaaaaaagccttttggttaaaaaanggcgggng

SEQ ID NO: 9039 - DNA, 573 bp, Homo sapiens
  misc_feature (416)..(416): "n" may be a, t, c, g, other or unknown
  misc_feature (460)..(460): "n" may be a, t, c, g, other or unknown
  misc_feature (546)..(546): "n" may be a, t, c, g, other or unknown
  misc_feature (548)..(548): "n" may be a, t, c, g, other or unknown
  misc_feature (553)..(554): "n" may be a, t, c, g, other or unknown
  misc_feature (560)..(560): "n" may be a, t, c, g, other or unknown
  misc_feature (567)..(567): "n" may be a, t, c, g, other or unknown
ggatcttgctctagtgtgagcactcctgaacttcacatattctccttgtcccaaatgcaagggtttactctcaagagactctaggctcactgcccataaacctttgagttggaccaaatcttaacatccctgtggatttgctcatactgccctgggcagaactctttccttctttggaagtctgaattacttcatatttgacatctattttgaaattctgttttacagggtttaggatgggggtaggtaggcacaggaaagagagtagagcattctctcttttctagcaatttccattatcatgccccttctagcttttagaccagcagttctgagacagggattatttgcttttgtttgataggtcaggttgtctgggatggtttgccaatagaaattctatagactattattgntcaaagagcaagaattggcttaactctcttcacttatatgtgangctctggccatacttaacagacaccccgtgggactaacacagatatggtgggcctgctgggctctttccaatgggcccacacaagncncaggnntcaaancatggcntttttt

SEQ ID NO: 9040 - DNA, 494 bp, Homo sapiens
  misc_feature (398)..(398): "n" may be a, t, c, g, other or unknown
  misc_feature (421)..(421): "n" may be a, t, c, g, other or unknown
  misc_feature (425)..(425): "n" may be a, t, c, g, other or unknown
  misc_feature (437)..(437): "n" may be a, t, c, g, other or unknown
  misc_feature (453)..(453): "n" may be a, t, c, g, other or unknown
  misc_feature (461)..(461): "n" may be a, t, c, g, other or unknown
  misc_feature (483)..(483): "n" may be a, t, c, g, other or unknown
ggctgtgtgaagttatcatcagtgcaaatagccgagacgggaggggagtggagatggggaacagccgagatcagcattcatgggcatccacggtgccgaggtcacagaaggaactgacccgagagccgtcacagggcggccttaggttagacttgaaggagaacttccaggtggcagctgctgaggccaggacggattgacaggagacgcctgggccacgtgcccaggctcacgcctggaatcccagccgtctgggaggctgaggcgggtggatcacctgaggtcaggagtttgagaccagccggagcaacatggtgaaaccccatctccactaaaatcacagaaattagccgggcatggtggcgggtgcctataatcccacttattcggaggctgangcaggagaatcgctttgaacccnggangcggaactttgncgtgagcccaaatcgngccactgnacttcaacctgggcaacacagnaaaacttcctt

SEQ ID NO: 9041 - DNA, 582 bp, Homo sapiens
  misc_feature (407)..(407): "n" may be a, t, c, g, other or unknown
  misc_feature (503)..(503): "n" may be a, t, c, g, other or unknown
  misc_feature (526)..(526): "n" may be a, t, c, g, other or unknown
  misc_feature (540)..(540): "n" may be a, t, c, g, other or unknown
  misc_feature (555)..(555): "n" may be a, t, c, g, other or unknown
  misc_feature (563)..(563): "n" may be a, t, c, g, other or unknown
  misc_feature (567)..(567): "n" may be a, t, c, g, other or unknown
  misc_feature (582)..(582): "n" may be a, t, c, g, other or unknown
attttttcaaccacatttactagctcacataaatattttaaaacaaatccatctgtcttcccttttggcttccttggcacaatttatcagttcttaacaaactaccataaatatccataaggggaaaatgaattttagaatatgaaagagaggttaataaatagccaaatatgtcaaccattgaaatgaccaccaattttaagattaagcccgatttgcaacttttattgaaataaatgtcatctactaaaaacaaggttaatttataactggatctcaacttgtttaatagcaattgaattttgacataaaaattgcaaaacttcagctaaagaacaaataaaacattcagacacaagcttacacttcaaaaattctatcaacttcaacaaataatgaatgactgnatattaatttacattagtcctgtggtctagagtacattttccatttaaacatttttaatagaacttctgggatggcatggacagcttctagtgggnaataggatatagtccggtcttgntggaagacaccctngacaggatggtggcnggaagccngganaaagcctgaatgggn

SEQ ID NO: 9042 - DNA, 567 bp, Homo sapiens
  misc_feature (442)..(442): "n" may be a, t, c, g, other or unknown
  misc_feature (458)..(458): "n" may be a, t, c, g, other or unknown
  misc_feature (562)..(562): "n" may be a, t, c, g, other or unknown
gagatggagtctcactctgtcgcctaggctggagtgcagtcctgcaatcttggctcattgcaatttctgcctcccgggttcaagtgattctcctgcctcacctcctgagtagctgggattataggcatgtaccaccatgcctggctaatttttgtatttttagtagagacggggtttcaccatgttggccaggctggtctcgaactcctgacctcaagtgatccacccgccttggcctcccaaagtgcaggattacaggcatgagccacagtgcctggactcatttattgattcaatcatttatttatatcggtgtgggctcgaggatatttattttattctttgggttgtgatccaacactgctttattttgttgctcacactgtttcagcttcagccactgggaacatcttccctctgcatgcccatctcacatcactgnatgtataaagttctgncttgctctctgactctacaagatctcagcttatcttggatactttctggcctaagtttaaaatcagctatttttcaaggaaccctggttcgtttaatggaaaanggggg

SEQ ID NO: 9043 - DNA, 556 bp, Homo sapiens
  misc_feature (429)..(429): "n" may be a, t, c, g, other or unknown
  misc_feature (439)..(439): "n" may be a, t, c, g, other or unknown
  misc_feature (473)..(473): "n" may be a, t, c, g, other or unknown
  misc_feature (484)..(484): "n" may be a, t, c, g, other or unknown
  misc_feature (516)..(516): "n" may be a, t, c, g, other or unknown
  misc_feature (542)..(542): "n" may be a, t, c, g, other or unknown
  misc_feature (550)..(550): "n" may be a, t, c, g, other or unknown
  misc_feature (552)..(553): "n" may be a, t, c, g, other or unknown
cagtagaggaaaagaaaacttattaatgatgccaaggcaactagttaaggcaactgaagcataaccttgtccacattcactaaaattccagaaggaacaaatatttaaatgtaagaactgaagctaggggtaaattatttttaaaatattggaattcacaaaaagccattcaaagcataagatccagagcacagaaaaaatgagtaatacatctgactactacataagtactaaaaacatgtccatggcaaaaaaaaaaaaaaaaaacccacagaaaaacaacaacaaaacagaaaaaccaccaacaaaatgaaagtaagtgacaaatcggagggaatatttgcaacatatttgacaaaggactaatttccttaatatatggagttcaaacagattaatgaacatgatcaacaggctgggtgcaatggnttaagcctgnaatcccagccctttgggaagctgaggtggggcanatggcttgggnccaggagttcaaaaccagcctgggcacatggnaaaatcccatttttccaaaaaaattnaaaaatcncnnggg

SEQ ID NO: 9044 - DNA, 548 bp, Homo sapiens
  misc_feature (488)..(488): "n" may be a, t, c, g, other or unknown
  misc_feature (510)..(510): "n" may be a, t, c, g, other or unknown
  misc_feature (513)..(513): "n" may be a, t, c, g, other or unknown
  misc_feature (518)..(518): "n" may be a, t, c, g, other or unknown
  misc_feature (520)..(520): "n" may be a, t, c, g, other or unknown
  misc_feature (533)..(533): "n" may be a, t, c, g, other or unknown
  misc_feature (536)..(536): "n" may be a, t, c, g, other or unknown
aaaaagacagagtctcactctgttgctcaggctggagtgcagtggcgcgatctcagctcactgcaacctctgcctcccaggtttaagcaattctcctgccttagcctcccgagtagctgggattacaggcacccaccaccatacccggctaatttttgtatttttagtagagacagggtttcgccatgttggccaggctggtcttgaacttctgacctcaggtgatccacccgccttggcctcccaaagtgctgggattacaggcatgagtgagccactgtgcttggcctgattttcatatattaaatgacctttgcagtcctgggataaatttcacttggtcatggtgtataatgcttttaatatgctgctggatttagtctgccagcatgttgttcaggattttcgttcctgggccacaattctagacacaccctgggctggaagggaacccactggcttgaaggaaaggaccccatcttggctgnattcatggctggttaactgaanaanccttngnccctgaataaccngcngaaatacctggg

SEQ ID NO: 9045 - DNA, 566 bp, Homo sapiens
  misc_feature (463)..(463): "n" may be a, t, c, g, other or unknown
  misc_feature (491)..(491): "n" may be a, t, c, g, other or unknown
  misc_feature (507)..(507): "n" may be a, t, c, g, other or unknown
  misc_feature (529)..(529): "n" may be a, t, c, g, other or unknown
  misc_feature (551)..(551): "n" may be a, t, c, g, other or unknown
  misc_feature (554)..(554): "n" may be a, t, c, g, other or unknown
  misc_feature (565)..(565): "n" may be a, t, c, g, other or unknown
gacatgctttttctaaagtcttttagtatgttcctacagtatcattctcaagtcatataaactacttgctgtggtactaagtatttaaatatagatgtgctatcaacactttcttaactctagaatatttttagaaatattcttcaacatagtatgatgtcaatgcagaaatgagaaaagaactaaggatttacatcaggttacaatacattaatcaaaaaatacatttctgtgcctctatgaattcttaatattaatttttgcaattttacaaaatcttactaaaaattttggtatttctttccctatattcttcaacaatggatataagtattgttagtgcaaccagttaacagcaacactctgacgtgtttcataaaaacctatactattttataaaaaatccctttcaaaataactctttcaaagtaaagttcccaaaaaggttaatttaatccctgtngacatacttcataaaaggtcagatattngcaatattgccaaacnttacggacctaataagaagctntttaaagcaccggggttttttnccnggttatgcccng

SEQ ID NO: 9046 - DNA, 562 bp, Homo sapiens
  misc_feature (517)..(517): "n" may be a, t, c, g, other or unknown
  misc_feature (524)..(524): "n" may be a, t, c, g, other or unknown
  misc_feature (530)..(530): "n" may be a, t, c, g, other or unknown
  misc_feature (558)..(558): "n" may be a, t, c, g, other or unknown
ccaatttgtaattgtggacaagtgtaacctacttatttgctagaatgattggatctagaatgagccataaccttgaaggtcgtctgaaacaaactcctctccactgctatcgttttctgcttgactcagaaagctctttcttccctggtgcctttcccagcagcatttgggcccatccattactagagcagcaagtagaggttttggaatcagagagttctgggtccgagttgtgactctgctacttactagatgtggtatcctgagcaagttacccaacatctcttctgtaaatggttatcatcaaaatgaattcctaggagtttgaggattaaataatgtgtatagtatacacaaaatctagcattcagagctaaattaagagtagctaagcagttcaataggaactaggacccatgcttcctgtttgactcttgaggcaacacttttttccatggaaagatctggctttcttacaatggctataaaacctttgaaaaagcactggtgctggaanactgggngtactngcttggaaataataccattcctacattnttta

SEQ ID NO: 9047 - DNA, 469 bp, Homo sapiens
  misc_feature (11)..(12): "n" may be a, t, c, g, other or unknown
  misc_feature (20)..(20): "n" may be a, t, c, g, other or unknown
  misc_feature (39)..(39): "n" may be a, t, c, g, other or unknown
  misc_feature (92)..(92): "n" may be a, t, c, g, other or unknown
  misc_feature (120)..(120): "n" may be a, t, c, g, other or unknown
  misc_feature (129)..(129): "n" may be a, t, c, g, other or unknown
  misc_feature (151)..(151): "n" may be a, t, c, g, other or unknown
  misc_feature (280)..(280): "n" may be a, t, c, g, other or unknown
  misc_feature (299)..(299): "n" may be a, t, c, g, other or unknown
  misc_feature (305)..(305): "n" may be a, t, c, g, other or unknown
  misc_feature (320)..(320): "n" may be a, t, c, g, other or unknown
  misc_feature (328)..(328): "n" may be a, t, c, g, other or unknown
  misc_feature (340)..(340): "n" may be a, t, c, g, other or unknown
  misc_feature (394)..(394): "n" may be a, t, c, g, other or unknown
  misc_feature (414)..(414): "n" may be a, t, c, g, other or unknown
  misc_feature (417)..(417): "n" may be a, t, c, g, other or unknown
  misc_feature (421)..(421): "n" may be a, t, c, g, other or unknown
  misc_feature (434)..(434): "n" may be a, t, c, g, other or unknown
  misc_feature (444)..(444): "n" may be a, t, c, g, other or unknown
  misc_feature (466)..(466): "n" may be a, t, c, g, other or unknown
aaatgtcatanngtttactntatttaaatcctgaggttnaaaataaagtatttccacatggcatggcagacactatgaaataatatgcttanggatacaaaagttttccacccccattgngcaggtggngtgctggtatttgatgtgcttntagataattctttggcagataagaatgaattggggtcccagacccaccatcccgtaaggccacatgaattgaggattaatcaattaaagtgcaattccaaatgttgagccttccaaatgaggcttgggnattgctctgcagccaccanaggcanagtgtctctgcatancatacatnaagcagcctttntctttttttaaatcatagatgcccccccaaatttcaagatgtactttattattntaaaagtgcttaagaggaanganaganttattaattcagnctctcctggntccttggaagaaacataatganatg

SEQ ID NO: 9048 - DNA, 566 bp, Homo sapiens
  misc_feature (3)..(3): "n" may be a, t, c, g, other or unknown
  misc_feature (100)..(100): "n" may be a, t, c, g, other or unknown
  misc_feature (153)..(153): "n" may be a, t, c, g, other or unknown
  misc_feature (162)..(162): "n" may be a, t, c, g, other or unknown
  misc_feature (182)..(182): "n" may be a, t, c, g, other or unknown
  misc_feature (214)..(214): "n" may be a, t, c, g, other or unknown
  misc_feature (220)..(220): "n" may be a, t, c, g, other or unknown
  misc_feature (260)..(260): "n" may be a, t, c, g, other or unknown
  misc_feature (294)..(294): "n" may be a, t, c, g, other or unknown
  misc_feature (391)..(391): "n" may be a, t, c, g, other or unknown
  misc_feature (458)..(458): "n" may be a, t, c, g, other or unknown
  misc_feature (497)..(497): "n" may be a, t, c, g, other or unknown
  misc_feature (515)..(515): "n" may be a, t, c, g, other or unknown
  misc_feature (535)..(536): "n" may be a, t, c, g, other or unknown
  misc_feature (546)..(546): "n" may be a, t, c, g, other or unknown
  misc_feature (550)..(550): "n" may be a, t, c, g, other or unknown
  misc_feature (564)..(564): "n" may be a, t, c, g, other or unknown
canaactgtatttgttattcatacatttgcgttggtttaaatacattacgtacaatttctacattggattagaagaatgacacagggggcagcaacactntcgcagcccagcctccattccctgacactggaggcagggcctatggctggcanagggacggngttccatgagtgccactcanaagcctcccccggcattctgggcccctggctnttccanagtccacattcaaggcaacctgagcacaggcttgaggganagtggagaaaggccaggaaaggatgcccacactnttgcctgccaggcccaggaccagctctctcctacactggacccaatttccttctgatcacagaactggtctggatcaagacaatggggaaaactggngtggaagctgtggccaggtgaggcaaccgggcttcctggtaaacccccaggcttttttgagccccanatgggcactttaccaacagggttgggtaaaaatgttacngagagctttgcccacctngggccctttgggtctaaaannaaggggcaanggtnttttaaaaattgtncc

SEQ ID NO: 9049 - DNA, 576 bp, Homo sapiens
  misc_feature (484)..(484): "n" may be a, t, c, g, other or unknown
  misc_feature (489)..(489): "n" may be a, t, c, g, other or unknown
  misc_feature (504)..(504): "n" may be a, t, c, g, other or unknown
gagacggagtttcgctcttgttgcccaggctggagtgcaatggcgcgatctcggctcgccacaacctctgcctcccaggttcaagcgattctcctgcctcagcctcctcagtagctgggattacaagcatgcaccaccacacccagctacggtgttttctttagggaagctatttcatcaactatatctcagcttccacccaacctgtggattatccctgaggctttgtagattgcaacacggccgcttccctctttagactggccatctctacggtctcgggcatacatattcttctctgagaaattgcagccctggaagtcgaagtgggctgaattcaaggagatgagctttggatatagcatgttttccacctgggtgctctcatcactaaagctgtttccgtacatgaagcagccccttttggaagcatgtcatgcaggtccacatagtaagcaacgccactctctttgggggggatggnatcangggcttgactctttnaagccccgaaactggtggggcataatccacacctggtgaacttttggtctggtggctctggtggttccagct

SEQ ID NO: 9050 - DNA, 565 bp, Homo sapiens
  misc_feature (434)..(434): "n" may be a, t, c, g, other or unknown
  misc_feature (495)..(495): "n" may be a, t, c, g, other or unknown
  misc_feature (534)..(534): "n" may be a, t, c, g, other or unknown
  misc_feature (560)..(560): "n" may be a, t, c, g, other or unknown
  misc_feature (564)..(564): "n" may be a, t, c, g, other or unknown
ctgagatagagtctcgctctgttgtccaggctggagtgcagtggtgcaatctgggctcactgcaagctccgcctcctgggtttacttacgccattctcctgcctcagcctcccgagtagctgggactacaggcgcccgccaccatgcctggctaatttttttgtattttagtagaaacagggtttcaccatgttagccaggatggtctcgatctcctgacctcgtgatctgcccgcctcagcctcccaaagtgctgggattacaggcatgagccaccatgcctggccaagagtggtttctaaaatatgagcccatggtatggctgagataccagttgatcataatggagtggggtactgcaagtatttagggctggcaagtagggaggtctgaggctctgaggggaggggctgggtcaacagacaggctcatanagggctcaaggcaggaagtgttttaataatgttaacgagtagcatggcataccggaacacncgatgaatgtcacctttacctcaaggatttccggacctnaaagctattcaaggcatccagttaantggnt

SEQ ID NO: 9051 - DNA, 580 bp, Homo sapiens
  misc_feature (14)..(14): "n" may be a, t, c, g, other or unknown
  misc_feature (168)..(168): "n" may be a, t, c, g, other or unknown
  misc_feature (450)..(450): "n" may be a, t, c, g, other or unknown
  misc_feature (498)..(498): "n" may be a, t, c, g, other or unknown
  misc_feature (541)..(541): "n" may be a, t, c, g, other or unknown
  misc_feature (545)..(545): "n" may be a, t, c, g, other or unknown
  misc_feature (566)..(566): "n" may be a, t, c, g, other or unknown
cattttatttttanagaggggtcccactatgtcacccagactggtctcgaactcctggccacaagtgaccctcccaccttggcctcccaaagtgctgagattaaaggagtgagccaccatgtccagtctctttttcttatatgcaatactcattatagagctagttgngttttcctgcaattttcttgatacccaaaatgagagcaagtttaacttaaaaatgctgcagggtttatgcaatgcctatcaatgttacaattctgacccactctccatatttattactctcagtattctatctgtatatttccttatcctattttaaactgttttcattttcttgtttaattgtatatgcatctatgtatttatttccttgaaaactacacttgcataaggtagttttaaaaattaatgaccactggttctacactatgcaaaatatgcaanggaccggactctatacaggtatctaccaaactaaaaaaaaaaaggggnttaataactttaaaaagccctacaaccttttaaaaagccctcntttnaaaatatttcatattaaaagnaatcaacccccaca

SEQ ID NO: 9052 - DNA, 545 bp, Homo sapiens
  misc_feature (401)..(401): "n" may be a, t, c, g, other or unknown
  misc_feature (485)..(485): "n" may be a, t, c, g, other or unknown
  misc_feature (488)..(489): "n" may be a, t, c, g, other or unknown
  misc_feature (495)..(495): "n" may be a, t, c, g, other or unknown
  misc_feature (516)..(516): "n" may be a, t, c, g, other or unknown
  misc_feature (526)..(526): "n" may be a, t, c, g, other or unknown
  misc_feature (530)..(530): "n" may be a, t, c, g, other or unknown
aggtttgaaatatctttttgcaatagataatcttatttacattaatacagaatcattttacattcctaaatcagacactaatagatgctttattttagtgaattataaaggaaaacaaaaaggaaactgttgagaagtgttcttcattaacctgtctaacgacagcccgaagatcctgaaacacatggaaactgcgacatgctaccagagctggtgagggtgacgccgttcaccgtcccctccacatctgtctcgtcctcggcgtagctcaggatcaggctctgctgccggctcgttagcctctttggaactcgtatcttgatgtggatgtagtggtctccgtagccgtagctgttaatccgggggatgcctttcccacccatccgaatcttctggtctgnctgagtcccaaggggggatcggcacgttgatcgcttgtacaggccctgggcttttggttgaccccccagaaaaagcctgggctnttnnaataanaaggccgaaatggatgttggncccgccttcngaanaaagggtttttttgg

SEQ ID NO: 9053 - DNA, 576 bp, Homo sapiens
  misc_feature (461)..(461): "n" may be a, t, c, g, other or unknown
  misc_feature (530)..(530): "n" may be a, t, c, g, other or unknown
  misc_feature (539)..(539): "n" may be a, t, c, g, other or unknown
  misc_feature (565)..(565): "n" may be a, t, c, g, other or unknown
  misc_feature (572)..(572): "n" may be a, t, c, g, other or unknown
  misc_feature (575)..(576): "n" may be a, t, c, g, other or unknown
aatgtacggtataatttatttatttaataaacatttattaccactatacacttctagaatgaggtggatggtaaatcaaataaacataaagcaatattaagtacctaccgtgtgcaaaagcaaaaaaagacatggtccctgccctcatggagctcacagtctagctgaagcagacaaacaagtcacaaatacaatggcaaagcaccagggaagcattatggaggaaaggattggttctgcctggagtatgcagggcaggcttcccagagatggagacaatgaagctgggtcttggatgagtaggagttcaccagatgaaggggaagggggtaagcacattccaagcagagcaaacagcgtatgagcaagcagagtcttgaaagcgcatgccatggtgcaggacgatgagtgttccagcgcactagagcagaaaagtgccccaaactgaagagatgaattantggttggggttttgatgaaacataagtgtcagaaaataaattgcccattcacttacataacttaactgngggtctggnacagtcccgtatcttaaaagcctttnattcatnaann

SEQ ID NO: 9054 - DNA, 572 bp, Homo sapiens
  misc_feature (521)..(521): "n" may be a, t, c, g, other or unknown
  misc_feature (528)..(528): "n" may be a, t, c, g, other or unknown
  misc_feature (563)..(563): "n" may be a, t, c, g, other or unknown
agggaaacaagattcatgttttatttccacagagaaactcaaaagtaggaagctcctccttcctggagaactgtcacagtgacttcaggtcaccaaagggaggaggtacagaaagatgctggtgtatgtgacgaggctggtggccactgaagcaccacagtgcagtgggaagaaacaaggagagacaagctgggtccccagcctaggaaacagaggtgtggcagccgggccagggctggcacaggctgggggccaaggggaggagctccctgacgaccagtgcttttcggggcctcggtggtggttgcaagaaattgcctaccaaaacttcacccactgcagcaggccaggttgcacccgggaagccgaggaagaaggtgagactcccccctttgcaggggtcttgactgagtacttcccaccataggcagtgggatacgcatgctggttgtaattgtagttctgatcggttttgcctgcacgtttcttgaatgatgacccgtccgaccttaataaatggntttcaanttgaggaaaggatgtctgtttgaaatcctcccaantcggttgaa

SEQ ID NO: 9055 - DNA, 493 bp, Homo sapiens
  misc_feature (371)..(371): "n" may be a, t, c, g, other or unknown
  misc_feature (420)..(420): "n" may be a, t, c, g, other or unknown
  misc_feature (445)..(445): "n" may be a, t, c, g, other or unknown
  misc_feature (464)..(464): "n" may be a, t, c, g, other or unknown
  misc_feature (469)..(469): "n" may be a, t, c, g, other or unknown
  misc_feature (472)..(472): "n" may be a, t, c, g, other or unknown
  misc_feature (483)..(483): "n" may be a, t, c, g, other or unknown
  misc_feature (488)..(488): "n" may be a, t, c, g, other or unknown
ccaatgaatcaacatactttattagacccactaagtgccaggggaggggcctgtgccctagagccaggttacagggctcacccgtagattcagtctggtctctccccatcatgcctctcacttccagtctgggcttctaataggagggccccgacttcttccctcccagtcattctctcgaatggagaatctttcctcattccagggacaccaaggctcaggaaggggcctatccatcatcagtagagccagacaagctctcccatcggacgtcctgtggcggggcccagaaatgggtgccgctgcctgtgggactgcccttccgggaggaccagggtgtcttcagtgctcttggcctgcacgtggagganagtaggcagatgtctggtgctctttaagctcaaaggcatcatggccctntcggaagcagcgggcacagaaaagnccccattgagccagcgcancgtanggnggcatcctcantgcanatcca

SEQ ID NO: 9056 - DNA, 549 bp, Homo sapiens
  misc_feature (422)..(422): "n" may be a, t, c, g, other or unknown
  misc_feature (424)..(424): "n" may be a, t, c, g, other or unknown
  misc_feature (453)..(453): "n" may be a, t, c, g, other or unknown
  misc_feature (493)..(493): "n" may be a, t, c, g, other or unknown
gttaaactatacactctttattattaatgtacatttatgaaaaattctgcacagttacaaaagtgcatggttataaaatcatctccatacaaaggttggcatcttccctctaaccccacccctccccagccctcccacccccagacattagcacattacaggacagtgcttagaaaaactgagagctctgtggatccagctctccgcccagtgctgtgacaaacacaatagtgatttacaaaagaccttgtgacgccctcacttcccttttgcctcttcctggggtggggaagcgcagacaattttctctggctttaggaagatgtccttttgaggaatgggttaagatatatctttttagtcttctactgctggaaaggatgtcagcacagacacgtatagggggaaaatgggagctggangncttccccatgggtgaagacaaacacctgncttggactgggtcaaatttcatacatgtccctcctcgaanggagccatgaaccttggagcaacttggagacctattttgcaaagttcctgggaatt

SEQ ID NO: 9057 - DNA, 488 bp, Homo sapiens
  misc_feature (30)..(30): "n" may be a, t, c, g, other or unknown
  misc_feature (61)..(61): "n" may be a, t, c, g, other or unknown
  misc_feature (77)..(77): "n" may be a, t, c, g, other or unknown
  misc_feature (101)..(101): "n" may be a, t, c, g, other or unknown
  misc_feature (162)..(162): "n" may be a, t, c, g, other or unknown
  misc_feature (195)..(195): "n" may be a, t, c, g, other or unknown
  misc_feature (234)..(234): "n" may be a, t, c, g, other or unknown
  misc_feature (251)..(251): "n" may be a, t, c, g, other or unknown
  misc_feature (257)..(257): "n" may be a, t, c, g, other or unknown
  misc_feature (278)..(278): "n" may be a, t, c, g, other or unknown
  misc_feature (302)..(302): "n" may be a, t, c, g, other or unknown
  misc_feature (398)..(398): "n" may be a, t, c, g, other or unknown
  misc_feature (424)..(424): "n" may be a, t, c, g, other or unknown
  misc_feature (435)..(435): "n" may be a, t, c, g, other or unknown
  misc_feature (439)..(439): "n" may be a, t, c, g, other or unknown
  misc_feature (442)..(442): "n" may be a, t, c, g, other or unknown
  misc_feature (467)..(467): "n" may be a, t, c, g, other or unknown
  misc_feature (487)..(487): "n" may be a, t, c, g, other or unknown
gaaaaagtcatgaagcttcaaatagatctntatagcaattcttgctgccttgaagtaaaanggatgctgtcgaagtncatcttctagttttaataagtccncatatgatctaagggtaatcttcctcatacagtatgtatgaaagtcaaactggtcatcagngattttctctcaatctcatgacatttcttaagngcttcaccaaatttattcattgctttataagcctgggcncattctgtttggaaccncatgcnctgcatttcattcaaattctntaccgctgatgttccttcccttgnaaactttgagcacatttcttcagcttctttaatcaggttggcttttagcatgtattttgcacatttggagttgataaactggctgctgggtccaanggcctgggcctaatccatccccttgnaggcttctttnaaanttncagctgcttatagattttagcttcncgagaaagagttcttttaang

SEQ ID NO: 9058 - DNA, 543 bp, Homo sapiens
  misc_feature (420)..(420): "n" may be a, t, c, g, other or unknown
  misc_feature (444)..(444): "n" may be a, t, c, g, other or unknown
  misc_feature (506)..(506): "n" may be a, t, c, g, other or unknown
  misc_feature (508)..(508): "n" may be a, t, c, g, other or unknown
gagaatgtgagatttttaaaaacaaagacaacataattcaggttaactctgttgaacagtcaataaatgaaattcatctacacctgaataaaacatatttaacaattgaaaaaattttaaacaaccacaaaaagtaaaaactttaaacaaacatgaacaggatttgtttttagggcacacaaaggcccctgcagcagattccaacagtagctttactggtgtgtcttctacagatgagttaaagagacaggctgagctccacacaggcaagatgactaacagggcgacaggacagtcacacagggcggagtgccacacccggctataatccccagattccactgcagagctggctttgtgcgtaggaggcacacaaagaaaggtgattcaggcagacattattcaaagctacttcgtcgngtaccattggaataatggttgggnaaacttttgggctttggatttttttttaagttttactccttggatttaacttcttaatacangnccttaaacttatgccgctgcaaaaacctatgccgt

SEQ ID NO: 9059 - DNA, 495 bp, Homo sapiens
  misc_feature (92)..(92): "n" may be a, t, c, g, other or unknown
  misc_feature (226)..(226): "n" may be a, t, c, g, other or unknown
  misc_feature (249)..(249): "n" may be a, t, c, g, other or unknown
  misc_feature (378)..(378): "n" may be a, t, c, g, other or unknown
  misc_feature (415)..(415): "n" may be a, t, c, g, other or unknown
  misc_feature (424)..(424): "n" may be a, t, c, g, other or unknown
  misc_feature (464)..(464): "n" may be a, t, c, g, other or unknown
  misc_feature (466)..(466): "n" may be a, t, c, g, other or unknown
  misc_feature (469)..(469): "n" may be a, t, c, g, other or unknown
  misc_feature (471)..(471): "n" may be a, t, c, g, other or unknown
  misc_feature (490)..(490): "n" may be a, t, c, g, other or unknown
cagaccagctagatatttttattaatgatatataacctctttaaaacatgtatatttaccaaaagcattctgatatggcattcctctagtgngactttttgcatgtaaattaatacagcctttttgaccttccatacagtcaggttcctcttcagtgtggatgtttcctaacgaccaagttcaagggctttccaacatctctttcactcatgggacttctcaatgngtgctttgacatgttcccaaagnggaagctaaaaacaaagaagaatctccacacattttacattcataagatttttcacacttgtgagatcacagctgaatattaaggtataaggcagagtgaaaggttcaacacattccttacagccaganggccgtgcatttatatccaagggctcacaagctcaanagggccccnggaaaaaatggaaggtttttccccttcttacaattatagnanttntnttcagcatggggtcaaacnggctc

SEQ ID NO: 9060 - DNA, 409 bp, Homo sapiens
  misc_feature (339)..(339): "n" may be a, t, c, g, other or unknown
  misc_feature (368)..(368): "n" may be a, t, c, g, other or unknown
  misc_feature (375)..(375): "n" may be a, t, c, g, other or unknown
  misc_feature (381)..(381): "n" may be a, t, c, g, other or unknown
  misc_feature (396)..(396): "n" may be a, t, c, g, other or unknown
  misc_feature (401)..(401): "n" may be a, t, c, g, other or unknown
  misc_feature (406)..(406): "n" may be a, t, c, g, other or unknown
ctttttttttgagacagggtctcactgtgttgcccaggctggagtgcaatggcgttaatatcgctcattacctcaaacttctgggctcaagcaatccttcctcctcagctcctcaagtaactgggactataggtgtacaccaccaagcttggctaatttttcatttttcatagagatagggtctcccaatgttacccaagctggtctgaaactcttaagctcaagcgatcttcttgccttggcctccgaaagtgctgggattataggcgtgagccactgtgccccgccgatttatatatcttcttacatgatacatcttattatcaattgacaagctgntcttttacttgaaatttactctttgggangctaggncccaangcttggggggggaanggccnaagtnctt

SEQ ID NO: 9061 - DNA, 526 bp, Homo sapiens
  misc_feature (65)..(65): "n" may be a, t, c, g, other or unknown
  misc_feature (87)..(87): "n" may be a, t, c, g, other or unknown
  misc_feature (137)..(138): "n" may be a, t, c, g, other or unknown
  misc_feature (148)..(148): "n" may be a, t, c, g, other or unknown
  misc_feature (159)..(159): "n" may be a, t, c, g, other or unknown
  misc_feature (327)..(327): "n" may be a, t, c, g, other or unknown
  misc_feature (336)..(336): "n" may be a, t, c, g, other or unknown
  misc_feature (430)..(430): "n" may be a, t, c, g, other or unknown
  misc_feature (439)..(439): "n" may be a, t, c, g, other or unknown
  misc_feature (443)..(443): "n" may be a, t, c, g, other or unknown
  misc_feature (463)..(463): "n" may be a, t, c, g, other or unknown
  misc_feature (502)..(502): "n" may be a, t, c, g, other or unknown
  misc_feature (519)..(519): "n" may be a, t, c, g, other or unknown
  misc_feature (522)..(522): "n" may be a, t, c, g, other or unknown
ggggtctcagttcactctttccttggttattaaatatcaacttttcctgcctaatgggctgaggntcattttcccattcctcaaggnaagggtagactacctaggaacttattgcatctttaggccagctggcttanngctacccatntgaacccccanattactacccaagtcttccttttgccccttcctgccctaacagcaagtaccaggccagtcccttccccagcaaatgccaggggcttcatgtgaagaggaactggccacaaggctgaggggaggaggagaaactgtttctgcaggaaggacagcagtgcctccaggctnttgggcatnttcacatgtttctagataaaggacaagctcaactttggagcctctggtaggcagaagaaaggaggcaagggaagtatggcctgggctttaaaanacccggttntctnggatggatccccagatgacnaaaggcaaggttcctggggacctggagtcacaccagggncctagccaagccttttnctnagaa

SEQ ID NO: 9062 - DNA, 546 bp, Homo sapiens
  misc_feature (457)..(457): "n" may be a, t, c, g, other or unknown
  misc_feature (504)..(504): "n" may be a, t, c, g, other or unknown
  misc_feature (522)..(522): "n" may be a, t, c, g, other or unknown
  misc_feature (539)..(539): "n" may be a, t, c, g, other or unknown
  misc_feature (546)..(546): "n" may be a, t, c, g, other or unknown
catttttgcaaaaatgatcttttattattgagctccaagaatcaagtaaactgcactatcattcaataatgttccaagataccaatcaatacgtgaatcattgctttctcttggaagcacacattttgttaaatatttaaaacttaattttcataatgaaaatttttcaagatagtctctacatatgcctcctccccacttaaattatttaactcttgaattttgatctgttttctgttttaagaagctcttttctactctatactaaaaaattcaaatttatgaatcagccagtatcccctaagtgactatcttgggcaaaactagtaaatgcccatactgaccacaattattataaataattaacatattacaaacatataacttttttacctgtaaatacccataaattaggtaaaatacaaaaactccagcaacacatatgaaaaactggagnaggtttggtaaacttgctggagattcatggccaggtcccacaacggnggcaactggcttggatgngggggggacattggttngggtttn

SEQ ID NO: 9063 - DNA, 530 bp, Homo sapiens
  misc_feature (439)..(439): "n" may be a, t, c, g, other or unknown
  misc_feature (466)..(466): "n" may be a, t, c, g, other or unknown
  misc_feature (485)..(485): "n" may be a, t, c, g, other or unknown
  misc_feature (487)..(487): "n" may be a, t, c, g, other or unknown
  misc_feature (508)..(508): "n" may be a, t, c, g, other or unknown
  misc_feature (522)..(522): "n" may be a, t, c, g, other or unknown
  misc_feature (528)..(528): "n" may be a, t, c, g, other or unknown
gagatggaatttcgctcttgtcacccaagctggagtgcaatggcgatctcggctcaccacaacctccgcctcccgggttcaagcaattctcctgcctcggccttcctgaacagctgggattacaggcatgtgccaccacgcctggctaattttgtatttttagtagagacggggtttctctatgttggtcaggctggtcctgaactcccgagctcagatgatccgcccacttcagcctcccaaagtgctgggattacaggcgtaagccaccacgcccagcccatatttcagatttttaaataaccacttacttaaaaaaaaaaaaaaaagaaaaaagaaaccacatagttgtgattcaagaatcttcaaatctatgcacttcaaactgaagcaaatgaaatacgtaaaaatgtcgagttaatcttcttggctctttctnaaatcaaattacaaactcttaacttcnggattagtttcccaaattngnaaaagtagtctattttacccnccaaaaaggggccncatttntg

SEQ ID NO: 9064 - DNA, 540 bp, Homo sapiens
  misc_feature (435)..(435): "n" may be a, t, c, g, other or unknown
  misc_feature (457)..(457): "n" may be a, t, c, g, other or unknown
  misc_feature (495)..(496): "n" may be a, t, c, g, other or unknown
  misc_feature (516)..(516): "n" may be a, t, c, g, other or unknown
  misc_feature (521)..(521): "n" may be a, t, c, g, other or unknown
  misc_feature (527)..(527): "n" may be a, t, c, g, other or unknown
  misc_feature (536)..(536): "n" may be a, t, c, g, other or unknown
aatacacatttgtatcttgaccttttcacttgtttttctcaaatatttcatttctgggccccatccattacagggttaccaggaggcaaattttatctacataaatattcacatgaaaatagtaacttacaaaaagaaaaaaaataaggcagcttcataacacaattattcttttacacttttaacaatataactcctcccgttcagaataaatatacacccaatgtatggagcaggattcaaagtggatagtggcttgggggtgcttagacagtgttatcgcttgggacctggagtcctgggggaggcagtggtggtcttcttagacatggttgggattttggaaggtttgtttagccctctcctggagttgccttggccccctgcagcgctgctttctgaagtgtcggaacaagcagactgcgtctctaagangtcaaagtcagaacgtcacttnctcgccggctgctgggctcgactccgggtcgattccannccgactccaaggcgactggnagacnttttangggctgccnaata

SEQ ID NO: 9065 - DNA, 553 bp, Homo sapiens
  misc_feature (475)..(475): "n" may be a, t, c, g, other or unknown
  misc_feature (513)..(513): "n" may be a, t, c, g, other or unknown
  misc_feature (522)..(522): "n" may be a, t, c, g, other or unknown
  misc_feature (543)..(543): "n" may be a, t, c, g, other or unknown
  misc_feature (551)..(551): "n" may be a, t, c, g, other or unknown
atgtttttttctgtcagtttaatccattttattgacttctcaattaacaacaaaattcatttggacagtaaatcagaaaatactttctatggtggctttaaattacattttttaacccaaaaatgttatccagagccattttagacaaccaatgtatcttaagtacaaacggtaaaaattcacattcccttcagtaactctccttccacttagaacacaatgaacttcttaggtaggcagagttctcgttcacttaaccacaaccccattttagcacagaactgcagcaaaaagaattgaagaagtgattagaaaggatatgcattattaataaaccatatgctatgtgagtgttaggttcccacgaaatattttactgtatatttaaaaaaaaatcccttctcaagggcactgctttcattcaaggactgatttcattacctacttcattatcttttataggggaaatgctccntttcaaggtattaatacacactggagttggtaccaggnaacactggnctacacctggaggttaaaatnttagtgcngg

SEQ ID NO: 9066 - DNA, 545 bp, Homo sapiens
  misc_feature (440)..(440): "n" may be a, t, c, g, other or unknown
  misc_feature (462)..(462): "n" may be a, t, c, g, other or unknown
  misc_feature (483)..(483): "n" may be a, t, c, g, other or unknown
  misc_feature (491)..(491): "n" may be a, t, c, g, other or unknown
  misc_feature (502)..(502): "n" may be a, t, c, g, other or unknown
  misc_feature (521)..(521): "n" may be a, t, c, g, other or unknown
gagacagagtttcactgtcgatgcccaggctggagtgcaatggcatgatcttggctcgccgcaacctccgcctcccgggttcaagtgattctcctgcctcggcctcccaagtagctgggattacagacatgcgccaccatgcccggctaattctgtattttcagtagagatggggtttctccatgttggtcaggctggtctcgaactcccgacctcaggtgatccgcccacctcagcctcccaaagtgctgggattacaggcgtgagccactgtctctggcctgggtctcccatttctagctgactttgggtgacacaagacagctgagcacatgcacctgcgcccgctcatgcacaagaccctcctgcaaccacagcaaaggagggacgcaggtgtcaaccctgaaggacacaaagaatgggaaaggggaaggccgcantgggagacccgtggcattttcngagagatcccggatgaacgtncaggaacnggctttgactnctaagaggaggggttcccnccaaggggaagggggttttcttaa

SEQ ID NO: 9067 - DNA, 557 bp, Homo sapiens
  misc_feature (536)..(536): "n" may be a, t, c, g, other or unknown
  misc_feature (554)..(554): "n" may be a, t, c, g, other or unknown
acaatttttaattttttttaagacagtgtctcactctgtcgctcaggctggagtgcagtggcgcaattagaactcactgcagcctcaacctcctgggctcaaacaatcctcccacctcagccttctgagtagctagcactacaggcacacgccaccacacccagctaactttttgtattttttgtagacagggtttcaccttatttctcaggctggtcttcaacttctgggctcaagcaatccacccgcctcagtcacccaaaatgctaggattacaggcgtgagccattgcgcccagcctcaaaactcttctacctaaaatcaccttcagagccatgctagaaaattagtatcattcctttacaatcggaatccaacttggccactaaaatgtttccttagacttggtcctaaatgatttttggattgtttcaaaacctgaaaaacaccttcacaggataaagattaaagaatgggccactggatctgagaacatttcaaaaagaagttggacttttaagcttttgccaattccngggaaaatggctttccanatt

SEQ ID NO: 9068 - DNA, 502 bp, Homo sapiens
  misc_feature (476)..(476): "n" may be a, t, c, g, other or unknown
  misc_feature (481)..(481): "n" may be a, t, c, g, other or unknown
  misc_feature (483)..(483): "n" may be a, t, c, g, other or unknown
  misc_feature (490)..(491): "n" may be a, t, c, g, other or unknown
  misc_feature (495)..(495): "n" may be a, t, c, g, other or unknown
  misc_feature (499)..(499): "n" may be a, t, c, g, other or unknown
aaataacaaaatatatttcgatatgcacagttttaactgaggacacacaagccttcctcgggctgcaggcccaccgccctcccagtgggattcacagcccctgcggagtttgtcctcacgcacaccacacacgatcgggtataaaacacattctataaacacgttctgatgcaaactgtgtgtccataaatatatatttatgcaagttcctcccacccactgcagggccgtacagctctggggacaggaggtcacagccgactttaaaccgcaggttaagtagaaggttgcaggtcaaatagaagttcccgtgtgattgcatcacccaacggcactgttctgtcatcaggaaatgctgagtgcccgccgtggccgggtgggcgcgggcggtggtcagacgctgctctggagctggctatggcaaagaagaggacgcccagcaccttgtacaggagccccatgatgaagtattgtanccggntnatgggcnnattntggnacc

SEQ ID NO: 9069 - DNA, 543 bp, Homo sapiens
  misc_feature (430)..(430): "n" may be a, t, c, g, other or unknown
  misc_feature (499)..(499): "n" may be a, t, c, g, other or unknown
  misc_feature (537)..(537): "n" may be a, t, c, g, other or unknown
  misc_feature (541)..(541): "n" may be a, t, c, g, other or unknown
aagaagtgcatattctttaatccaggaattactcaagaaatttatacattttttaaaaagatcaccaaatgcatcccacatagttcctttacaataaacaaaagataaacaacctagcgtcctgtcctatatgcgctctaccagatgactcaattatattccatccatccatggaatcctagacaatcataaaaggacatttatgttaacatggaaagtgaagatacgctttgaagaataggctacaagagagaatacattacacaatcctactgctgtataaaacaaaacatctggaagaatctatgcttaaatattaatagtgtgtcccgcaaagtggtaggataatagtgacttttattctttttacttatctctattttctcatgtttctgtaatgaacatgtttcataaaacaaaatgggtctgntataaaaatctgaaaacttggttttgaaagagagcagtattacaggctgtaagtggcaaataaaatttnatggtaaatattccgcttccggggaaataaccccattnttanta

SEQ ID NO: 9070 - DNA, 562 bp, Homo sapiens
  misc_feature (474)..(474): "n" may be a, t, c, g, other or unknown
  misc_feature (488)..(488): "n" may be a, t, c, g, other or unknown
  misc_feature (499)..(499): "n" may be a, t, c, g, other or unknown
  misc_feature (526)..(526): "n" may be a, t, c, g, other or unknown
  misc_feature (531)..(531): "n" may be a, t, c, g, other or unknown
ctaatacatggggttttcttacattgtcctggccgatctgcaactcctgggctcaagcaatccttccgaaagtcctgggactacaggtgtgagccaccacgctcagcctttttttccttattactgtactagggacatttgtggcttttccacaatgagacttagtagagaaatgacagcttcccttggccctatcctgaaatacactaactagctcttctctgccagggctaccgttttctccctaacctttgcagatgtatgtatccatataaatgtttctatttcaacaaactgtagaaagtatacagtctgtacagctccccttataatgctattacctgatgatcctgactacaagttggaattatctgcatacttggcaaaattcaagtgtggctgcctatgcctcgagagaatgagcagcaaaccagcccagtcctaaattcgaatagcagctcttaaagagaatanggagctcttggaangctttctttangactggatattcaatttctgggcttanccccngggttaattctaccaggccattttgagggga

SEQ ID NO: 9071 - DNA, 549 bp, Homo sapiens
  misc_feature (436)..(436): "n" may be a, t, c, g, other or unknown
  misc_feature (484)..(484): "n" may be a, t, c, g, other or unknown
  misc_feature (506)..(506): "n" may be a, t, c, g, other or unknown
  misc_feature (510)..(510): "n" may be a, t, c, g, other or unknown
  misc_feature (537)..(537): "n" may be a, t, c, g, other or unknown
  misc_feature (544)..(544): "n" may be a, t, c, g, other or unknown
ggattgtgatgtaatctttatttcttactctgagctccagttagaaaagtttgacaatcattgttatagagctatgttcagaaagtggagactttctgactcactgtgagctctgctgtatctatgcgctccctggagagggagcaacttgctaaggtacagtcctgtccattggcatggatatttattgttccacatgttgggaaaaccatgtgcaataaaaatcaaacatatgaaacaatggctgtcattgtaccacagtatacattgtatcttggtgaaggttcttaaattactccttggagtttcctaattcacttcaggaaggatttgttgtgttccgtctttatgctgtcacttgcaaacacttttgctttgctagttcttgtattagatcttcatatacttgcaaaaagaggtcctcttcagattttgntccatccaggtcacaacttccatgtgatgtcctgcatttcttggctgnctttagatcctgggcacacatnggcnttaaaagattcccgaaagcttggaggntaaaaanccttt

SEQ ID NO: 9072 - DNA, 494 bp, Homo sapiens
  misc_feature (434)..(434): "n" may be a, t, c, g, other or unknown
  misc_feature (439)..(439): "n" may be a, t, c, g, other or unknown
  misc_feature (454)..(454): "n" may be a, t, c, g, other or unknown
  misc_feature (461)..(461): "n" may be a, t, c, g, other or unknown
  misc_feature (473)..(473): "n" may be a, t, c, g, other or unknown
  misc_feature (485)..(485): "n" may be a, t, c, g, other or unknown
  misc_feature (494)..(494): "n" may be a, t, c, g, other or unknown
cttatggattctttattgaatcacaaacaactcagggcatcaggccccagcagctgcattagaacccatctgggattgtgaggggactggagagggaggggggagaagacccgctctccctagcttttcactatatagagtaaaaacatcagaaatcaccccaagagaaaggacataccaaatgcccaccagaagggccagggactgcaagccaccctgagcgcaggagggtgtggtgaagggtggtatggccccgaaatttgtgtgtgtcccccactccccctgcaaattcacattggaattctcacccccaaggtgacagtattaggaggtggggcctttggagctgattgggtcatgggggcggtgccctcatgaacagggttggagtccttataaaagaggcaggaagaggatgcaggcgttgacgttgntgtanaaagtcaggcgccanatgcttnccgtcaccggcnggagccctttgngggggaaan

SEQ ID NO: 9073 - DNA, 534 bp, Homo sapiens
  misc_feature (483)..(483): "n" may be a, t, c, g, other or unknown
  misc_feature (525)..(525): "n" may be a, t, c, g, other or unknown
  misc_feature (529)..(529): "n" may be a, t, c, g, other or unknown
  misc_feature (534)..(534): "n" may be a, t, c, g, other or unknown
aagctattttaagtataaactctattcctgaatatcttcagatactttctgctagttcaaataaactcacacagacattaatccaatttgaataactacatatgaatgaggctacagtattattcaatccagagtgtgtcacttccgttcatgaaggcttgctatgcataaatataaaaatattttatcttctgatgctttcatttttgaagcactcccttcaaaggatgtaaaaaaatattaaataaaagagctttcaaagtgttctgttaggctatgatttgagggggagatgaatggaaatggatattgatagttatttaactggagatctttgtggtgatatgtgaaagtataaactaactccaacaaactcgttttttcctgaaacttttggtgtaaaattatatattattattattttgagacagggtcttgctctgttgcccaggccaggctggaatgcaatggcatgacctcggntcactggccctggcctccgggctcaacgatcttccattcagnccantccan

SEQ ID NO: 9074 - DNA, 565 bp, Homo sapiens
  misc_feature (504)..(504): "n" may be a, t, c, g, other or unknown
  misc_feature (508)..(508): "n" may be a, t, c, g, other or unknown
  misc_feature (516)..(516): "n" may be a, t, c, g, other or unknown
  misc_feature (559)..(559): "n" may be a, t, c, g, other or unknown
atatctattagtaagattagcaaagatactgttgctatttttatatttgtcctttaaaaaggtaggcccttctccacttacttccatatccctagagaaatagatatatgtactgttgtcaaaaaaaatcaaacacacaaatactggaatattaaaagacaggctcctcatttcttctcttcctcatcctggtacacagtgcccaaaagctttagaaatgccattatgaacaatagcttttgctagttgttaggaaagcaatttatgagttgggaattattgtggaagacttgatggatgattatagctctgggtcactaacttctttttatgaaaacatgaataatactagttataactcaaagtcaaaatagtgtaaaagctgtggagtgcttttgtagggggtatattaaattgccagaatattgcagaggctcatcttggaacaagaagtagaatgctggttcagttaagaggactgggctggttcaaggcacagactgntcanttcgcatnacaagtggtggctgggggttttcatcaggcattactaatgggnatggga

SEQ ID NO: 9075 - DNA, 381 bp, Homo sapiens
  misc_feature (75)..(75): "n" may be a, t, c, g, other or unknown
  misc_feature (220)..(220): "n" may be a, t, c, g, other or unknown
  misc_feature (289)..(289): "n" may be a, t, c, g, other or unknown
  misc_feature (297)..(297): "n" may be a, t, c, g, other or unknown
  misc_feature (300)..(300): "n" may be a, t, c, g, other or unknown
  misc_feature (312)..(312): "n" may be a, t, c, g, other or unknown
  misc_feature (326)..(326): "n" may be a, t, c, g, other or unknown
aaatctcatttctgtttttttattgtcttttatgttaaactttctacaaaaggatgtataaacgggtaagtaganaatctctatctacaaaatgttttctcttttaagtattacattacttggtgtacatttaatagactgacatatataagcacataaaaatcattttacgtaatacgctgcgaaatacgttgactcctcctccgcctcacccctgaantgcctcctcctctatcctccccatcactttcatcatcttctgtctctgctgctgtattatttttagggntgcctccnccnagcagtgaggtnattgctttgttccnagcatttgtgctagctgaaactccccttcttcttcttcttcatcagggtccaaat

SEQ ID NO: 9076 - DNA, 568 bp, Homo sapiens
  misc_feature (363)..(363): "n" may be a, t, c, g, other or unknown
  misc_feature (472)..(472): "n" may be a, t, c, g, other or unknown
  misc_feature (486)..(486): "n" may be a, t, c, g, other or unknown
  misc_feature (490)..(490): "n" may be a, t, c, g, other or unknown
  misc_feature (532)..(532): "n" may be a, t, c, g, other or unknown
  misc_feature (552)..(552): "n" may be a, t, c, g, other or unknown
ggtatttgcagaatttagctgagactgttacaagcggtttatcaaaataaatgcttgattggctttagcagttttttcgtaattgaaaaaataaagaaaaaagagttttctaataaatggagggagagagaggttaaatactttaattactaacttgcaaaaagatttccatttgaatatggaaacaatgtaaaggggtccctaatttttgtgggactggaatcactccagaggatttaatgatactgctgggcaactgaaactgtgcaactgaataatgtgatttctaagcatatttccttaaaatttaagtgctagggaacatttaaaaatggttactttaaaaggaaggttgaacatgcnaatttgtaggggagaggaattaaaacagtgatttctttcaatgatacatttttcattttctattttaaaacgaaaaccatttacttttgagtcaacaggcatgtgacanaaagtgctacatanaaanaatttccccaccaaggactgcctggatgttacttgaaaaacnccaggttaattatttctccncctttaaaacatactt

SEQ ID NO: 9077 - DNA, 343 bp, Homo sapiens
  misc_feature (87)..(87): "n" may be a, t, c, g, other or unknown
  misc_feature (98)..(98): "n" may be a, t, c, g, other or unknown
  misc_feature (112)..(112): "n" may be a, t, c, g, other or unknown
  misc_feature (168)..(168): "n" may be a, t, c, g, other or unknown
  misc_feature (177)..(177): "n" may be a, t, c, g, other or unknown
  misc_feature (213)..(213): "n" may be a, t, c, g, other or unknown
  misc_feature (271)..(271): "n" may be a, t, c, g, other or unknown
  misc_feature (284)..(284): "n" may be a, t, c, g, other or unknown
  misc_feature (287)..(287): "n" may be a, t, c, g, other or unknown
  misc_feature (319)..(319): "n" may be a, t, c, g, other or unknown
  misc_feature (334)..(334): "n" may be a, t, c, g, other or unknown
gtgtttcaaagataattttaataacttttcttatgaatcagttcccaatatattagagaccaaccatcatgttcttaaaactttgtnacttgcagtcnaatatatggattcnatatagtacaaacatttccctacatcaatcaccttcagttggaaagtgcctctccntaaaaaganatcaaaactcaccttccaggtagtgattactgcgtnagtttcatggaggaaaaaaaaatatttataaatgtgaaattgcctctaaacaaggggnaggtgcatttccntcncttgtttaaaacaataacatgaagatcacccngttttgtcttctccngtgaaaagt

SEQ ID NO: 9078 - DNA, 562 bp, Homo sapiens
  misc_feature (104)..(104): "n" may be a, t, c, g, other or unknown
  misc_feature (429)..(429): "n" may be a, t, c, g, other or unknown
  misc_feature (442)..(442): "n" may be a, t, c, g, other or unknown
  misc_feature (509)..(509): "n" may be a, t, c, g, other or unknown
  misc_feature (523)..(523): "n" may be a, t, c, g, other or unknown
  misc_feature (532)..(532): "n" may be a, t, c, g, other or unknown
  misc_feature (540)..(540): "n" may be a, t, c, g, other or unknown
  misc_feature (548)..(548): "n" may be a, t, c, g, other or unknown
gagagggagtctcactctgttgcccaggctgggagtgcagtgggcgcaatccacctcctgggtttacgccattcttctgcctcagcctcccgagtagctgggantacaggcgcctgccacacgcctgggctaattttttgtatttttagtagagacggggtttcaccatgttagccaggatggtcctgatctcctgaccttgtgatctacccgcctcagcctcccaaagtgctaggattacaggcgtgagccaccccgcccggccatgtttttcatcttaattcttctattgattaaaatgtgttctgtaaactagaatatgatatcgaagtatgaagttcaagtttcttctttcagtttcagctgatagcaaataattaattataccagaatgaaaaggcagaactgctccaaatgcacaaaacttanctagcactaaaanaaatactgaattttcccccatagtatataatattttattgggaacaaaaatatttaaatgaatttcncagctatatttacncatagggtnccgccganaaggaaanattgattacctgac

SEQ ID NO: 9079 - DNA, 525 bp, Homo sapiens
  misc_feature (293)..(294): "n" may be a, t, c, g, other or unknown
  misc_feature (307)..(307): "n" may be a, t, c, g, other or unknown
  misc_feature (313)..(313): "n" may be a, t, c, g, other or unknown
  misc_feature (413)..(414): "n" may be a, t, c, g, other or unknown
  misc_feature (422)..(422): "n" may be a, t, c, g, other or unknown
  misc_feature (450)..(450): "n" may be a, t, c, g, other or unknown
  misc_feature (498)..(498): "n" may be a, t, c, g, other or unknown
  misc_feature (516)..(516): "n" may be a, t, c, g, other or unknown
  misc_feature (518)..(518): "n" may be a, t, c, g, other or unknown
  misc_feature (525)..(525): "n" may be a, t, c, g, other or unknown
ctcttctgaaatagggtctcactctgtcacccaggctggagtgcaatggagtgattcacggctcactacagcctcgacttcccaggctcaaatgatcctcttgactcagcctcctgaatagctgagaccacaggcacatgccacgactcccagctaatttttttttttttttttaaattagagatgaggtctcactttcctgcccaggctggtctcgaactcctggcttcaagcaatccttctgcctgggccttccaaattgttgtaagtacaggagtgagccattgcacccnnccaggaaacccanattcanaaaggatatctgtctagagaaaaatctcattcagtgaatttaatacttacatacaactatgacttgtaagtccagaagttttagggtaagaaaacatgtnnccattgtncccaatggagaatttaaagctcaatgtnttttggtggctccaagatcaagccaccatgtttatcaccttatcatanaaaccaaatttcctgaananttgcccn

SEQ ID NO: 9080 - DNA, 347 bp, Homo sapiens
  misc_feature (3)..(3): "n" may be a, t, c, g, other or unknown
  misc_feature (215)..(215): "n" may be a, t, c, g, other or unknown
  misc_feature (261)..(261): "n" may be a, t, c, g, other or unknown
  misc_feature (274)..(274): "n" may be a, t, c, g, other or unknown
  misc_feature (277)..(277): "n" may be a, t, c, g, other or unknown
  misc_feature (295)..(295): "n" may be a, t, c, g, other or unknown
  misc_feature (336)..(336): "n" may be a, t, c, g, other or unknown
aanatgttacaaattacttgatgttttaatatgttctttgttgaatagcttattttacatttcagtcaaaatagttatttcacaggtgaaaccactaagtagcttacttcctaccttttaaattaataaagttacagtcagccacattgcttgagtcttgccaaaatctttagagaaacaacacaaactcagacatctaagtcagatcaaattanagcccaatatttttgatacttttattgtatatgactagttttctanaaaactattccanaanatacagtcttccttccanaaaatacagctttactgtccttaagtgcctaatcattttcnagaggaggagc

SEQ ID NO: 9081 - DNA, 520 bp, Homo sapiens
  misc_feature (403)..(403): "n" may be a, t, c, g, other or unknown
  misc_feature (470)..(470): "n" may be a, t, c, g, other or unknown
  misc_feature (477)..(477): "n" may be a, t, c, g, other or unknown
  misc_feature (496)..(496): "n" may be a, t, c, g, other or unknown
  misc_feature (505)..(505): "n" may be a, t, c, g, other or unknown
ccatttgcttggtaaatattcctccatccctttattttgagcctatgtgtgtctttgcacgtgagatgggtctcctgaatacagcacaatgatggattttgactctatccaatttgccagtctgtgtcttttaattgtggcatttagcccgtttgcatttaaggttaatattgttatgtgttaatctgatcctgtcattatgatgctagttggttattttgcctgttagttgatgcagtttcttcatagtgtcggtggtctttatagtttgttatgtttttgcagtggctggtactggtttttcctttatgtgtttagtgctgccttctggagctcttgtaaggcaggcctggtggtgacaaaatcgctcagcatttgcttgtctctcaggattttatttctnctttgctaatgaaagcttaattttggctggaatatgaaaattctgggctgaaaatcctttccttaanaaagttnaatattgggccccccctcnaatcctggntttgttagggttcca

SEQ ID NO: 9082 - DNA, 454 bp, Homo sapiens
  misc_feature (126)..(126): "n" may be a, t, c, g, other or unknown
  misc_feature (401)..(401): "n" may be a, t, c, g, other or unknown
  misc_feature (419)..(419): "n" may be a, t, c, g, other or unknown
  misc_feature (428)..(428): "n" may be a, t, c, g, other or unknown
  misc_feature (438)..(438): "n" may be a, t, c, g, other or unknown
  misc_feature (447)..(447): "n" may be a, t, c, g, other or unknown
aagaaaagtaaattcatcttgctcacagtcctttctggaagagtttagaaagcaaagaattcaccgactcagcaggaagcagaacgagctgttccttcttttgacacgcacaagctaatcccctanagagtggggatgtgggaaacggagggtaattaattctttagtcactggttcactgctgaatagccttggtcagttttggctctctcctattttagggggaaaaatatttttgtttcttttttttaaaaaataaaatgttcgcacaatggggagaaaattgctttaagtgttacaccttagccaacagagcccaaactccgtgtttccgttctttctctttcggtttctgctgaaggctggtgacacactggcctcttgtcagtggctgccggcangggccaggaaacaaattnaaactgcancacagctcantccaaaaanccctggc

SEQ ID NO: 9083 - DNA, 527 bp, Homo sapiens
  misc_feature (386)..(386): "n" may be a, t, c, g, other or unknown
  misc_feature (468)..(468): "n" may be a, t, c, g, other or unknown
  misc_feature (524)..(524): "n" may be a, t, c, g, other or unknown
acataaattaacccatttattataggccagtgatgtctcaaagagtagaggagcgtctactggtctttcaactccttcagtcttctgatggcggactttaccgtgacagcggaagtggtactggaaagaaagattcagtttccaacataattaagcatgttaacatagaaaatggcaaataagtaaatctgcctcgtttttgtgttaaagtcgcttcccaaattttcctagaaagaattatactgagatagactgctctaccaatactttgctgcagtcaatccaaagatctaaccaacattagattactcctcggaaattagtggcttctaaactacatgatggcatcctttaagaagccatgccttcaggatcttgcagaattngacatacaatctcatgcatctgatttctcaacccagagttgcttttttttttataagttactccagtttgtggacaagccangctttaactcccccctacccctccattgaaaaaaaaaattgggtcctaaaaaggtngaa

SEQ ID NO: 9084 - DNA, 331 bp, Homo sapiens
  misc_feature (99)..(99): "n" may be a, t, c, g, other or unknown
  misc_feature (106)..(106): "n" may be a, t, c, g, other or unknown
  misc_feature (110)..(110): "n" may be a, t, c, g, other or unknown
  misc_feature (179)..(179): "n" may be a, t, c, g, other or unknown
  misc_feature (199)..(199): "n" may be a, t, c, g, other or unknown
  misc_feature (213)..(213): "n" may be a, t, c, g, other or unknown
  misc_feature (286)..(286): "n" may be a, t, c, g, other or unknown
  misc_feature (305)..(305): "n" may be a, t, c, g, other or unknown
  misc_feature (315)..(315): "n" may be a, t, c, g, other or unknown
  misc_feature (319)..(319): "n" may be a, t, c, g, other or unknown
  misc_feature (325)..(325): "n" may be a, t, c, g, other or unknown
gacagcagcatctgtttattgacaattccaggtcattcctaacacgccgcagcagggctctgtacagtccggcccggtggggaagaaggagggaagcangcacacnaaanaccaggtatgtcgggaagtgcacacaaaccgttgtctttcctttttggttaaagaaaaaaaactttgtnatcaatatcccgctcataantaaaagtggaaaanaagaaacttgactgctttcatctggcgttttggcatctcctctcccatttcatatgcacagtttatttgggtnatgctaccgtcaccagcanaacacctgtnagtnaaaacnaatgtc

SEQ ID NO: 9085 - DNA, 456 bp, Homo sapiens
  misc_feature (121)..(121): "n" may be a, t, c, g, other or unknown
  misc_feature (294)..(294): "n" may be a, t, c, g, other or unknown
  misc_feature (307)..(307): "n" may be a, t, c, g, other or unknown
  misc_feature (341)..(341): "n" may be a, t, c, g, other or unknown
  misc_feature (364)..(364): "n" may be a, t, c, g, other or unknown
  misc_feature (414)..(414): "n" may be a, t, c, g, other or unknown
  misc_feature (427)..(427): "n" may be a, t, c, g, other or unknown
  misc_feature (451)..(451): "n" may be a, t, c, g, other or unknown
  misc_feature (454)..(454): "n" may be a, t, c, g, other or unknown
gagaaaaaaagcctgtcgcccaggctggagtgcagtggcgtgatctcggctcactgcgacctctccctcccgggtccaaacgattcttctgcctcagcctcccgagtaactgggaccatangcacgtgccactatgcccagctaacttttgtgttttgagtaaagacagggtttcaccatgttggccaggatggtctcgatctcctgaccttgtgatgtaactagtatttcttatgcccttattttgtgctaggcacagggcctcacccattattggcactcggtaaggattcntgggattaatganaagttaacctaaatcttcaccaaaggcccctgancttcccctcgattcacatacaanggactggggctctgaaaagtgggctgtgatgcgcccctggaaaacccacnaatgggcctgcanaactgattgggaaggttcatgcanggnca

SEQ ID NO: 9086 - DNA, 304 bp, Homo sapiens
  misc_feature (21)..(21): "n" may be a, t, c, g, other or unknown
  misc_feature (46)..(46): "n" may be a, t, c, g, other or unknown
  misc_feature (121)..(121): "n" may be a, t, c, g, other or unknown
  misc_feature (242)..(242): "n" may be a, t, c, g, other or unknown
  misc_feature (258)..(258): "n" may be a, t, c, g, other or unknown
  misc_feature (271)..(271): "n" may be a, t, c, g, other or unknown
  misc_feature (285)..(285): "n" may be a, t, c, g, other or unknown
  misc_feature (291)..(291): "n" may be a, t, c, g, other or unknown
gagggccacagggaaaacaangtttgtccttcagcagggaaaggangtgcctcatccgtcatggtggactcattgaaataagtctcctccaggggaggttcatctcaggtctaccctggancagggaacagtgtctctgaagtggtgctggcttcacagctgattgcggttccgcttagggatgatcttccggtaggttctgcgctctgaaatgttgcgcttcaccttggccgtggtgggancctcatcctggtgcanggacgggctcgantgggacttcttcangctgancttgggctcccga

SEQ ID NO: 9087 - DNA, 440 bp, Homo sapiens
  misc_feature (10)..(10): "n" may be a, t, c, g, other or unknown
  misc_feature (107)..(107): "n" may be a, t, c, g, other or unknown
  misc_feature (206)..(206): "n" may be a, t, c, g, other or unknown
  misc_feature (313)..(313): "n" may be a, t, c, g, other or unknown
  misc_feature (350)..(350): "n" may be a, t, c, g, other or unknown
  misc_feature (399)..(399): "n" may be a, t, c, g, other or unknown
  misc_feature (401)..(401): "n" may be a, t, c, g, other or unknown
  misc_feature (430)..(430): "n" may be a, t, c, g, other or unknown
  misc_feature (439)..(439): "n" may be a, t, c, g, other or unknown
aacaaatganctgactgttataaagtaaacatcaaggaatgtaaaagccaatgctccactctctcagctacacatggagtcagtgctgcctgcaaagaacagagcangcgctggcagactgaccttcacagaccatgctaaaaccctctgaggaagtgcctggtgaatgctctggttgatgagattcgagccattatgttaccgancagtgtgcttcttacctataattccactgtccttgctttccagggtggaactagggctgctaatggtctcacagggacttttgttggctgccgtcttgctgacacanctattcaaggttgaacaggggctatcggtgctagganatgcggtgctgcttgttagtgtggagcaaggactgatgccttgactcananctgtgcacatggtttcatttttgtcttcnatggttatnt

SEQ ID NO: 9088 - DNA, 452 bp, Homo sapiens
  misc_feature (118)..(118): "n" may be a, t, c, g, other or unknown
  misc_feature (120)..(120): "n" may be a, t, c, g, other or unknown
  misc_feature (321)..(321): "n" may be a, t, c, g, other or unknown
  misc_feature (343)..(343): "n" may be a, t, c, g, other or unknown
  misc_feature (431)..(431): "n" may be a, t, c, g, other or unknown
  misc_feature (436)..(436): "n" may be a, t, c, g, other or unknown
  misc_feature (446)..(446): "n" may be a, t, c, g, other or unknown
  misc_feature (450)..(450): "n" may be a, t, c, g, other or unknown
  misc_feature (452)..(452): "n" may be a, t, c, g, other or unknown
gtttctcttttgcactgttattttattttgtttagtccatatattatataaaacataacaggaaaaatgaacgaatttataaaataaattgaggtgtttggatgaaaaaaaatacaananctttgccttcatgtctacagatctcttaatatattgttggtcttgcaccttagatatcaaataaagatatctagcttgacacaaaaattggtagctgcaaggttaagctgtattagtttgatgatgggccaggaaatgatatattttctaaattttgtccttaaatattggctgtaacaaatgctgatatagcaaaaagtnagcttctattagacagcaaganggaaacttgagtgaatgaatgcaacttacctccaagtcctcttaaaggaagtaaaaaaataaatactgtgttttaccagtgccccccnccaancattattctnagcntn

SEQ ID NO: 9089 - DNA, 540 bp, Homo sapiens
  misc_feature (193)..(193): "n" may be a, t, c, g, other or unknown
  misc_feature (310)..(310): "n" may be a, t, c, g, other or unknown
  misc_feature (343)..(343): "n" may be a, t, c, g, other or unknown
  misc_feature (374)..(374): "n" may be a, t, c, g, other or unknown
  misc_feature (399)..(399): "n" may be a, t, c, g, other or unknown
  misc_feature (453)..(453): "n" may be a, t, c, g, other or unknown
  misc_feature (494)..(494): "n" may be a, t, c, g, other or unknown
  misc_feature (496)..(496): "n" may be a, t, c, g, other or unknown
  misc_feature (503)..(503): "n" may be a, t, c, g, other or unknown
  misc_feature (529)..(529): "n" may be a, t, c, g, other or unknown
ctaatttaattctttatcattcaagtagagagacaggcattttccaaagcaaacccaaccctcgtgattatttctagccagggtgaagctaaggaaagtagcagtaggtggtaggatcagcaccttggttccaggcatcacgccagtcattttatttccatcatcatccttgtgaaaaaatggaagtctgganaggtgaaatgatgaaggcaatctggccacaaatcttccttctggatcctgctcttcagggcatgcatctcccatgctgaaggttaaaatgggggtcatttgccaacaaatttgggantccgcttctccctgaagctgccatgccctctanccggtcccgggttggaatattctgggcatancacatcccttcaatggccatcccanatgcaatgtccacctccgttcctcggttaatgggctactttgcccaaccgcacngcaattgggggctggggcaagatctcctgggccaatgctcntnccccctnggtaggcggggtcccccccccttctngggcccaacgt

SEQ ID NO: 9090 - DNA, 588 bp, Homo sapiens
  misc_feature (388)..(388): "n" may be a, t, c, g, other or unknown
  misc_feature (440)..(440): "n" may be a, t, c, g, other or unknown
  misc_feature (448)..(448): "n" may be a, t, c, g, other or unknown
  misc_feature (480)..(480): "n" may be a, t, c, g, other or unknown
  misc_feature (538)..(538): "n" may be a, t, c, g, other or unknown
  misc_feature (544)..(544): "n" may be a, t, c, g, other or unknown
caaaagtggaagcttgtttaatatcgctctaccatcatcctgaaaggcataataatttgagttacacatctgaactgattggagttacagaatcatatctcctttttgcatttaacaatatatacaatataaaataaatacatttacacaaatggacatttgctggagcacacagtatggtacacatcacaaaaatatacaattgattgctttacagatgtgaagcccatctacagctatagacatggttttattattattattattatttttactactggctataatgcaactcctggattattataagcagtttaaattttttgtccttttacgatctttgcacataagactgccataaaatgttttcctaggcaggtaaacaganacgcttaaataattaaaatacaatcaccaacacccattttctcttctataanaaaaatancagttttaaattttttatatcttttatgttancatttaaatgcaaaatatgggaataaatacaacaatctggtttgattgaaacccattntttctncaggaatcccccatcctttggctttaattaaaacaaacccaaaa

SEQ ID NO: 9091 - DNA, 469 bp, Homo sapiens
  misc_feature (117)..(117): "n" may be a, t, c, g, other or unknown
  misc_feature (146)..(146): "n" may be a, t, c, g, other or unknown
  misc_feature (175)..(175): "n" may be a, t, c, g, other or unknown
  misc_feature (186)..(186): "n" may be a, t, c, g, other or unknown
  misc_feature (268)..(268): "n" may be a, t, c, g, other or unknown
  misc_feature (274)..(274): "n" may be a, t, c, g, other or unknown
  misc_feature (427)..(427): "n" may be a, t, c, g, other or unknown
  misc_feature (432)..(432): "n" may be a, t, c, g, other or unknown
  misc_feature (441)..(441): "n" may be a, t, c, g, other or unknown
  misc_feature (452)..(452): "n" may be a, t, c, g, other or unknown
  misc_feature (468)..(468): "n" may be a, t, c, g, other or unknown
ggggagtggataaagtgcatttattttcttctatgtttgtttttgtaaaaaggagaaaggaagcaaaagactccttcctttcagacccagtgtccactgagcttggagggggtgganccgggaccaccccctaggaaaaggtgtangaatagaagcaatggcattggcgctatantccatggggangaagtgcctgatgtgcctggcccctaggctggccccacccagagcggaggagtgcctcagcttcatcagggtgaaactgganaaaaanttctgagcctggatctctctgccctgggtcagcaccaaaagaaaaccttccttcagcagctcccagctcttccacacagaacccacgcacaggatggggagtccaatcttgccctggaacaagaccgggtcaatctcgggcaacactgctacnatgtntctgcccancatctccccancctcctgaaaatatanc

SEQ ID NO: 9092 - DNA, 555 bp, Homo sapiens
  misc_feature (47)..(47): "n" may be a, t, c, g, other or unknown
  misc_feature (176)..(176): "n" may be a, t, c, g, other or unknown
  misc_feature (482)..(482): "n" may be a, t, c, g, other or unknown
  misc_feature (490)..(490): "n" may be a, t, c, g, other or unknown
  misc_feature (528)..(528): "n" may be a, t, c, g, other or unknown
  misc_feature (538)..(538): "n" may be a, t, c, g, other or unknown
  misc_feature (551)..(551): "n" may be a, t, c, g, other or unknown
aaatatacaacttgcttttattaaattgaaaaaaaaatccccaagangcagatatcccagtagttttagtgaaaacaaatttaatatcatcttgtttgaacaaagctttcagaataagtgagcaattaaattcttaaagtagggacagaacaccaacaggctctagactccggaanagctgtaagccgacaaatgggcattgttttgcttaacagttttagcttcaatgtaaatatatattattacttagaatattagcatctgaactatataatgactattttatcattttacttgaattaaaaccagaatttctggaacttccaaatagtctttaaagtttttcaatataaacataaactaacccctattcctctctacatatcaaatgtgaaataactgtcacaatatatcagcattttcacagaaagatgtttaaggcttctggcacataaaatgtgtaatttccgtgtgacaagtcntaattatntaccgaaaatatttaaaattattggtaaaattaattcntaagaattanaaaaccagaattncccg

SEQ ID NO: 9093 - DNA, 610 bp, Homo sapiens
  misc_feature (318)..(318): "n" may be a, t, c, g, other or unknown
  misc_feature (447)..(447): "n" may be a, t, c, g, other or unknown
  misc_feature (484)..(484): "n" may be a, t, c, g, other or unknown
  misc_feature (526)..(526): "n" may be a, t, c, g, other or unknown
  misc_feature (540)..(540): "n" may be a, t, c, g, other or unknown
  misc_feature (560)..(560): "n" may be a, t, c, g, other or unknown
  misc_feature (581)..(581): "n" may be a, t, c, g, other or unknown
  misc_feature (598)..(598): "n" may be a, t, c, g, other or unknown
aatcttttattttttattgcatacatcaatatttaacagaagaaaaataaagaacccctaatgttaaactgaattacatgttatcttctgattcttttcaatgtagacctaaattttcacatgtatcagtaaacacaatttatgttcttattaacatttttgaatctcacttttttgcatacaatttgacatatatcaatattattgaatggctatataacattctgtgatagcactagcaatacaccaaaatttacttaaccatttccaatcgttgggcttttttcccccttaaagttatctgagtggaactgctanaaaactttgtacaaatagcttttctttcttttaaatattttcctgggcatatgccactcaaagtgagtatgtcaaaagatcagttataaagccctttttatagtcttctacacagttctcttaaaaggntactaatacacaatgctgctgctataaggaccatgcnattaaaacagtttggctaatacaatacatgaactaattcaanttggctttttaatnttaggaaatttgaatacctnccaatgaattttaaacccttnaccccaaacctttaaanttgccaaaaata

SEQ ID NO: 9094 - DNA, 437 bp, Homo sapiens
  misc_feature (103)..(103): "n" may be a, t, c, g, other or unknown
  misc_feature (272)..(272): "n" may be a, t, c, g, other or unknown
  misc_feature (291)..(291): "n" may be a, t, c, g, other or unknown
  misc_feature (313)..(313): "n" may be a, t, c, g, other or unknown
  misc_feature (398)..(398): "n" may be a, t, c, g, other or unknown
  misc_feature (402)..(402): "n" may be a, t, c, g, other or unknown
  misc_feature (427)..(427): "n" may be a, t, c, g, other or unknown
  misc_feature (431)..(431): "n" may be a, t, c, g, other or unknown
  misc_feature (433)..(433): "n" may be a, t, c, g, other or unknown
agtagacagggggtttcaccgtgttagccaggatggtgttgatctcctgacctcgtgatccgcccgcctcagcctcccaaagtgctgggattacaggcatganccactgcgcccggcctgcttcctgccaagttaaacggcatgctaagctctcagctccccatgcccaagtggacttgaaaggtctaccccagccctccttccacagcccatcctgagcaggctgcctactccaggcaggccccaggctgggctggaccatttaatcctcncagccctggtaaggctganatcacggatcccacttcataantggaaaaaactgaaaggctcagggggtgctgaaatctctactctaaggtttctttctctcaaaatttggtcgggaagggggtctncttntctctggggcacttttcttatcccncccnangggc

SEQ ID NO: 9095 - DNA, 320 bp, Homo sapiens
  misc_feature (95)..(95): "n" may be a, t, c, g, other or unknown
  misc_feature (236)..(236): "n" may be a, t, c, g, other or unknown
  misc_feature (246)..(246): "n" may be a, t, c, g, other or unknown
  misc_feature (251)..(251): "n" may be a, t, c, g, other or unknown
  misc_feature (264)..(264): "n" may be a, t, c, g, other or unknown
  misc_feature (319)..(319): "n" may be a, t, c, g, other or unknown
ggaaagcattttcaaactttatttacaactgtcacagtgacaaaaagtagtttggaaaaaaaaaaatgctagtttctccctgagcctcaaaaaanaacagatagaagttacaggaggttcatctcacaacaggcatttttactgaaatactaggaattttttcaatacaatcagttagaaatacacacaaattacttgaaaaaaaaaaaagaggaggccagataggagctcacccncttgtccaanaacanctgggtccccccngcaggctccaccgctgagggtcctgacattatctgtcagcccctggcctgctcana

SEQ ID NO: 9096 - DNA, 526 bp, Homo sapiens
  misc_feature (26)..(26): "n" may be a, t, c, g, other or unknown
  misc_feature (90)..(90): "n" may be a, t, c, g, other or unknown
  misc_feature (172)..(172): "n" may be a, t, c, g, other or unknown
  misc_feature (407)..(407): "n" may be a, t, c, g, other or unknown
  misc_feature (445)..(445): "n" may be a, t, c, g, other or unknown
  misc_feature (459)..(459): "n" may be a, t, c, g, other or unknown
  misc_feature (462)..(462): "n" may be a, t, c, g, other or unknown
  misc_feature (474)..(474): "n" may be a, t, c, g, other or unknown
  misc_feature (526)..(526): "n" may be a, t, c, g, other or unknown
gagatggagtctcactctgtacccangctggagtgcattggcgcgatctcggctcactgcaacaacctccgcctcccgggtgcaaacgantctcctgtctctgcctcccgagtagctgggactacaggcgcgtgccaccatgcctggctaattatttgtatttttagtaaanatgaggtttcatcgtgttagccaggatgatctcagtcccctgacctcgtgatccaccgtctcggcctcccaaagtgctgggattacaggcgtgagccaccgcgcccagcctaactatgaggtgatttaaggaaagtaatgggaaggtgcacttaaatgccctgtgattccctcttttctttatgttaatctggaaacttgtagaaaagccttctcttgataacaaattttatgtnactagctcaaacagtgatttgccagatttacttaatcnaggaatatattttnganggaaccttccanaaaattttgggttaatttggccttccttatcctaaaatttaaattccccctn

SEQ ID NO: 9097 - DNA, 611 bp, Homo sapiens
  misc_feature (486)..(486): "n" may be a, t, c, g, other or unknown
  misc_feature (541)..(541): "n" may be a, t, c, g, other or unknown
  misc_feature (581)..(582): "n" may be a, t, c, g, other or unknown
  misc_feature (587)..(587): "n" may be a, t, c, g, other or unknown
  misc_feature (608)..(608): "n" may be a, t, c, g, other or unknown
gaaatttccaaattgcttctttttcaactttttattttgaaaaatttcaaacccacagaaaagtttcaagaattgtgcaatgaacaccccatatagccttcacttagattcatctcatcaattaatgtttcatcaaatatgttctctctctctctctctctctgtctctctccatgtgtgtaccccactgaaaatctttttgcagaactatttgggagttttagacagctttgccccctataggctcaaactaatttcagctcagaacaagaacattaacttacataaccaatatatattaaattcatgaaatttaacattgatgtcccaataataccagttatttttcagtcacttttttacagtcatgtttcctactaatctaaaatccaatccaagatcacacactgcatttagtttccaagtctcctgagtttgaaatagttcctcagcctctctttgactttaatgaatatttttgaagantacagaacacttatgaatggaatgtgttgaatttggggtggctgaatggttctcncgatcagatcagtttatgcagttttggggagaaagcttcnnaaatnatatgtgtgttctcctggctnccc

SEQ ID NO: 9098 - DNA, 606 bp, Homo sapiens
  misc_feature (263)..(263): "n" may be a, t, c, g, other or unknown
  misc_feature (329)..(329): "n" may be a, t, c, g, other or unknown
  misc_feature (381)..(381): "n" may be a, t, c, g, other or unknown
  misc_feature (395)..(395): "n" may be a, t, c, g, other or unknown
  misc_feature (446)..(446): "n" may be a, t, c, g, other or unknown
  misc_feature (525)..(525): "n" may be a, t, c, g, other or unknown
  misc_feature (530)..(530): "n" may be a, t, c, g, other or unknown
  misc_feature (547)..(547): "n" may be a, t, c, g, other or unknown
  misc_feature (572)..(572): "n" may be a, t, c, g, other or unknown
  misc_feature (578)..(578): "n" may be a, t, c, g, other or unknown
gaccatttcccacaatcttttattaagaaaaattccaaacatacagaaaagttgaaagaacaagtacactgttcactgaaataccagccactgcagattcaacaatgaacattttggccttatttgctttgtgtattttggggggaactatttggaattaaattacacatttcttgaaggcattcacctatataatccagcatctatctcctaagaatgaggacattttcccatgaactgcagtaccgttaaatggctattanaggaatggttggtctttgtgagggtctcacgtccaggaacctcatcaaagtgtgctaggcccttancagagagggtagaacctgctcgccggctccctcaccttctctcccatcccanaaaggcagaaacangaggtgctgtgaatagaacagtgccctttgtggtgacaaagctatggggancctgctgtgcatgtgccaagacctgcagggcagctcccccacccccacagggaactctgaactgcatggttttgtcccncttcncttttaaatatctgaanttcaaataaatctttccccaaatcntctccnattagaaacctgaatgccatctaaaacc

SEQ ID NO: 9099 - DNA, 597 bp, Homo sapiens
  misc_feature (59)..(59): "n" may be a, t, c, g, other or unknown
  misc_feature (280)..(280): "n" may be a, t, c, g, other or unknown
  misc_feature (391)..(391): "n" may be a, t, c, g, other or unknown
  misc_feature (541)..(541): "n" may be a, t, c, g, other or unknown
  misc_feature (552)..(552): "n" may be a, t, c, g, other or unknown
  misc_feature (561)..(561): "n" may be a, t, c, g, other or unknown
  misc_feature (594)..(594): "n" may be a, t, c, g, other or unknown
  misc_feature (597)..(597): "n" may be a, t, c, g, other or unknown
aattgtttcaggaaaagtttatatattcagcactacagataagtttttttttaaagganaacctttttcgctgttataaacaacttcatttatagcataataaacatactttcagtcaatttctttacaatctaaagacccctgaactaaattttatgttgtgtcttaagtatttcaaaacccatccatgtcaaactgataattttactattgcttgatactatgttatttcccttatgggtaaaacttcgatcagtggccaaatctgaaaagcaagaanacactcttgtcatctgaacagttctattaggatgttgttagctttttgaaaatattatatactaactcttaaattatatttaaatgccagctacccaatggtgccagaaanattattgcaattgtttttacccaagtataatttttaaaataaaatcatgttgcattgcatttttctaaaatcattagatttataattgaataagggttaacttacaattttttttagggccccaaaaaaaaaaaaaaacttttttgaatnccccctatttntttctcccnaaaaggtagggtatttttttgtttaacaacccnctn

SEQ ID NO: 9100 - DNA, 399 bp, Homo sapiens
  misc_feature (202)..(202): "n" may be a, t, c, g, other or unknown
  misc_feature (337)..(337): "n" may be a, t, c, g, other or unknown
  misc_feature (339)..(339): "n" may be a, t, c, g, other or unknown
  misc_feature (362)..(362): "n" may be a, t, c, g, other or unknown
  misc_feature (375)..(375): "n" may be a, t, c, g, other or unknown
  misc_feature (393)..(393): "n" may be a, t, c, g, other or unknown
attcaaaacacttagtaaaggaaaaggacacaaggaaattctgattaaagtcttctcctgctctgtttgcaattatacatgccttcaaagtcatttgaaagtaagaccatttcctttggcaggtatcttgtataaagtaactttacaacatatgtttcttgaacagaaactttacaccactgtcattatgttacctataganacaaaactactaacacaagtaatatgggcttacaattataacacaaacctgtgagagggcatgataaaattaaattttgattgccttcttttattattatcactactactgtctgctcacaaattctgtggccanantccatttcaaatccttctaagantccacttcatganttaaacatatacatatanaacaaa

SEQ ID NO: 9101 - DNA, 477 bp, Homo sapiens
  misc_feature (94)..(94): "n" may be a, t, c, g, other or unknown
  misc_feature (100)..(100): "n" may be a, t, c, g, other or unknown
  misc_feature (175)..(175): "n" may be a, t, c, g, other or unknown
  misc_feature (241)..(241): "n" may be a, t, c, g, other or unknown
  misc_feature (269)..(269): "n" may be a, t, c, g, other or unknown
  misc_feature (365)..(365): "n" may be a, t, c, g, other or unknown
  misc_feature (390)..(390): "n" may be a, t, c, g, other or unknown
  misc_feature (403)..(403): "n" may be a, t, c, g, other or unknown
  misc_feature (437)..(437): "n" may be a, t, c, g, other or unknown
  misc_feature (452)..(452): "n" may be a, t, c, g, other or unknown
  misc_feature (468)..(468): "n" may be a, t, c, g, other or unknown
aaacatatgatcattttaattacagatgattgaaatacagtgcaacagatgagacagatacaatactgtaccagtttttaaaaacctgaaccanaacggnttcgcattctagtacacttacttacttaaaacaaaaattgcttagataacaaaactatacttcaagttgttttanaaacagttctgcgctaggaacatacaaaggaaaatgacccgttgtgcttctttaaaatcgaatganagtctcctctagggtcctgctgacagancccccccagcctccgccaggtgaggtgcacagggcccactccaggcaccagctccccccaacttggcttctctggtttgtcgaaagcatcatccantccacactatgtttaacagtcctantcaccacggggantaaatttttctgaaggtctcatccgtggaatccnaccgtacataataantttacccccaatcccnattgaatcc

SEQ ID NO: 9102 - DNA, 366 bp, Homo sapiens
  misc_feature (59)..(59): "n" may be a, t, c, g, other or unknown
  misc_feature (73)..(73): "n" may be a, t, c, g, other or unknown
  misc_feature (292)..(292): "n" may be a, t, c, g, other or unknown
  misc_feature (302)..(302): "n" may be a, t, c, g, other or unknown
  misc_feature (366)..(366): "n" may be a, t, c, g, other or unknown
ctcttcgtaaaggattcaaagcaggcacagtggtgtacacttaaagtcccagctactanggaagctgaggcangaggattgcttgagcccaggagttcaaggccagcctgagcaacatagtgagactccatctctaaaaaaaaataaaaataaaaataaataaaaaatacaactaatggaaagggcaagaaaaaaaaaagaaaaaaattaaaagtgattcggagcagtattcctgcaagaagctcccggcgcatgtatatttacagaaaatatgtacatgcagcaggcccanaggccaccanaaggcagagggcttctgtaacaattcaagcctctgggcttgaacccagggaatgggtggcttcn

SEQ ID NO: 9103 - DNA, 440 bp, Homo sapiens
  misc_feature (85)..(85): "n" may be a, t, c, g, other or unknown
  misc_feature (154)..(154): "n" may be a, t, c, g, other or unknown
  misc_feature (199)..(199): "n" may be a, t, c, g, other or unknown
  misc_feature (203)..(203): "n" may be a, t, c, g, other or unknown
  misc_feature (337)..(337): "n" may be a, t, c, g, other or unknown
  misc_feature (399)..(399): "n" may be a, t, c, g, other or unknown
  misc_feature (414)..(414): "n" may be a, t, c, g, other or unknown
  misc_feature (427)..(427): "n" may be a, t, c, g, other or unknown
  misc_feature (429)..(429): "n" may be a, t, c, g, other or unknown
  misc_feature (438)..(438): "n" may be a, t, c, g, other or unknown
gtgggtaacatcttgatttaatttacaaataaaaagccaaaaccctcaatgcaaaggaaaactgcagtttacacttattctgganatcatttttaaccacagaaaatgtgcccctgtagcatgtttttaaatggcaagtgctatgattgcccanacatccataaactgcttgtatggagtaagaaattcataaatgaanaaanatttgttttctgtcttgtttctcctaggtcacgaacaggatatttcccacaaaatgttttgacctgaaaggaagtatgattccagtacttctggtcttaactcttctgaaattacactgcaagctgaaacttcnggttacttcagccacattttcttttatcacccattttccatgtttttttggcttaaaacccncctgctgtccccccnttccccccgttcncngtgttcganta

SEQ ID NO: 9104 - DNA, 482 bp, Homo sapiens
  misc_feature (88)..(88): "n" may be a, t, c, g, other or unknown
  misc_feature (143)..(143): "n" may be a, t, c, g, other or unknown
  misc_feature (198)..(198): "n" may be a, t, c, g, other or unknown
  misc_feature (249)..(249): "n" may be a, t, c, g, other or unknown
  misc_feature (309)..(309): "n" may be a, t, c, g, other or unknown
  misc_feature (398)..(398): "n" may be a, t, c, g, other or unknown
  misc_feature (426)..(426): "n" may be a, t, c, g, other or unknown
  misc_feature (433)..(433): "n" may be a, t, c, g, other or unknown
  misc_feature (439)..(439): "n" may be a, t, c, g, other or unknown
  misc_feature (477)..(477): "n" may be a, t, c, g, other or unknown
gggcaaatagctaattttatttttttcacatattaaaacccactaaaaataaccatttttctaactaaccacaataaaaattagtganaaaagtactgctgctttacatttctccaaatctcttcaatgtctgatgacagacnaaagctggaatcttgtatctgcttttgcattcagcctattacaatatcacaccanatagcctcttgaaaactcctctgcatactcatgaaaaaatgagtgaaaaanataaatgatggctgggcgttgtggctcatacctgtaatcccagcactttgggaggctganatgggcagatcacttgagctcaggagttccagaccagcctggccaacatggtgaaaccccgtctccactaaaaatacaaaaattaccangtgtggtggtgggtgcctataatcccanctactcngggaanctgaagtagaaaaatgcttgaacccagttgggggaagntgcat

SEQ ID NO: 9105 - DNA, 530 bp, Homo sapiens
  misc_feature (167)..(167): "n" may be a, t, c, g, other or unknown
  misc_feature (285)..(285): "n" may be a, t, c, g, other or unknown
  misc_feature (417)..(417): "n" may be a, t, c, g, other or unknown
  misc_feature (463)..(463): "n" may be a, t, c, g, other or unknown
  misc_feature (474)..(474): "n" may be a, t, c, g, other or unknown
  misc_feature (527)..(528): "n" may be a, t, c, g, other or unknown
  misc_feature (530)..(530): "n" may be a, t, c, g, other or unknown
aataaagacaaagtcttgctatgttgcccaagcttgtctcaaactcctggtctcaagcaatccttctgccctggccctcccaaagttctgggtattacaggtgtgagccagcactcctggcccatcacagtcttaaaaccaaaagttctgtgtccgaggaaaaccangagtgattggtcactctatttatgactcatagcacttacaggctacttcggcagggacttggggtacccctgttcttggatggcacatcattatcagcaacaggaacagttctctganccctggcccctggagaatctctagcttagctattttagacttggggtcaaaaaaaaaaaacctcttgcccaactcagcaacaccagacaggggcctcatatcttggctcgtggaaagtacttttataccaanccctctcctaagggcataagaaccaacattcccattctggggaaanaaaaagcagtnccccttggacccaagtactgggtcctgccgggaatcctccccccccaggggcnngn

SEQ ID NO: 9106 - DNA, 511 bp, Homo sapiens
  misc_feature (52)..(52): "n" may be a, t, c, g, other or unknown
  misc_feature (171)..(171): "n" may be a, t, c, g, other or unknown
  misc_feature (288)..(288): "n" may be a, t, c, g, other or unknown
  misc_feature (346)..(346): "n" may be a, t, c, g, other or unknown
  misc_feature (401)..(401): "n" may be a, t, c, g, other or unknown
  misc_feature (419)..(419): "n" may be a, t, c, g, other or unknown
  misc_feature (443)..(443): "n" may be a, t, c, g, other or unknown
  misc_feature (482)..(482): "n" may be a, t, c, g, other or unknown
  misc_feature (485)..(485): "n" may be a, t, c, g, other or unknown
  misc_feature (502)..(502): "n" may be a, t, c, g, other or unknown
gagacggagtctcgccatgtcacctaagctgaagtgctgtggcacaatctanggtcactgcaaccttcacctcttaggttcaagcgattcttctgccttcccctcccaagtaggtgggactacagccactacgcctggctaattttttttgtttttgtagttttagtaaanacagggtttcaccatgttggccaggctggtctcgaattcttgagctcaactgatctgcctgcctcagccttccaaagtgctgggattataggcataaagccactgcgcctggctaanataatttctttttatattagttgagggtcataaaacaaagtgaatgcttattaaagangtagaaaaaataaagtcattaatgcacacagaggctgaagattgtgattttatanaaatgtaagtcataatangaatgattattactaacttcctangtataccaacataccagtgcttacagatttcttactaantcntgcctgttgttttaccnccgttaccc

SEQ ID NO: 9107 - DNA, 535 bp, Homo sapiens
  misc_feature (35)..(35): "n" may be a, t, c, g, other or unknown
  misc_feature (171)..(171): "n" may be a, t, c, g, other or unknown
  misc_feature (488)..(488): "n" may be a, t, c, g, other or unknown
  misc_feature (496)..(496): "n" may be a, t, c, g, other or unknown
  misc_feature (500)..(500): "n" may be a, t, c, g, other or unknown
  misc_feature (527)..(527): "n" may be a, t, c, g, other or unknown
  misc_feature (530)..(530): "n" may be a, t, c, g, other or unknown
gagttggagtttcgctcttgttgcccaggctggantgcaatggcgcaatcttggcttactgcaacctccacctcccaggttcaagtgattctcctgcctcagcctccggagtagctgggattacagacatgcaccaccacgcccagctaattactgtattttttagtaaanacagggtttcaccatgttggccaggcgggttttgaactcccgatctcaggtgatccgcccaccttggcctcccaaagtgctgggattacaggcatgagccaccgcacccggcctattttttcttaattacatatgtaaacatatgtgttttctaaatacatatagtatgtatgtatgctgtatctgtatttctatctacacgtatactcaatttgttattcggaaactctatctacattttgatcagttctatgttattaaataattggctgctgtccctaaaccaaaatataaggtaaaaaaccgaaaaaaaaatntttaactnccgnaaaaaacaacttttttaatttttgacnctnccaat

SEQ ID NO: 9108 - DNA, 543 bp, Homo sapiens
  misc_feature (312)..(312): "n" may be a, t, c, g, other or unknown
  misc_feature (477)..(477): "n" may be a, t, c, g, other or unknown
  misc_feature (484)..(484): "n" may be a, t, c, g, other or unknown
  misc_feature (500)..(500): "n" may be a, t, c, g, other or unknown
  misc_feature (536)..(536): "n" may be a, t, c, g, other or unknown
  misc_feature (543)..(543): "n" may be a, t, c, g, other or unknown
atttatccagtctttattattgaaacactgcatttccaaaccacaaccttatttatccagtctttattattgaaacactgcatttccaaaccacaaccttatttatccagtctttattattgaaacactgcatttccaaaccacagtggtttctactaacaaagtgtctacacttcatttctccattaattacaaacatttcagggtaattacacttaacactttattttgtatcagctgaccctcaccacaatgcagggaggtaggccatcatgccctctatttgttttccccctaaaggagaaagctganaaacaagttttttgcaattatacaaatatttggtgaaattcagaccaaatctgagaggactactgatgagttcttttcactatagacattcattctatccaagaaatggggaaaaaaggagaatggaagatttcttccctgctttaattggacaattgaaatacnagaatgntgacccaaaatacccncaaaattgtttgaaaaatttaaaatttccttttttncccccgn

SEQ ID NO: 9109 - DNA, 434 bp, Homo sapiens
  misc_feature (49)..(49): "n" may be a, t, c, g, other or unknown
  misc_feature (52)..(52): "n" may be a, t, c, g, other or unknown
  misc_feature (54)..(54): "n" may be a, t, c, g, other or unknown
  misc_feature (219)..(219): "n" may be a, t, c, g, other or unknown
  misc_feature (247)..(247): "n" may be a, t, c, g, other or unknown
  misc_feature (375)..(375): "n" may be a, t, c, g, other or unknown
  misc_feature (379)..(379): "n" may be a, t, c, g, other or unknown
  misc_feature (402)..(402): "n" may be a, t, c, g, other or unknown
  misc_feature (423)..(423): "n" may be a, t, c, g, other or unknown
  misc_feature (432)..(432): "n" may be a, t, c, g, other or unknown
gagaactgttaattgattactttatttcatataaaagttacattgaaanaanangttgaaaagtcaagtatacttgatttgcacacacttgccaagtctcacaggattcaaccacttggataattgttttattgataacaggatatacatattaaaagcctcacactgaagcccacacgcatgtccaacccagacaacaatgtgcaaatgaatatgcanaacaatctcggaaactggcgtctccagnatcacccacactttgtccctctggctgtgacgcagctcttcccccaacggcgcacacgcttctgcggtgaccaagtccacttccaaaccccctgcaggtttgctcgcttggctaggacggtggctcangtangtccctttgtggttttgcatcancagtggtaaaaccctgattcngatggggtnca

SEQ ID NO: 9110 - DNA, 546 bp, Homo sapiens
  misc_feature (296)..(296): "n" may be a, t, c, g, other or unknown
  misc_feature (298)..(298): "n" may be a, t, c, g, other or unknown
  misc_feature (406)..(406): "n" may be a, t, c, g, other or unknown
  misc_feature (475)..(475): "n" may be a, t, c, g, other or unknown
  misc_feature (502)..(502): "n" may be a, t, c, g, other or unknown
  misc_feature (509)..(509): "n" may be a, t, c, g, other or unknown
  misc_feature (523)..(523): "n" may be a, t, c, g, other or unknown
  misc_feature (528)..(528): "n" may be a, t, c, g, other or unknown
acattattgcacagagatttctcatcaatgttcttcagtttttatgtcttttcctaaatgtgaataagtgctatggataaaatacaaatgtagaaaataacagcagcatgatttgtcaaagttaatccctataatttagtaagaaaaaatggatataaacaaaataagtgctctttctaaactgtactaaattttcaaaaatattgttttaatgcagtgaaggtcctgaaaagcctattgaaagcgatgctgagtcctgttttcaaaagtgtcctgtttgggttttcttggtgaanancagaatttcaagtgaagtaatcgacggactaatttaaaacaaaacagccctcggcttccctattggcctgtgagggcaccggctccgggaccctgacctgggaggcancgaatggtgggggtgcctggcccccatctacacgtacacaggctggcagccttccatctgatccaccanatcagaactttctaatcttaactcccnacccgtnaaactctgcccctnaaagnttttggctccaaaggggt

SEQ ID NO: 9111 - DNA, 435 bp, Homo sapiens
  misc_feature (77)..(77): "n" may be a, t, c, g, other or unknown
  misc_feature (193)..(193): "n" may be a, t, c, g, other or unknown
  misc_feature (235)..(235): "n" may be a, t, c, g, other or unknown
  misc_feature (277)..(277): "n" may be a, t, c, g, other or unknown
  misc_feature (368)..(368): "n" may be a, t, c, g, other or unknown
  misc_feature (403)..(403): "n" may be a, t, c, g, other or unknown
  misc_feature (407)..(407): "n" may be a, t, c, g, other or unknown
  misc_feature (411)..(411): "n" may be a, t, c, g, other or unknown
  misc_feature (417)..(417): "n" may be a, t, c, g, other or unknown
ctgagagcagaggctttatttacaatgacattcaaacaggatttagcaaaggatgcctcttcctgctcgcatcttancagcatgggttgtacttcataaacagaaaagagaaatatcctgggagcaggaagtgaactcttttctcagataatgttctctaaatcccaacacgttccatgctcccggctcttancaggtagttggtggacacttggttatagcagctgggtgccanatgcctgcatctcactgaggaatgtgttcagggaaaatgtcnacactggccgggaaaagcatcaggctttcacctcactcatggcctccataaggcgaacgctgtttgttgactgctgtcgtccaggaaaatnaacctgtttcctttctctctgcccaggaaaccggnaggntganatctcnaaaatttcacccccccca

SEQ ID NO: 9112 - DNA, 552 bp, Homo sapiens
  misc_feature (471)..(471): "n" may be a, t, c, g, other or unknown
  misc_feature (473)..(473): "n" may be a, t, c, g, other or unknown
  misc_feature (506)..(506): "n" may be a, t, c, g, other or unknown
  misc_feature (543)..(543): "n" may be a, t, c, g, other or unknown
  misc_feature (550)..(550): "n" may be a, t, c, g, other or unknown
gaacctttttttttcaggtataaacattcattcaatccaataaagacattttagaaaaaagtcaacctatacaatttattttatttttcctataccttggctaaacaaaatatatttggtgatactgtaaaatactaagcattttcagtaaaactggcaatcaaatacagcttaaccttcttctgcgtgacaactgaggattttaattggaaaagtattatagtctataaacaggaatacccaaaacatatttaaaccactcgagcactttgatttttccatgttctttgcatctagattgaaacacatcacaggaaatttcaaagaccaacggctgaatatttttcatttcaacatttccagtggcatcctacaagagaactagcactcacaatgaagtcatctgaattttctttaaatcgtaactcatttttaatttctaaacaggtttggcctattgatttaaataananaattattatttccataaaatgaatttaggtccnttgaaatttccgtttgaaatcttatccaataccttanttcccgnca

SEQ ID NO: 9113 - DNA, 320 bp, Homo sapiens
  misc_feature (144)..(144): "n" may be a, t, c, g, other or unknown
  misc_feature (191)..(191): "n" may be a, t, c, g, other or unknown
  misc_feature (193)..(193): "n" may be a, t, c, g, other or unknown
  misc_feature (250)..(250): "n" may be a, t, c, g, other or unknown
  misc_feature (293)..(293): "n" may be a, t, c, g, other or unknown
  misc_feature (300)..(300): "n" may be a, t, c, g, other or unknown
  misc_feature (303)..(303): "n" may be a, t, c, g, other or unknown
  misc_feature (306)..(306): "n" may be a, t, c, g, other or unknown
gctgttagtgtttatttgaagtgactttgaaggactgataatattatggggcaggcagactctcactatcttaaggtggttcgcctgagccttcttaaagtggtaccccaggccgggcgcggtggctcacgcctgtaatcccancactttgggaagccaaggcaggtggatcacctgaggtcaggaattcnanaccagcctggccaacctggtgaaaccctgtctctactaaaaatacaacaacaattanccgggcgtggtggtgggcgtctgcaattccagctactcgggangctaaancanganaatcacttgaaccc

SEQ ID NO: 9114 - DNA, 392 bp, Homo sapiens
  misc_feature (28)..(28): "n" may be a, t, c, g, other or unknown
  misc_feature (101)..(101): "n" may be a, t, c, g, other or unknown
  misc_feature (120)..(120): "n" may be a, t, c, g, other or unknown
  misc_feature (132)..(132): "n" may be a, t, c, g, other or unknown
  misc_feature (156)..(156): "n" may be a, t, c, g, other or unknown
  misc_feature (158)..(158): "n" may be a, t, c, g, other or unknown
  misc_feature (299)..(299): "n" may be a, t, c, g, other or unknown
  misc_feature (305)..(305): "n" may be a, t, c, g, other or unknown
  misc_feature (337)..(337): "n" may be a, t, c, g, other or unknown
  misc_feature (339)..(339): "n" may be a, t, c, g, other or unknown
  misc_feature (385)..(385): "n" may be a, t, c, g, other or unknown
gtcagacaaaaatttaactttttatganatttcagtttttgaaatacacaactcttacagcacaaacacagtatttacatttcaagttctttgtacaaaanatgtatgccattttggaanaatattgttganatcatgatctaaaatacctgtcananttactcatggaatctgctcttcacaaatccattgtattatgacataaaatatggctagacgccaaggtttaaccatacataaaaatactaattctcggctgggtgcactggcttatgcctgtaatctcagcactttgggangcaaangcaggtggatcacctgaggtcaggagttcaananaagcctgaccaatatggtggaaacccccgtctctactaaaaatacnaaaatta

SEQ ID NO: 9115 - DNA, 302 bp, Homo sapiens
  misc_feature (177)..(177): "n" may be a, t, c, g, other or unknown
  misc_feature (274)..(274): "n" may be a, t, c, g, other or unknown
  misc_feature (296)..(296): "n" may be a, t, c, g, other or unknown
  misc_feature (300)..(300): "n" may be a, t, c, g, other or unknown
ctacaaataaagtgttttatttacaggagttgtctctccaggtcccagctccctgccacccccaccccagccccagggagaagaaggcggatgccagaggagctggcagaggctgggcaggtcctgagtgggccaggctaggccaagagagaaggcacgaggccctgggcgccccantcccagggcagaagccaggcctgcctggagaaggcagcacggggtcagctctcaggggtcaggctgggttccacgccgccgcagctctgctcataanacagtggggcctctgcgggaanaaanca

SEQ ID NO: 9116 - DNA, 491 bp, Homo sapiens
  misc_feature (123)..(123): "n" may be a, t, c, g, other or unknown
  misc_feature (308)..(308): "n" may be a, t, c, g, other or unknown
  misc_feature (327)..(327): "n" may be a, t, c, g, other or unknown
  misc_feature (333)..(333): "n" may be a, t, c, g, other or unknown
  misc_feature (340)..(340): "n" may be a, t, c, g, other or unknown
  misc_feature (424)..(424): "n" may be a, t, c, g, other or unknown
  misc_feature (428)..(428): "n" may be a, t, c, g, other or unknown
  misc_feature (468)..(468): "n" may be a, t, c, g, other or unknown
  misc_feature (482)..(482): "n" may be a, t, c, g, other or unknown
  misc_feature (484)..(484): "n" may be a, t, c, g, other or unknown
aggaaaaatgaaactttattactacaaacatgagagctgcatacattctaaatcaaatggttgcaacttataataccaagaattaaatgtgaatcctacttaagaatatgctgagctggccangtgtggtggctcacgcctgtaatcctagcactttcaggctgaggcagatggatcgcctgaggtcaggagtttgagaccagtgtggccaacgtggtgaaaccccatctctactaaaaatacaaaaattagctgggtatggtggtacacgcctgtaatcccagctacttgggaggctgaagcaggancattgcttgaacccgggangcggangttgcantgagcccaaatcgcgccaccgcactacagcctgggtgacaagggcgaaactctgtctcatctaaaaaaaaaatatgctgatccngtcnttttgaattaaactctccctgtgatatactgttctctatnccatttcaaaaatnangctgggc

SEQ ID NO: 9117 - DNA, 546 bp, Homo sapiens; identical to SEQ ID NO: 8339
  misc_feature (1)..(546): "n" may be a, t, c, g, other or unknown

SEQ ID NO: 9118 - DNA, 508 bp, Homo sapiens
  misc_feature (45)..(45): "n" may be a, t, c, g, other or unknown
  misc_feature (266)..(266): "n" may be a, t, c, g, other or unknown
  misc_feature (444)..(444): "n" may be a, t, c, g, other or unknown
  misc_feature (461)..(461): "n" may be a, t, c, g, other or unknown
  misc_feature (470)..(470): "n" may be a, t, c, g, other or unknown
  misc_feature (488)..(488): "n" may be a, t, c, g, other or unknown
  misc_feature (492)..(492): "n" may be a, t, c, g, other or unknown
cctgcaaagtacctttaatgtgtttaaatcagcagcaagcattangacatgctattttggccccataagttaggtgtgtagcactacacattagacaccaagtcatcccaaccaatatttatccatatgaacagataaactgaacaaaaacatagttctgataaaacctgcattcacaacctaatgtagtttaaagtaaattttttcacaattgagggctgctatttaggactgttttgttaataataaaaacaggaattatatanaagataaaacaccattttttactgctatataatgtcttgctatataaaacataccctcaacaagtcaaaatatttaaaaccagtgtttcaaataccaaaaatcacagctatgttactgttcagtaactccactcaaataaatgttagtactgcattcttgaaaggaaaaaaactgcanccaaggcaagaactctnaattttgcnccccaattttaaaaaaanaaanccccctcctgcaactg

SEQ ID NO: 9119 - DNA, 445 bp, Homo sapiens
  misc_feature (169)..(169): "n" may be a, t, c, g, other or unknown
  misc_feature (425)..(425): "n" may be a, t, c, g, other or unknown
  misc_feature (437)..(438): "n" may be a, t, c, g, other or unknown
gagacggagtctcgctctgtcgcccaggctggagtgcagtggcgtgatctcggctcactgcaagctctgcctcccgggctcatgccattctcctgcctcagcctcccaagtagctgggactataggttcccgccaccacgcccggctaatttttttgtattgttagtanagacggggtttcaccatgttggtcaggatggtctcgatctcctgactttgtgatctgcccacctcagcctcccaaagtgctgggattacaggcgtgagccaccgcgcccagctgcacactgtatcattttcatttctctcccttgctgtcccctctgcctctgtccttgcctcccatcatatggacacactgtgcctgacacacacgctcacataatctctccctttttgtttccctagctactcatcaacctcangttttgcgggannaaaactt

SEQ ID NO: 9120 - DNA, 263 bp, Homo sapiens
  misc_feature (235)..(235): "n" may be a, t, c, g, other or unknown
  misc_feature (242)..(242): "n" may be a, t, c, g, other or unknown
  misc_feature (251)..(251): "n" may be a, t, c, g, other or unknown
  misc_feature (257)..(257): "n" may be a, t, c, g, other or unknown
  misc_feature (262)..(262): "n" may be a, t, c, g, other or unknown
gtacgaaactgagatttttactgacatgcagatgtgctttagagttaatgtttctacaaaaagtttctataaacaatagaaaatttctagcatgaagtcacaggatgttaaaaatattacaatgcaataaatacaactacatcctccacagccccaaccagacaggaataggcagctatcaggtttggagggaaacactcttgagatcgccttcacgatccacagaaacccagancaccacncaggaaganggaacnacccna

SEQ ID NO: 9121 - DNA, 341 bp, Homo sapiens
  misc_feature (213)..(213): "n" may be a, t, c, g, other or unknown
  misc_feature (245)..(245): "n" may be a, t, c, g, other or unknown
  misc_feature (247)..(247): "n" may be a, t, c, g, other or unknown
  misc_feature (254)..(254): "n" may be a, t, c, g, other or unknown
  misc_feature (320)..(320): "n" may be a, t, c, g, other or unknown
  misc_feature (334)..(334): "n" may be a, t, c, g, other or unknown
gggagtactttcacgtttaatacgcaagggcataaaatagaatgttaggaaacaatttggatttttttccctaaaatataggtgactatgggctagtttacaactttccttctctcactgaaataaaaatacatagttaaggaatagggacgaatacataacaggtgacatttgacagtttgggcatattccttgttactttctaatcttganaatcacagtttgctgttttagaggtatctganangttccanataaaaggcgatggctaaatgctcttaaactttgaaccgtgctggatgctcttaagttaggaaaangaaatttataaccnaaacctt

SEQ ID NO: 9122 - DNA, 503 bp, Homo sapiens
  misc_feature (280)..(280): "n" may be a, t, c, g, other or unknown
  misc_feature (445)..(445): "n" may be a, t, c, g, other or unknown
  misc_feature (456)..(456): "n" may be a, t, c, g, other or unknown
  misc_feature (477)..(477): "n" may be a, t, c, g, other or unknown
  misc_feature (480)..(480): "n" may be a, t, c, g, other or unknown
  misc_feature (484)..(484): "n" may be a, t, c, g, other or unknown
ggtaataagatttaattttccagtagcctgcatgaattgttcccacataaaactgtacagttagtgactgaattgtatacttaagtcccagtattttacattagtgagactgaaattagaggtaaatttctttaacaagtgtaaggcttacctatttataaagaattattctgttagtgtttaagaaaaacagatctagagacaatccagtaggctgcattgtaaacattatgattataaatctcttagtactgccattattattgacagttttgtaaanacttgtaaaaagtccagtttctcaggaatatgaaaattatcttcagaaacctggttggggcctttctccaattcctccagccagctgaaatactgccaagctcacttcatgttgcaaggtgatctgcactttcttgtgagtcgcttctgcatatactcggacaanatcttctgttncagaagggcggacaaaactcnaanaaanctgttcttctccccagttc

SEQ ID NO: 9123 - DNA, 553 bp, Homo sapiens
  misc_feature (68)..(68): "n" may be a, t, c, g, other or unknown
  misc_feature (140)..(140): "n" may be a, t, c, g, other or unknown
  misc_feature (152)..(152): "n" may be a, t, c, g, other or unknown
  misc_feature (254)..(254): "n" may be a, t, c, g, other or unknown
  misc_feature (310)..(310): "n" may be a, t, c, g, other or unknown
  misc_feature (392)..(392): "n" may be a, t, c, g, other or unknown
  misc_feature (478)..(478): "n" may be a, t, c, g, other or unknown
  misc_feature (499)..(499): "n" may be a, t, c, g, other or unknown
  misc_feature (524)..(524): "n" may be a, t, c, g, other or unknown
  misc_feature (533)..(533): "n" may be a, t, c, g, other or unknown
  misc_feature (552)..(552): "n" may be a, t, c, g, other or unknown
ggcatgagagatgcaacaggctttattgttgcagcaacactaacatatacgccccattccctgctgangcctgtccccacctcaccccttggttgtcgatggtgtggaacattggggtgaggggtaaaatgcctaagcanaactggagggangcaaatgggactggtgagggtcgggatcacctgaaccaggggtccaacagtcaggatacccgactccatccacacaggggcatggaacacttgggttctganttcaaaatttggcaatgtcttgacctgggttggaaagtaggtggggtctggaaaanctttggtccagggttcaaaatttgaaaatgccttgctccaagccccagtttggggatgaacatggaaaaaggtggatgggantgtctctgggttcacaatttgaaattggccatggatgctctggcctgaaccccattttggggctggatgtaggtgctcttggtccnaagttccaagctggggaaaancctttcccaagttattggggctggntttaaaganatcctaattttgggcctgnc

SEQ ID NO: 9124 - DNA, 544 bp, Homo sapiens
  misc_feature (6)..(6): "n" may be a, t, c, g, other or unknown
  misc_feature (79)..(79): "n" may be a, t, c, g, other or unknown
  misc_feature (95)..(95): "n" may be a, t, c, g, other or unknown
  misc_feature (173)..(173): "n" may be a, t, c, g, other or unknown
  misc_feature (200)..(200): "n" may be a, t, c, g, other or unknown
  misc_feature (210)..(210): "n" may be a, t, c, g, other or unknown
  misc_feature (337)..(337): "n" may be a, t, c, g, other or unknown
  misc_feature (361)..(361): "n" may be a, t, c, g, other or unknown
  misc_feature (402)..(402): "n" may be a, t, c, g, other or unknown
  misc_feature (413)..(413): "n" may be a, t, c, g, other or unknown
  misc_feature (421)..(421): "n" may be a, t, c, g, other or unknown
  misc_feature (464)..(464): "n" may be a, t, c, g, other or unknown
  misc_feature (496)..(496): "n" may be a, t, c, g, other or unknown
  misc_feature (529)..(530): "n" may be a, t, c, g, other or unknown
  misc_feature (540)..(540): "n" may be a, t, c, g, other or unknown
cgtttnttttttttttaaacaattgatttaaatccatgtcattttactttatatgtactggtctctcatctgactttangcgttttctgcggggntgtataaagtctcatcagaatcctcagttacctccaccatcatcctcttcctgctcaaactctggcaaaggtgcgaanggtcccgtctgaataaatctctgtgantttatcttcnaaagtacaatgcaactgctttccctgcctgagctacttctgaatcagccttcaaattaatctcttgtgtgtctgcataaacttgaacaactttcatcatttcattaaacctttcacagttcttgaanatcaaacggacatcggccacaaantcatccgggatttggtaatgttgggaatgttttttctgaancttctttttcncggggganaaatccattgggttctttataattttataataatttggtatcnaacaagaaaaggccccggaaatccatacttantcctggcaataaaaggttaaccaaaaaaattcnnctttcccttnggcc

SEQ ID NO: 9125 - DNA, 449 bp, Homo sapiens
  misc_feature (150)..(150): "n" may be a, t, c, g, other or unknown
  misc_feature (189)..(189): "n" may be a, t, c, g, other or unknown
  misc_feature (227)..(227): "n" may be a, t, c, g, other or unknown
  misc_feature (263)..(263): "n" may be a, t, c, g, other or unknown
  misc_feature (357)..(357): "n" may be a, t, c, g, other or unknown
  misc_feature (386)..(386): "n" may be a, t, c, g, other or unknown
  misc_feature (400)..(400): "n" may be a, t, c, g, other or unknown
  misc_feature (425)..(425): "n" may be a, t, c, g, other or unknown
  misc_feature (435)..(435): "n" may be a, t, c, g, other or unknown
actgagaggtaactttttatcaatcaaaccacataccccaatttaacacctttcagtgctctgaattcaactgacagactaaagggtgtttcctgtaacagtctgaaatattaagtgttttttttgttttgtttttaaatcttatttcanaaaacttcctcttggggtaggaaagtacacatgaagcancaaagtaacgaaaaaaaacttaaatagggccttcaganatcccacacactacaaagattctgccaagccataanataagtgtgaagcccagtatatgtccagcttttctcctcaggacatcttcagtgtttcttctcttttaaacaccacatcaggttctagccacanacttgtgttttgggtgtgcctgctttgangggtccatgcccantgtgtctgctggtgaccaagaccancagtaatgantaacgggcgccttc

SEQ ID NO: 9126 - DNA, 449 bp, Homo sapiens
  misc_feature (62)..(62): "n" may be a, t, c, g, other or unknown
  misc_feature (132)..(132): "n" may be a, t, c, g, other or unknown
  misc_feature (140)..(140): "n" may be a, t, c, g, other or unknown
  misc_feature (171)..(171): "n" may be a, t, c, g, other or unknown
  misc_feature (375)..(375): "n" may be a, t, c, g, other or unknown
  misc_feature (392)..(392): "n" may be a, t, c, g, other or unknown
  misc_feature (400)..(400): "n" may be a, t, c, g, other or unknown
  misc_feature (433)..(433): "n" may be a, t, c, g, other or unknown
  misc_feature (437)..(437): "n" may be a, t, c, g, other or unknown
ctttctttctttttttgtgggtacaacaacctgtagccacatgagccgtatctacccagganattccttgccagattggaacatggagatgaacaaagctgcttctgggaagcccatttggaaaaaaaaganggaactanaaagctgccaagtcaagcttttgaagcgganacaaagtcaaaagtttagacctccctcccaatgctggggatgggctgactgtttaaccatgtgcacaccaacccagtgcacaccaggtacagtgtgacagggtggctatggcctaaaacatgggttttgcaggcaggctgacgtgcattcaaattctgactcttcctgaccacacaacatggggctggtgatcttgactcttcnaacctgtttctttgcanaaaaaaanggggcaataataataccccctcttaaggtggantganaattactttgca

SEQ ID NO: 9127 - DNA, 501 bp, Homo sapiens
  misc_feature (222)..(222): "n" may be a, t, c, g, other or unknown
  misc_feature (458)..(458): "n" may be a, t, c, g, other or unknown
  misc_feature (464)..(464): "n" may be a, t, c, g, other or unknown
  misc_feature (468)..(468): "n" may be a, t, c, g, other or unknown
  misc_feature (486)..(487): "n" may be a, t, c, g, other or unknown
acacttttacagtttaagaaatattaaatgtgataactgttcaggatctactttttacacaatctcagtaacgtatgtacatagtcccaaaaaaaaaaaagcagcatttgcctgggaacacatcactataagcaaacaaaacatcaaatggcctgaattctaaaatacctttggattatataaaattacattgtaaagttacaaatgttgctcattcttganaaatgtttgaatgtttaaataatgttgccataatacatattatttcacgacattaaaaaaaacaatggtgaatacaaggtatcatcattttaagggtaaagagataaagcaagtacatatacaaatccactggaaaagctaagtttggagctgatttcctctcttgaattgtaaaatttcagtaatacacagtcactatctactgctggaataatgcctgagcaatttaggttgangatacnaacnataacaaaaacctgcccnnatattcaacttggg

SEQ ID NO: 9128 - DNA, 460 bp, Homo sapiens
  misc_feature (369)..(369): "n" may be a, t, c, g, other or unknown
  misc_feature (374)..(374): "n" may be a, t, c, g, other or unknown
  misc_feature (376)..(376): "n" may be a, t, c, g, other or unknown
  misc_feature (395)..(395): "n" may be a, t, c, g, other or unknown
  misc_feature (415)..(415): "n" may be a, t, c, g, other or unknown
aggtttctaaaatgaatgttatttgatttcatcatatattaacagattttagtaagttgtttttaaactagaggaattgaggcagagagaaatgaagtccttttactggaaattttcatctcttaatgtgttaattgattgatttttacacatttcattttaaacatggaaatgatgaaggttctaattgtaatgagtagttgtttttggattgttcaggtacactgcctcttttcttcagacactggggctcttttgtggtcactgagtattactgttttttcaagtcttcaagcacatcttgctttgtgattttggcccatgcattggggattttacctttacctgcaaattttttctgatattttncttcnanatttgatctgaagtgaganacaaaccatttccagtatanctggatggaagtatctggggtgatgctccacatggcataatcccc

SEQ ID NO: 9129 - DNA, 479 bp, Homo sapiens
  misc_feature (399)..(399): "n" may be a, t, c, g, other or unknown
  misc_feature (416)..(416): "n" may be a, t, c, g, other or unknown
  misc_feature (421)..(421): "n" may be a, t, c, g, other or unknown
  misc_feature (423)..(423): "n" may be a, t, c, g, other or unknown
  misc_feature (471)..(471): "n" may be a, t, c, g, other or unknown
cttgtgaaatcattgcttttaatcttttaatctatccatctttaaaaagaccctaaaggaggggtctttttgtccaggaagaacaataaaaggctgtggaaatacatccagaatatacaactaaatcaaaaaccaaaagcagcactgaatgggcaagagaaagatatttgcggaggataaaatggggaaaacacatcaaaatactaaggttaaaatttctctaattaggcagatataaaatgacactgatgagggtatatgatagccatactcccaacaaccaaagttataaagcaatacgtgctccccaaataacaaggaaaagaattctttctattccttttgttccccgccccatcccttgaatattaagcatgaacactgtacatgcataaatcncttttacaagggccacncgatnanatcacacaaagtctcatttccccaaaaataaattctgggtcgtgggcnccttacca

SEQ ID NO: 9130 - DNA, 601 bp, Homo sapiens
  misc_feature (72)..(72): "n" may be a, t, c, g, other or unknown
  misc_feature (363)..(363): "n" may be a, t, c, g, other or unknown
  misc_feature (463)..(463): "n" may be a, t, c, g, other or unknown
  misc_feature (467)..(467): "n" may be a, t, c, g, other or unknown
  misc_feature (537)..(538): "n" may be a, t, c, g, other or unknown
  misc_feature (556)..(556): "n" may be a, t, c, g, other or unknown
  misc_feature (563)..(563): "n" may be a, t, c, g, other or unknown
  misc_feature (584)..(584): "n" may be a, t, c, g, other or unknown
aaaaggcaaacaactttaatggttattttgctaaagataaaactctgggtggtaaaggaattaaaggcagantctcaaagagatatttgcacccccgtgtctgtattagcactactcccaatagtcaagaggaagcaagccaagtgttcactgatggaggaacagagtgtggtacgcacatgtaacggaacattccattatatgtataatacaggaaggaaatcctgtcacctgacacaacatggatgaaccttgaggacattatgctaagtgaaataagccagtcacaaaaagacaagtcactgtatgattccacttatatgagatactgagaatagtccaaaccagagagacagaaagcanaatggtggctgcgggggctgggaagaatgggaattactgtttaatgggtacagtttccattttacaagctgaaaacctatggaaatggacggcggtgacngccncccacattatgaatgttttaacattaactttctgaactgtcccttaaaattgtgaaaacatatttttttnnatttttttcaacaatttnaattttnagaaaaaaacccaaccccccngggtttttggcccttcc

SEQ ID NO: 9131 - DNA, 512 bp, Homo sapiens
  misc_feature (231)..(231): "n" may be a, t, c, g, other or unknown
  misc_feature (384)..(384): "n" may be a, t, c, g, other or unknown
  misc_feature (440)..(440): "n" may be a, t, c, g, other or unknown
  misc_feature (442)..(442): "n" may be a, t, c, g, other or unknown
  misc_feature (483)..(483): "n" may be a, t, c, g, other or unknown
  misc_feature (510)..(510): "n" may be a, t, c, g, other or unknown
  misc_feature (512)..(512): "n" may be a, t, c, g, other or unknown
aatgctgcatttcttggttttatttgaaacagtgcatatttttagcattttatggtaggattttacacttgtcatttacacaaattacaaggttctgcttcaagtttttaaaaaaaatttaaaaattcagcccatgtgcagcacaaaaatatgcaaaactactttacattatacacactttttatcaaaggaaatacaaaattctggcttgttgttttaaacaaatacaanaagcttcaaactaaacacaaagggttaacattaattctcaaatataagtctgcacttttgtgttgtagttctctgaaatgtgaataccaaattcctaagggattttaatgttttcctttgaaaaggaaaactaaaaaaattcccgtaaacaantccctccccatcagcttggtctttcccaaccctactcttggttcccttaatgccananacttgcatcatgttacaaaattgggggtgggcccttaatcntacaaggaacaaatccctttaacttcncn

SEQ ID NO: 9132 - DNA, 454 bp, Homo sapiens
  misc_feature (401)..(401): "n" may be a, t, c, g, other or unknown
  misc_feature (408)..(408): "n" may be a, t, c, g, other or unknown
  misc_feature (452)..(452): "n" may be a, t, c, g, other or unknown
gttttgcaaccacccatcaataaactttcttttttattattaattgggggcagggtttctgttcttgcaactgagtcctaacagaaaacaatggtttcgctgaccacacggagagctgaggacaggacaaaaaggcatgagacagctggacacctggagagaggtgacacaggacagagtcctcacccggctgccctgggcctcggggagctcaggctgcagtccctgggcctggtggcacccacagcacggcagtctctggctgggcttcggggagcccacatgtctgatcggcaaggcttggctggccaggcggtgggcaccaacgtggtgggtgggcagtcctgggcttccaggaggcctcctgggactcaagctcttcagtggggtgtgcctgtcanggtgcangtgggttctgtggctacactcccatcctgtcttccctctgtgtncc

SEQ ID NO: 9133 - DNA, 502 bp, Homo sapiens
  misc_feature (1)..(502): "n" may be a, t, c, g, other or unknown
nnnnnnnnnnnnnnnnnnnnnnnnnnnnnnnnnnnnnnnnnnnnnnnnnnnnnnnnnnnnnnnnnnnnnnnnnnnnnnnnnnnnnnnnnnnnnnnnnnnnnnnnnnnnnnnnnnnnnnnnnnnnnnnnnnnnnnnnnnnnnnnnnnnnnnnnnnnnnnnnnnnnnnnnnnnnnnnnnnnnnnnnnnnnnnnnnnnnnnnnnnnnnnnnnnnnnnnnnnnnnnnnnnnnnnnnnnnnnnnnnnnnnnnnnnnnnnnnnnnnnnnnnnnnnnnnnnnnnnnnnnnnnnnnnnnnnnnnnnnnnnnnnnnnnnnnnnnnnnnnnnnnnnnnnnnnnnnnnnnnnnnnnnnnnnnnnnnnnnnnnnnnnnnnnnnnnnnnnnnnnnnnnnnnnnnnnnnnnnnnnnnnnnnnnnnnnnnnnnnnnnnnnnnnnnnnnnnnnnnnnnnnnnnnnnnnnnnnnnnnnnnnnnnnnnnnnnnnnnnnnnnnnnnnnnnnnnnnnnnnnn

SEQ ID NO: 9134 - DNA, 508 bp, Homo sapiens
  misc_feature (213)..(213): "n" may be a, t, c, g, other or unknown
  misc_feature (235)..(235): "n" may be a, t, c, g, other or unknown
  misc_feature (255)..(255): "n" may be a, t, c, g, other or unknown
  misc_feature (262)..(262): "n" may be a, t, c, g, other or unknown
  misc_feature (382)..(382): "n" may be a, t, c, g, other or unknown
  misc_feature (443)..(443): "n" may be a, t, c, g, other or unknown
  misc_feature (467)..(467): "n" may be a, t, c, g, other or unknown
  misc_feature (479)..(479): "n" may be a, t, c, g, other or unknown
  misc_feature (487)..(487): "n" may be a, t, c, g, other or unknown
  misc_feature (506)..(506): "n" may be a, t, c, g, other or unknown
aagtttattgtatatttattgtaaatgtgttgcatattgtattagtctgcccaggactgccataacaaaatacttcagattgggtggtttaaacaacagaaacttgtcttttcacagttctgttttctggaagtcccagatcaaggtgctggtccgtgtgatttctggggagggctctccttggcttgccgatggcctccttctctggtgcangcacggggggagagcaagcganccccttgcgtctcctctcanaaagacnaatcctgttggatgagggccccaccctcaggaccgatgtaaccttaatgacttctgtagaggccccatctccaaatacagacatgctgcagttaggtcttcagcatttgttctttaatanaattttcaatgccagcttgcaccattaagtcattgacattcttctgtaaatcctcaatgcnaattcccatttcttcccattacantgtttaagggcncctgcttnaaactggaatccaaaaccncc

SEQ ID NO: 9135 - DNA, 498 bp, Homo sapiens
  misc_feature (212)..(212): "n" may be a, t, c, g, other or unknown
  misc_feature (302)..(302): "n" may be a, t, c, g, other or unknown
  misc_feature (425)..(425): "n" may be a, t, c, g, other or unknown
  misc_feature (427)..(427): "n" may be a, t, c, g, other or unknown
  misc_feature (433)..(433): "n" may be a, t, c, g, other or unknown
  misc_feature (473)..(473): "n" may be a, t, c, g, other or unknown
  misc_feature (482)..(482): "n" may be a, t, c, g, other or unknown
attagtaagagagtttatttggggattaatacatactaatttattttatgtgtagcaaacagaatccacgctagcttttatgtaattaattctctttgtttccaagtatagatccctcatgttttcctcacatgatctctctgtgacacatttctcccctctgacaggcctaccatgaccccatgttaaagttgtccatcatgtcagaagangaactcacacatatatttggtgatctggactcttacatacctctgcatgaaggttagatgtgccacttaattgtcattaaatctaaagancagcggtgcatgtaattttcagtctaaacttctaatgtagtgctgacctattttttaaataaacctgttaatggtgtttatgcttttttatcacttcagatttgttgacaagaataggaaaancnacccancctgatggaacagtggaacaaattggcccattctcctganctgggtttntttgaatttttgaccc

SEQ ID NO: 9136 - DNA, 467 bp, Homo sapiens
  misc_feature (1)..(467): "n" may be a, t, c, g, other or unknown
nnnnnnnnnnnnnnnnnnnnnnnnnnnnnnnnnnnnnnnnnnnnnnnnnnnnnnnnnnnnnnnnnnnnnnnnnnnnnnnnnnnnnnnnnnnnnnnnnnnnnnnnnnnnnnnnnnnnnnnnnnnnnnnnnnnnnnnnnnnnnnnnnnnnnnnnnnnnnnnnnnnnnnnnnnnnnnnnnnnnnnnnnnnnnnnnnnnnnnnnnnnnnnnnnnnnnnnnnnnnnnnnnnnnnnnnnnnnnnnnnnnnnnnnnnnnnnnnnnnnnnnnnnnnnnnnnnnnnnnnnnnnnnnnnnnnnnnnnnnnnnnnnnnnnnnnnnnnnnnnnnnnnnnnnnnnnnnnnnnnnnnnnnnnnnnnnnnnnnnnnnnnnnnnnnnnnnnnnnnnnnnnnnnnnnnnnnnnnnnnnnnnnnnnnnnnnnnnnnnnnnnnnnnnnnnnnnnnnnnnnnnnnnnnnnnnnnnnnnnnnnnnnnn

SEQ ID NO: 9137 - DNA, 503 bp, Homo sapiens
  misc_feature (156)..(156): "n" may be a, t, c, g, other or unknown
  misc_feature (181)..(181): "n" may be a, t, c, g, other or unknown
  misc_feature (213)..(213): "n" may be a, t, c, g, other or unknown
  misc_feature (374)..(374): "n" may be a, t, c, g, other or unknown
  misc_feature (420)..(420): "n" may be a, t, c, g, other or unknown
  misc_feature (422)..(422): "n" may be a, t, c, g, other or unknown
  misc_feature (428)..(428): "n" may be a, t, c, g, other or unknown
  misc_feature (470)..(470): "n" may be a, t, c, g, other or unknown
  misc_feature (477)..(477): "n" may be a, t, c, g, other or unknown
aggttaaaaatagattttaattttattaaaaatataatttaatgcaggttgtttgaagcatctgtcttcatatgatggcattagaacaccttggtataataaaaagttaccgtaatttatgattatttgaatttatccattctgaaaattaataanatctaaaactggcatgacaatcaanatttgtatttagtgaaatttaaaataaatgtnagccatagttaaaactgttgctgcattcatgaatgcccttaggaaaaggtccacagtaaaatcagaaagctgaacctctcctgctgtttataggatatgtttatgctgaattaattgccagggtttcttaaacttttagggaattatactttggtggctcnatagtaaattctacaaattatttttaaattgatttcctttccttananctgcangaaaatatctggcaaggtgcatttaatatttggaaaaaaaanatgaacngttacctactttaggaaaaaaataac

SEQ ID NO: 9138 - DNA, 468 bp, Homo sapiens
  misc_feature (124)..(124): "n" may be a, t, c, g, other or unknown
  misc_feature (130)..(130): "n" may be a, t, c, g, other or unknown
  misc_feature (140)..(140): "n" may be a, t, c, g, other or unknown
  misc_feature (172)..(172): "n" may be a, t, c, g, other or unknown
  misc_feature (175)..(175): "n" may be a, t, c, g, other or unknown
  misc_feature (291)..(291): "n" may be a, t, c, g, other or unknown
  misc_feature (295)..(295): "n" may be a, t, c, g, other or unknown
  misc_feature (330)..(330): "n" may be a, t, c, g, other or unknown
  misc_feature (435)..(435): "n" may be a, t, c, g, other or unknown
  misc_feature (439)..(439): "n" may be a, t, c, g, other or unknown
  misc_feature (456)..(457): "n" may be a, t, c, g, other or unknown
  misc_feature (463)..(463): "n" may be a, t, c, g, other or unknown
acaaagcagttggggcatttattgacatttaaacaaggggaggagatcctgaacactagtctcgctcagtttataaaaacttgaggccaaactctccatcatctgtacacagcttaaccacggncaggancaagaattcnagttaaacgaattgaaccagtccaaccacaanacnataaagggaaacagggcgtggggatttccagtttttccttttacattacaaagtttccaacacaagaagccaacaataccccagtgctgcaccaagttacttcccactgtttcccnaggnacagtcaattaataatcagtagtccaagttctaanaacatttcctggaaaacaaggacgcacctcccgtggctctatgcatggcctgccactgatgaatcaaattcttaagaacctacgaacgtctgataccttgaaganaacncccccctaaaatctccnncatccnggccc

SEQ ID NO: 9139 - DNA, 435 bp, Homo sapiens
  misc_feature (244)..(244): "n" may be a, t, c, g, other or unknown
  misc_feature (266)..(266): "n" may be a, t, c, g, other or unknown
  misc_feature (405)..(405): "n" may be a, t, c, g, other or unknown
  misc_feature (418)..(418): "n" may be a, t, c, g, other or unknown
  misc_feature (424)..(424): "n" may be a, t, c, g, other or unknown
  misc_feature (429)..(430): "n" may be a, t, c, g, other or unknown
acaaaaaaaaattttttattaagtgtgaaagcaaaacaggtacatctatttaaatattttttacatatttatagatacaacaaagacaaataacttagcaaaaattacaagtttaaagaatagtactattttgaaacagccaatatagtatctgaaaatattccattttatccataatcagtgagtattatttccaaaaaaagtaacttgcattttcttgtgaaaaatatggttttttttttanatgtctgccaaggatttatcanaaaagtccatctttctaaacctaaaaaattgtaatgcctttattgaaaactttttttacctaatggctttaaaaaccacgtgttttcctttggacttaggtgaattctaaatctttacttcactttcaaactacagggnatcgacattaacnaaaacnaatcnnattga

SEQ ID NO: 9140 - DNA, 427 bp, Homo sapiens
  misc_feature (67)..(67): "n" may be a, t, c, g, other or unknown
  misc_feature (363)..(363): "n" may be a, t, c, g, other or unknown
  misc_feature (409)..(409): "n" may be a, t, c, g, other or unknown
  misc_feature (425)..(427): "n" may be a, t, c, g, other or unknown
atctgtgagagattaaatataaggactgtttttgttgtttgagacaggatctggctctgttgcccangcaacagttgtgcagtgatacaatcttggctcactgaaacctctacctcttgggctcaggcaatcttcccacggctcactgaaacctctacctcttgggctcaggcaatcttcccacggctcactgaaacctctacctcttgggctcaggcaatcttcccacctcagtttcctaagcagctgggactacaggcgtgcaccaccacacctggctagtttttatatttttggtaaaaataaagtttcgccacattacccaggctgatctcaaactcccaagctcaaaggatccacccncctgaaatctcccaaaatgctgggaataacaggttttaacccactnttcctggccaaggttnnn

SEQ ID NO: 9141 - DNA, 399 bp, Homo sapiens
  misc_feature (192)..(192): "n" may be a, t, c, g, other or unknown
  misc_feature (219)..(219): "n" may be a, t, c, g, other or unknown
  misc_feature (326)..(326): "n" may be a, t, c, g, other or unknown
  misc_feature (350)..(350): "n" may be a, t, c, g, other or unknown
  misc_feature (353)..(353): "n" may be a, t, c, g, other or unknown
  misc_feature (383)..(383): "n" may be a, t, c, g, other or unknown
  misc_feature (397)..(397): "n" may be a, t, c, g, other or unknown
ccacaaaaatgtaatatacatttaatagcacattataaagttcctgaccaaagacgttgatttcctaattataatagcacagaaatcctttagaatttagtaaacgtaattaagactattcagaagtaatgaaaaaccaatatgataaaaacaaaaatcctccagtaaagaaggaacctgtccatttgaganaaatacaattgagaacttgcaaatganacaagggaagatggcaatttggaactgcaatagaaataactatagcagaaacaaccatttaagaagttttagcagcaataagtatttattattctgaatgaaatgtncagttgacttttatataaaaatcntcnaagtgctatattggattatttactattaantttaccccccaacngc

SEQ ID NO: 9142 - DNA, 490 bp, Homo sapiens
  misc_feature (176)..(176): "n" may be a, t, c, g, other or unknown
  misc_feature (183)..(183): "n" may be a, t, c, g, other or unknown
  misc_feature (193)..(193): "n" may be a, t, c, g, other or unknown
  misc_feature (208)..(208): "n" may be a, t, c, g, other or unknown
  misc_feature (224)..(224): "n" may be a, t, c, g, other or unknown
  misc_feature (377)..(377): "n" may be a, t, c, g, other or unknown
  misc_feature (397)..(397): "n" may be a, t, c, g, other or unknown
  misc_feature (432)..(432): "n" may be a, t, c, g, other or unknown
  misc_feature (443)..(443): "n" may be a, t, c, g, other or unknown
  misc_feature (475)..(475): "n" may be a, t, c, g, other or unknown
  misc_feature (481)..(481): "n" may be a, t, c, g, other or unknown
ctggagaattgtacatgttttattgggaatatattttttctttctgaatctgttatgaatgcattggttggctgggttcagtaataaatatgtgagaactttcattaaaaaaaaatacaaaaattagctgggcatggtggcgcacacctgtagtaccagctactctggaagctgangcggganaattgcttcnacccaaaaagcggangttgcagtgagctganatcgcgccactgcactccagcctgtgtgacagaatgagactttgtctcaaaaaacaaacaaaacatgcacacatttaatcaatataaaatattatttctgcgaagtcacttcaagctgatactgcatactccatatatgctaaacttcacaangtctttacctcatacctgantctctttcctgaacccccgcgggggtaattcaatnccctgggggtnctttacccccttggtactacaacctttgggcnccagtncgtttccac

SEQ ID NO: 9143 - DNA, 542 bp, Homo sapiens
  misc_feature (162)..(162): "n" may be a, t, c, g, other or unknown
  misc_feature (489)..(489): "n" may be a, t, c, g, other or unknown
  misc_feature (503)..(503): "n" may be a, t, c, g, other or unknown
  misc_feature (509)..(509): "n" may be a, t, c, g, other or unknown
  misc_feature (511)..(511): "n" may be a, t, c, g, other or unknown
  misc_feature (542)..(542): "n" may be a, t, c, g, other or unknown
ccaatggaaaaatctctaaacctcttagagttttattagacatttcatgtacagaagttaatctagaaaaatacattttaaaaatcttcaacagaacatgctccctgtaacaaaaccttccaaaccctgtgttttattatacaaagcaatctacattagtangtaaaaagaaattctcaaatttagcaatgtcattttccatccaacatccatctaatttacagatgggtttccactattcatactggaattagaattctgtaataaattttttctaatgttttctgtacatattaaataacccaaaaggttcctcttgtagtgcatgtgccatttagcaagtctattcagtatttttccagtaccattctcattacagtgatttgcctgtaaatgttagttaatatctaaaagtgcacacagttaactttcccaaataacggactatttctgggaggaaacctaatattcacagaaaaagattaccantaacaatgaattanaaaatntngggttgaaagttctcctgaaaaacatccacn

SEQ ID NO: 9144 - DNA, 297 bp, Homo sapiens
  misc_feature (124)..(124): "n" may be a, t, c, g, other or unknown
  misc_feature (158)..(158): "n" may be a, t, c, g, other or unknown
  misc_feature (204)..(204): "n" may be a, t, c, g, other or unknown
  misc_feature (223)..(223): "n" may be a, t, c, g, other or unknown
  misc_feature (239)..(239): "n" may be a, t, c, g, other or unknown
  misc_feature (268)..(268): "n" may be a, t, c, g, other or unknown
  misc_feature (270)..(270): "n" may be a, t, c, g, other or unknown
ggctcttacttgtttctgtctccttttcacagggaacacttccacaggttggggaacctcccccatgggtaacatggtcagggctgcctcaaatctggaggctagacttagcactacatcaganctgtgccacttcacactgacaggcagtgtttaanaaaaacatctcaacctgccagccaacgaaaatgggtgacaagtcanaatgtggggcagggatgtnttaaagtgaacagaantgctaacaaatgcctcctcaagctgtaanantcacatggggagacagtggcaatgtgt

SEQ ID NO: 9145 - DNA, 284 bp, Homo sapiens
  misc_feature (71)..(71): "n" may be a, t, c, g, other or unknown
  misc_feature (93)..(93): "n" may be a, t, c, g, other or unknown
  misc_feature (190)..(190): "n" may be a, t, c, g, other or unknown
  misc_feature (205)..(205): "n" may be a, t, c, g, other or unknown
  misc_feature (236)..(236): "n" may be a, t, c, g, other or unknown
  misc_feature (238)..(238): "n" may be a, t, c, g, other or unknown
  misc_feature (266)..(266): "n" may be a, t, c, g, other or unknown
aaatactagaaaggccataatgaacttaaaggactgatttgggtttaatagtaagggatggcttgagttancaatgaattaagggaagactantgttaaaacaaaaaaaaaccaaaaaccacattcaacgaattgaagatactcaagaaaacctgcagaaaataatatgaaaattaaggggaaacctgantgtgtttaaaggcanaattaaataaagcttatgttttatggttgananagtcagactaataaacaggctgtttcanacctaagttaggcactta

SEQ ID NO: 9146 - DNA, 352 bp, Homo sapiens
  misc_feature (189)..(189): "n" may be a, t, c, g, other or unknown
  misc_feature (201)..(201): "n" may be a, t, c, g, other or unknown
  misc_feature (229)..(229): "n" may be a, t, c, g, other or unknown
  misc_feature (236)..(236): "n" may be a, t, c, g, other or unknown
  misc_feature (277)..(277): "n" may be a, t, c, g, other or unknown
  misc_feature (306)..(306): "n" may be a, t, c, g, other or unknown
  misc_feature (316)..(316): "n" may be a, t, c, g, other or unknown
  misc_feature (344)..(345): "n" may be a, t, c, g, other or unknown
cttttttttttttgtcttttaaaaacatcgtaacattaacacatggccgttcaccgtcccccagcgatgggagctggcctggggcccagggtcctccaggatcttcactcattcacagtaacggttctgaccagtcctccaggtcgcacgtggatgccacaggggtggggaaggaagaagaaattactntcccaccttcanaaaaaaaaaaaaaacaaacaaacaaacnctgctanccactcacctttaaaaaccccatggctatgggcgcctgcancgggcgggggtccatttgcttgttctttnatacaaaaangcagaaaatccccccttaccaaacattnnaaatcct

SEQ ID NO: 9147 - DNA, 221 bp, Homo sapiens
  misc_feature (13)..(13): "n" may be a, t, c, g, other or unknown
  misc_feature (24)..(24): "n" may be a, t, c, g, other or unknown
  misc_feature (78)..(78): "n" may be a, t, c, g, other or unknown
  misc_feature (92)..(92): "n" may be a, t, c, g, other or unknown
  misc_feature (101)..(101): "n" may be a, t, c, g, other or unknown
  misc_feature (153)..(153): "n" may be a, t, c, g, other or unknown
  misc_feature (183)..(183): "n" may be a, t, c, g, other or unknown
  misc_feature (189)..(189): "n" may be a, t, c, g, other or unknown
  misc_feature (210)..(210): "n" may be a, t, c, g, other or unknown
  misc_feature (214)..(214): "n" may be a, t, c, g, other or unknown
gtttgttagttancctggcctcanatcagtccctctatctctggtctaatgttgtaacttctttttctcttgggtatnttaggccatgtatntggaaattngatgcatgtgaccccctatggcacagtctgacatttctcaaattcacctcanttcctatctctggttctggaaattatgaantcaganagccccatgaaggcttaagtntacnggcatca

SEQ ID NO: 9148 - DNA, 455 bp, Homo sapiens
  misc_feature (5)..(5): "n" may be a, t, c, g, other or unknown
  misc_feature (362)..(362): "n" may be a, t, c, g, other or unknown
  misc_feature (375)..(375): "n" may be a, t, c, g, other or unknown
  misc_feature (404)..(404): "n" may be a, t, c, g, other or unknown
  misc_feature (409)..(409): "n" may be a, t, c, g, other or unknown
  misc_feature (444)..(444): "n" may be a, t, c, g, other or unknown
ggaanaaaacatttgcaaataatttatctgatgagggtttaatatccagaaaatataaagaactcctacaactcaacagcaaaaaaagacaacccaactaaaaaatgggcaaaaatgtgaataaatattttcccaaaatgacataaaaatggtcaataagcatgtgaaaggattctcaacatcattaatcattagggaaatgcaaatcaaaaccaaactgaaatactgctttacacctcctatgatcagtataattttaaaaaacagaaaaataaaagcattggtgagaatatggataaactggaaccctactggaaatgtataattgtgcagtcattgtggaaaggtttggcagttcctcnaaaagctaaatanaattaccatatgttcttggccttcctccncctanataatactcccagaaaaaaaaaaaaaaggtttttnaacaaaaactt

SEQ ID NO: 9149 - DNA, 392 bp, Homo sapiens
  misc_feature (352)..(352): "n" may be a, t, c, g, other or unknown
  misc_feature (389)..(389): "n" may be a, t, c, g, other or unknown
  misc_feature (392)..(392): "n" may be a, t, c, g, other or unknown
aacaatgtaaatgatttaatggtcacctgagtggtgtatttgaggagtacaggtttccttgtaggatttttttttaaggcatccattgagaaaaaagaaatgaacactatcagagaagaatcctgatggagatactgttttgggctagaggtattgaagaccccttaagataaaaaatgcatgacttggctcttccctcagagagctcatactaggtgttcaattcacattggtttctgaatggcttgaaaacaatgatatccattctcagagggctgagactggatctagaattggcacttcaatgcttggcagtacttttgatcttctaatatgccctcttgttttccanaacaatattgacaacgataattcattgaaaatttacntcn

SEQ ID NO: 9150 - DNA, 327 bp, Homo sapiens
  misc_feature (3)..(3): "n" may be a, t, c, g, other or unknown
  misc_feature (56)..(56): "n" may be a, t, c, g, other or unknown
  misc_feature (88)..(88): "n" may be a, t, c, g, other or unknown
  misc_feature (163)..(163): "n" may be a, t, c, g, other or unknown
  misc_feature (258)..(258): "n" may be a, t, c, g, other or unknown
  misc_feature (266)..(266): "n" may be a, t, c, g, other or unknown
  misc_feature (294)..(295): "n" may be a, t, c, g, other or unknown
  misc_feature (311)..(311): "n" may be a, t, c, g, other or unknown
aangtgtagagatgcattctcactatgttgcccaggctggtcttgaactcctgggnctcaagtgatcctcccgtctttaccttccaangggttgggattacagggctgagccactgcacccagtcccattttacttaaatatcaaattcaaatcttcagtgtnctacttattttgggtgttaattccattatacaccgtcttatttcattaatttccatattgtgccagacaagatataaaaataattcaactccagncaataatnccatctgtcttcatgtgaccagaataannagcttctgctcccaanatggaagccacagtaa

SEQ ID NO: 9151 - DNA, 446 bp, Homo sapiens
  misc_feature (105)..(105): "n" may be a, t, c, g, other or unknown
  misc_feature (298)..(298): "n" may be a, t, c, g, other or unknown
  misc_feature (316)..(316): "n" may be a, t, c, g, other or unknown
  misc_feature (383)..(383): "n" may be a, t, c, g, other or unknown
  misc_feature (386)..(386): "n" may be a, t, c, g, other or unknown
  misc_feature (392)..(392): "n" may be a, t, c, g, other or unknown
  misc_feature (429)..(429): "n" may be a, t, c, g, other or unknown
  misc_feature (445)..(445): "n" may be a, t, c, g, other or unknown
gtgaaagggtgttgaattttgttaaatacttttcctgtgcctaatgaagtgatcttgtaaattgtaatttaatcttatctattctcatgtccaaacactcaaganaaaactataaggaactatatttacaaaataaatcataactttacaaaaagggcataaaatagcattttggcaaaaacttaacttaggtaatctgaaggtatctaactgtatcaattttaaaaatataaaaatatagctttatgacgaaattttttctgattaaaaaagtaaaacttcatttgctggttataanacaatatgttcatttaanaaaaaagtggacatcctgggctaacatggtgaaaccccgtctctactgaaaaatacaaaaaatttanccnggcgtngtggcgggtgcctgtatcccacctacttgggaagctnaagcaggaaaattgcnt

SEQ ID NO: 9152 - DNA, 406 bp, Homo sapiens
  misc_feature (334)..(334): "n" may be a, t, c, g, other or unknown
  misc_feature (366)..(366): "n" may be a, t, c, g, other or unknown
  misc_feature (402)..(402): "n" may be a, t, c, g, other or unknown
aattgcacatctgttcacagaggttggcaaaagacactggaagtgattgtgaaatccacattgtgattcctcaggaatcagatcctagaagggggtgcccagagctgtcggcacaccgtcccaggagtctgcctgtgcagctcccagccaggcaagaagccctgaaggcagagtcccaggtggacacagctggacgcctctctgacaatggtggctctggtggtgaacccctcggtgtctcttctgcacctctcaaggctgcaaagtgccaaatactcttttccaaccagctcccgaattcccccctccatctgggactgcatgtcctgcttancgatttcaagcaatgatttcaccttttcatanacaaggacattgtcctcatcagggcttgcaccatcnctct

SEQ ID NO: 9153 - DNA, 550 bp, Homo sapiens
  misc_feature (209)..(209): "n" may be a, t, c, g, other or unknown
  misc_feature (278)..(278): "n" may be a, t, c, g, other or unknown
  misc_feature (426)..(426): "n" may be a, t, c, g, other or unknown
  misc_feature (456)..(456): "n" may be a, t, c, g, other or unknown
  misc_feature (467)..(467): "n" may be a, t, c, g, other or unknown
  misc_feature (523)..(523): "n" may be a, t, c, g, other or unknown
  misc_feature (537)..(537): "n" may be a, t, c, g, other or unknown
  misc_feature (546)..(546): "n" may be a, t, c, g, other or unknown
gtatagctttcaggaagcaggaagacttttctctttttaaatgatagaacataaatactgaaacaatgacattggaacatctatccattcttgtttcggtggaaagtctatctaattcagcttctggaccgactgttcgtttttccatgatctcttcctgcaggtttgctagaagtccctttccccccataaacaccttcctttggganatttgggtgccttccttttttaaggttttaaaaactaaaatgatttatagactatccgtatcctgtcanagttgggcaagtgaatggatcatatttgcgtgggtcactctgattataggacttcactgtttcttgaactaaaagtgcaagatttattattctattaatgctcataaagtcactcttttgatgagccataacttctctttatgaagantgtgtatgccagtcacctatgataaggganaaaaaatccanacttctaacatattccctcacattccctgcaacattaacagtcttgaaaccctatntaatcccagggganaatgccccnggat

SEQ ID NO: 9154 - DNA, 401 bp, Homo sapiens
  misc_feature (172)..(172): "n" may be a, t, c, g, other or unknown
  misc_feature (273)..(273): "n" may be a, t, c, g, other or unknown
  misc_feature (358)..(358): "n" may be a, t, c, g, other or unknown
  misc_feature (366)..(367): "n" may be a, t, c, g, other or unknown
  misc_feature (371)..(371): "n" may be a, t, c, g, other or unknown
  misc_feature (387)..(387): "n" may be a, t, c, g, other or unknown
cagcacaatatttcatttatttattgtataagtttggcaaacagcacaaaaatccagcaacatttaaaacatataaaaaagtcaaatgctaaacaggactagggatttttttttacatcattagaaataacgagtacacattttaagattctgcaaagctagcaaaatgaanatgcttgccttctgaacatatactacaaacacacatacaaaaaaacaatataatttatctttacaaaaattacagccaagcaatagaaaagaaggatgttnatgatgaagatagcaacacatatgtttagtacatatatcttacacattgaaatgctacatcttataccctgaaatgccatgtgtntagagccnngcanagtaaatttaggctcnttactggaggttaa

SEQ ID NO: 9155 - DNA, 581 bp, Homo sapiens
  misc_feature (64)..(64): "n" may be a, t, c, g, other or unknown
  misc_feature (398)..(398): "n" may be a, t, c, g, other or unknown
  misc_feature (440)..(440): "n" may be a, t, c, g, other or unknown
  misc_feature (535)..(535): "n" may be a, t, c, g, other or unknown
  misc_feature (537)..(537): "n" may be a, t, c, g, other or unknown
  misc_feature (560)..(560): "n" may be a, t, c, g, other or unknown
  misc_feature (570)..(570): "n" may be a, t, c, g, other or unknown
  misc_feature (581)..(581): "n" may be a, t, c, g, other or unknown
ctagcaaagtggtttattctttcaacttattgctggaagaagtcctttaaacaaaccagtgcanagaaaatgcctatcaaaagtatcagtttttcagctttcttcaccactgctttagatgtatcatttttataattttatctcttcatgtttttaaagagctgctacttcagatgacagtaactctttggtgtttatttttatttccaagattgtgatttttttaagaggctactttaaggctgtgaattgtctcactgtcttttcactctctctttttagttcttcaatatgggcatccaagcgctctagaatgtgatgagacctcagttcctcctcttccaaaaatctggtagctattgaaccaaggggagatacaggcaaggaacactcatgtnaacccaattccaatttcatcaccatttcagaaagatgacgantttctaatttgagtgacccagctgatccaaaatctccttatgctctactgctttgtcttctgccttttgctctctgctctgaatccctttccctntntgaagaaaaacctttggtggaanccatattganatccccccgan

SEQ ID NO: 9156 - DNA, 435 bp, Homo sapiens
  misc_feature (21)..(21): "n" may be a, t, c, g, other or unknown
  misc_feature (23)..(23): "n" may be a, t, c, g, other or unknown
  misc_feature (82)..(82): "n" may be a, t, c, g, other or unknown
  misc_feature (84)..(84): "n" may be a, t, c, g, other or unknown
  misc_feature (112)..(112): "n" may be a, t, c, g, other or unknown
  misc_feature (160)..(160): "n" may be a, t, c, g, other or unknown
  misc_feature (194)..(194): "n" may be a, t, c, g, other or unknown
  misc_feature (277)..(277): "n" may be a, t, c, g, other or unknown
  misc_feature (386)..(386): "n" may be a, t, c, g, other or unknown
  misc_feature (397)..(397): "n" may be a, t, c, g, other or unknown
  misc_feature (415)..(415): "n" may be a, t, c, g, other or unknown
  misc_feature (422)..(422): "n" may be a, t, c, g, other or unknown
  misc_feature (435)..(435): "n" may be a, t, c, g, other or unknown
ctcattgtgaaagattttctntntattatcaaatctctgctatagaaacactgaaaaaaatgggaaaaaaaatcactggganangcagcataaaatggtggctgaaaacaanaactctgggagccaatctcagctctactcccttactagttgtgccccntaggtaggatccttcaacatctctgcttcaactnagccatttgtaaaactggggtaacagtacctatctcagagtaaaggggactaaacaagttaacacttggaaagcatttaaaanaaagcccagcacataagtgttatatgtatttgtaaaactttttaaaaatctcaactgggttaacttttccatggatctttcaggtccttacccatatacatttttttanatgtgttacantaagtatgtatatacaantctgtancctttttattccn

SEQ ID NO: 9157 - DNA, 512 bp, Homo sapiens
  misc_feature (183)..(183): "n" may be a, t, c, g, other or unknown
  misc_feature (260)..(260): "n" may be a, t, c, g, other or unknown
  misc_feature (281)..(281): "n" may be a, t, c, g, other or unknown
  misc_feature (294)..(294): "n" may be a, t, c, g, other or unknown
  misc_feature (304)..(304): "n" may be a, t, c, g, other or unknown
  misc_feature (416)..(416): "n" may be a, t, c, g, other or unknown
  misc_feature (430)..(430): "n" may be a, t, c, g, other or unknown
  misc_feature (456)..(456): "n" may be a, t, c, g, other or unknown
  misc_feature (463)..(463): "n" may be a, t, c, g, other or unknown
  misc_feature (477)..(477): "n" may be a, t, c, g, other or unknown
aagatggagtttcgctcttgttgcccaggttggagtgcaatggcgcgatcttggcttactgcaacctctgccttgcagttcaagcaattctactgcctcagcctctcaagtagctgggactatagacattcaccaccacacccagctaattttttgtatttttagaaaattttgtatatttanaaaaggtttcaccatgttggccaggctggtcttgcactcctgacctcaggtgatccgcccacctcagcctcccaaantgctgggattacaggcctganccactgtgcccanccctcaagtnactcttaaacctactgaagttagacaatcaataactgaaatgacatcatctttcttgaatgtttaaggaaataaaattccttcttctgacaaactttaaatgtgttcttganttccttgcctcccncttcctctgggaattttcttccctanctgctcnctttcattatcaanaaaatattcccctccccccttttaccttataccta

SEQ ID NO: 9158 - DNA, 468 bp, Homo sapiens
  misc_feature (98)..(98): "n" may be a, t, c, g, other or unknown
  misc_feature (184)..(184): "n" may be a, t, c, g, other or unknown
  misc_feature (215)..(215): "n" may be a, t, c, g, other or unknown
  misc_feature (372)..(372): "n" may be a, t, c, g, other or unknown
  misc_feature (375)..(375): "n" may be a, t, c, g, other or unknown
  misc_feature (377)..(377): "n" may be a, t, c, g, other or unknown
  misc_feature (451)..(451): "n" may be a, t, c, g, other or unknown
  misc_feature (455)..(455): "n" may be a, t, c, g, other or unknown
cataggtaaaatttttatttatgaatgtgtggacacatgactttggatccagccagccagtgacataaataaacttgagcaaaagtttcaagctagangatatatatgtatagaaaattatatatttgtgtgtgtgtgtaaggcctcttggaacagtgccacaaacctggacaccaaccaacanaatcctcccgtcctttgaaatttccattaanagcacaatgggggtaattataccaggatgctccaatcgctctttccatcttgtgcactcacatgcccgccaaacatgaaatgttcgcctgctcccttccaatgtgatggttgttgaacttatctttagtgtcatttgataagcctttgtgctcacanaananacatcccactgacccagccactggtcattgtctataccagttcacatcaaagcaggcgcctttgtcaggttccnctcnaatatccattccc

SEQ ID NO: 9159 - DNA, 223 bp, Homo sapiens
  misc_feature (29)..(29): "n" may be a, t, c, g, other or unknown
  misc_feature (60)..(60): "n" may be a, t, c, g, other or unknown
  misc_feature (80)..(80): "n" may be a, t, c, g, other or unknown
  misc_feature (94)..(94): "n" may be a, t, c, g, other or unknown
  misc_feature (155)..(155): "n" may be a, t, c, g, other or unknown
  misc_feature (164)..(164): "n" may be a, t, c, g, other or unknown
  misc_feature (186)..(186): "n" may be a, t, c, g, other or unknown
  misc_feature (193)..(193): "n" may be a, t, c, g, other or unknown
  misc_feature (206)..(206): "n" may be a, t, c, g, other or unknown
ggtaactgcttctttactactttgatgtnaaaaagtgttagcttgctacctaaagtaagntttttggctaatcagcaaantccatttccaaggncttcaagtatgatctggccaacaccacagaagatgaaaagcagaatcccacggttttgganttggtgcancggaaactacatgaactcggantcaggangtccagggtctancactcatctactcctga

SEQ ID NO: 9160 - DNA, 330 bp, Homo sapiens
  misc_feature (100)..(100): "n" may be a, t, c, g, other or unknown
  misc_feature (241)..(241): "n" may be a, t, c, g, other or unknown
  misc_feature (257)..(257): "n" may be a, t, c, g, other or unknown
  misc_feature (259)..(259): "n" may be a, t, c, g, other or unknown
  misc_feature (314)..(314): "n" may be a, t, c, g, other or unknown
  misc_feature (326)..(326): "n" may be a, t, c, g, other or unknown
gttttctactgaaacttattatttgccattaagaattgcaaactatactactaagaatgaacaacattctcttcattaagcctttttcaaaacacacganacaaagctcccctttggtcaaggtgtcccacacattaccactgcagctcccagcacagcggcgcaccatgaactcggacgtggagcccaaggaatggagatcgcaccagccttccctgcttccccaccccaactacacccnagggagaaaggatacnangaaataccctatgtcttcaatgcttggggggctgggggtgtcctctgctaccaantgggccggtcantgcc

SEQ ID NO: 9161 - DNA, 517 bp, Homo sapiens
  misc_feature (41)..(41): "n" may be a, t, c, g, other or unknown
  misc_feature (54)..(54): "n" may be a, t, c, g, other or unknown
  misc_feature (232)..(232): "n" may be a, t, c, g, other or unknown
  misc_feature (287)..(287): "n" may be a, t, c, g, other or unknown
  misc_feature (289)..(289): "n" may be a, t, c, g, other or unknown
  misc_feature (313)..(313): "n" may be a, t, c, g, other or unknown
  misc_feature (441)..(441): "n" may be a, t, c, g, other or unknown
  misc_feature (447)..(447): "n" may be a, t, c, g, other or unknown
  misc_feature (495)..(495): "n" may be a, t, c, g, other or unknown
  misc_feature (508)..(508): "n" may be a, t, c, g, other or unknown
  misc_feature (517)..(517): "n" may be a, t, c, g, other or unknown
gaagtccaacctggccatcgctttatatttctgcataaganaagcacagttganatgctggcttctggcttcatacctgtgctaaagcaaggcttcttttttccttatgttacttttttgagacaaggtctcactctgtgacccaggatggagtgtggccacacaatcatagctcactgcaaccttgatttcccaagctcaagtaatcgtcctgcctcagcctcccgagtanctgggattacaggcgcacaccaccaggcctgactcttttttttttcctccggtananatggggtctccccatgttgtccanactggtttcaaactcctgagctcaatgatcttcctgcctcggcctcccaaagtgctgggatttcaggtgtgagccaccatccccggaacttttcttttcaaaacatacattaaaatggaaatgaatangaacanccagtggctgtgatgcaccaaaacccctgtctggaaacatgcgtctangttatcttccccnctttgccan

SEQ ID NO: 9162 - DNA, 599 bp, Homo sapiens
  misc_feature (158)..(158): "n" may be a, t, c, g, other or unknown
  misc_feature (171)..(171): "n" may be a, t, c, g, other or unknown
  misc_feature (263)..(263): "n" may be a, t, c, g, other or unknown
  misc_feature (404)..(404): "n" may be a, t, c, g, other or unknown
  misc_feature (406)..(406): "n" may be a, t, c, g, other or unknown
  misc_feature (425)..(425): "n" may be a, t, c, g, other or unknown
  misc_feature (535)..(535): "n" may be a, t, c, g, other or unknown
  misc_feature (549)..(549): "n" may be a, t, c, g, other or unknown
  misc_feature (573)..(573): "n" may be a, t, c, g, other or unknown
aagattttatgtaatgtttatttttttaattcccatcctaactttggctttaatccttacctctcatttccattcttttctttgaaatccaattaaaaaaaaaaaaaaaaaaacaaagtgtttaaaatcacaattatctaaagtcataataaaatttncttgtctccaaanagggggaaaacacaccacttttatttttatgcagcattttcaaatatgcatgtcaatatatattttataaactatttaaaataaaaaccctncatcctttgaggttattgacattttctagttcactgacacatctcccataatacaatagttctattcattttcatgaatgaggtgggaactacactaaaaagtaggattttaatccctgaggtgccagttaaaatgggacnangttgcccttgcaacacaanattttaaaaatcagccttaaataataagcatggatcatgctatttgaatcaaaatccctcccatagcatgaaatcctttaggaaatggcatttattgggttaattcaccngctattcccacccncagctataagatcttcctttggcnaggaataccccaaccaggaattttct

SEQ ID NO: 9163 - DNA, 480 bp, Homo sapiens
  misc_feature (260)..(260): "n" may be a, t, c, g, other or unknown
  misc_feature (267)..(267): "n" may be a, t, c, g, other or unknown
  misc_feature (270)..(271): "n" may be a, t, c, g, other or unknown
  misc_feature (302)..(302): "n" may be a, t, c, g, other or unknown
  misc_feature (402)..(402): "n" may be a, t, c, g, other or unknown
  misc_feature (421)..(421): "n" may be a, t, c, g, other or unknown
  misc_feature (444)..(444): "n" may be a, t, c, g, other or unknown
  misc_feature (464)..(464): "n" may be a, t, c, g, other or unknown
  misc_feature (471)..(471): "n" may be a, t, c, g, other or unknown
aagatggagtctcactctgtcacccaggctgaagtgcagtggcatgatctctgctcactgcaacctctgcctcctgggttcaagcgattctcctgcctcagccccccgagtagctgggattacaggcacgtgccaccatgcccggctaatttttttgtatttttagtaaagatggggtctcaccatattggtcaggctggtcttgaactcctgacctcgtgatctgcccgcctcagcctcccaaagtgctgggattatangcataanccnnccatgcctggcctaaaaaactttgttttctngaccatacttatcatggctccttgtatacaaaaaaatcttgggctcagttaaacatttatggtcttttatgttaccaagtactgaaactgggtgaacacnagccacaaattcctgaatnctgttccttggtgataatggaanccaaaaatctccaaaaatcntttttanaaattgcta

SEQ ID NO: 9164 - DNA, 204 bp, Homo sapiens
  misc_feature (76)..(76): "n" may be a, t, c, g, other or unknown
  misc_feature (142)..(142): "n" may be a, t, c, g, other or unknown
  misc_feature (160)..(160): "n" may be a, t, c, g, other or unknown
  misc_feature (184)..(184): "n" may be a, t, c, g, other or unknown
  misc_feature (189)..(189): "n" may be a, t, c, g, other or unknown
  misc_feature (203)..(203): "n" may be a, t, c, g, other or unknown
catattggttgttttgtggtggtaattgagctgggaaaaattcaaaattgggtcataattaatggtaactaaacanatttgtgaatatgggacatctgtggtcttgaaaacatcagtatgatttgtccccatatttcttcancctggacaataaaaacanacaggggaggggggtaaagtgcantaaantacgttgagtgatnt

SEQ ID NO: 9165 - DNA, 376 bp, Homo sapiens
  misc_feature (172)..(172): "n" may be a, t, c, g, other or unknown
  misc_feature (212)..(212): "n" may be a, t, c, g, other or unknown
  misc_feature (296)..(296): "n" may be a, t, c, g, other or unknown
  misc_feature (299)..(299): "n" may be a, t, c, g, other or unknown
  misc_feature (329)..(329): "n" may be a, t, c, g, other or unknown
  misc_feature (331)..(331): "n" may be a, t, c, g, other or unknown
  misc_feature (364)..(364): "n" may be a, t, c, g, other or unknown
cacgttttatagtccttttatttgaaattcagtgtaaatcactcttaaactataaattcacagttgttggaggtttttttttactttaaatgatgtgaaagcatttgttccattcaaaggcccctatgcctttgaatgacatattctcagtaacttctttgccagtaactanagtatgtgagactgagtaactataatgtgcatatttcaanaattagcttcccgctgcattataacacatttcctaggaaagcctttgtatttttcatagccttttcacatatccctcatttaanaantcacagtgttgcagttttactttgtttcanangggaaggccatcttgttggcataagggggacanaaaatataatat

SEQ ID NO: 9166 - DNA, 356 bp, Homo sapiens
  misc_feature (4)..(4): "n" may be a, t, c, g, other or unknown
  misc_feature (143)..(143): "n" may be a, t, c, g, other or unknown
  misc_feature (153)..(153): "n" may be a, t, c, g, other or unknown
  misc_feature (310)..(310): "n" may be a, t, c, g, other or unknown
  misc_feature (314)..(314): "n" may be a, t, c, g, other or unknown
  misc_feature (319)..(319): "n" may be a, t, c, g, other or unknown
  misc_feature (336)..(336): "n" may be a, t, c, g, other or unknown
  misc_feature (350)..(350): "n" may be a, t, c, g, other or unknown
gtanatgatggggtcttaccatattgcccatgctggtgtcaaactcctgggctcaagcaatcctcccacctcagcgtcccgagtagctgggaccacaggcacccaccaccatgccacactaaaattttttttttggggggganggtaaaaaangggtcttaccatgttgcccaggctggtgtcaaactcctgggctcaagcgatcctcccacctcagcctcccgacatgtaaacggtggctacatttccgcacaatccccgcggtctccctcattctgttttacaactactcccacataaagtaacgtanaaanacaanccccgttattcccttanaaagtagactggancttgca

SEQ ID NO: 9167 - DNA, 473 bp, Homo sapiens
  misc_feature (367)..(367): "n" may be a, t, c, g, other or unknown
  misc_feature (388)..(388): "n" may be a, t, c, g, other or unknown
  misc_feature (440)..(440): "n" may be a, t, c, g, other or unknown
  misc_feature (461)..(461): "n" may be a, t, c, g, other or unknown
  misc_feature (464)..(464): "n" may be a, t, c, g, other or unknown
  misc_feature (468)..(468): "n" may be a, t, c, g, other or unknown
acattagtatttacatttatttaacgtatgcagtttacacactcattattaaacaaaattgggaatgcaaacaaatatacaaataccataagcattatcaaataaaataactggcactagtgttataagcatattaatggacctgggtaaggaaaagtgatggaagaagactgcagcccatggcatttttctttttaccaaaagaaaacgctcagtagcaccataatggtaatacttaaaagaaatacataagatagaacattttaactgctatcattgaggttaacctgcttttatttaagtgaattatacaggaaattaacagtacaggcagtattttggccaacttctgcttatgtcagctgancattgtccataaacaaaagcnaaagaaaataatgctaatcatacatggaacttttgttcttgggtacaattcngccccctgccttgaattcctnggntggnaaaaa

SEQ ID NO: 9168 - DNA, 452 bp, Homo sapiens
  misc_feature (174)..(174): "n" may be a, t, c, g, other or unknown
  misc_feature (365)..(365): "n" may be a, t, c, g, other or unknown
  misc_feature (409)..(409): "n" may be a, t, c, g, other or unknown
  misc_feature (417)..(417): "n" may be a, t, c, g, other or unknown
  misc_feature (442)..(442): "n" may be a, t, c, g, other or unknown
  misc_feature (447)..(447): "n" may be a, t, c, g, other or unknown
aaatagacagggtcttgctctgttgcccagactggagtgcaatggtggaatcatagctcactgcagcctcaaactcctgggctcaaatgatgcttccacatctgcctcccaaagtgttgggattacaggcgtgagccaccacacgtatccggatccagtgcggttttaatgtancataagagttgaacactgattaaaacctttttcatactcatcaataatcaacagcattcattagatttttttctggtacagtgtctctggtactgaatagagttggtgtacacactaaaggttttctcacattcatcacattttgactgtcttctccacaatggacttcctcatgaatagtaagttcaganagttggctacaacttctgctgcactgaacacactggtagggttnctcctcancatgggttttctggtgttcaataanatcantacat

SEQ ID NO: 9169 - DNA, 439 bp, Homo sapiens
  misc_feature (86)..(86): "n" may be a, t, c, g, other or unknown
  misc_feature (419)..(420): "n" may be a, t, c, g, other or unknown
  misc_feature (436)..(436): "n" may be a, t, c, g, other or unknown
aaaatggggaaggtttattaaggtttttcctcaagaggaacagccaatctcttgcttcttgagagaagcaattaatgggaaatgtntgtcacaccttgggcccagaaccacaggaggccgcttctcagcatgcccaacgaacatacatcatccccaattcccatttaaagctcattaatgtctacaaaacagaatccacgttgccttcccagaaaacagaactaggaacccagtcaaagcctccagctgttctcaacaagaatatttaagcaagacagggcaataaatggactgcacattcaacaaacccatgatgaaactgcagtaaaatccaggatcaaagaaatgtctggactacattttcaagaataacttacagtttttacattttggggaacataaatactaaaaactgggtnnttagaacgcctcaaanctc

SEQ ID NO: 9170 - DNA, 513 bp, Homo sapiens
  misc_feature (168)..(168): "n" may be a, t, c, g, other or unknown
  misc_feature (256)..(256): "n" may be a, t, c, g, other or unknown
  misc_feature (301)..(301): "n" may be a, t, c, g, other or unknown
  misc_feature (353)..(353): "n" may be a, t, c, g, other or unknown
  misc_feature (375)..(375): "n" may be a, t, c, g, other or unknown
  misc_feature (449)..(449): "n" may be a, t, c, g, other or unknown
  misc_feature (474)..(474): "n" may be a, t, c, g, other or unknown
  misc_feature (476)..(476): "n" may be a, t, c, g, other or unknown
  misc_feature (489)..(489): "n" may be a, t, c, g, other or unknown
  misc_feature (501)..(501): "n" may be a, t, c, g, other or unknown
gagatggagttttgctcgttgcccaggctggagtgcaatggcgcgatctcggctcactgcaacctctgcctcccaggttcaagcaattctcctgcctcagcctcccaagtagctgggattacaggggcccgccaccatgcccgactaatttttgtatttttagtaaanacggggtttcaccatggctggtctcgaactcctgacctcgtgatccacccgcctcggcctcccaaagtgctgggattacaggcatganccactgcgcccggccactaatccatattacaaaattaaagcctcnaaattaacgttttatctcaattatagtcattctgttgcaaggaacttttaanaacaatgttggttaccaatgtnaccaaataaatgcaacttaagtttaaattacccaagtggttaccaactgataacttaaattaaggctgaaggtnaccgaaaaaataaaaattaattccncntcctaaaccggtntttaaaattccnaaagccaccaaa

SEQ ID NO: 9171 - DNA, 497 bp, Homo sapiens
  misc_feature (407)..(407): "n" may be a, t, c, g, other or unknown
  misc_feature (472)..(472): "n" may be a, t, c, g, other or unknown
  misc_feature (486)..(486): "n" may be a, t, c, g, other or unknown
  misc_feature (492)..(492): "n" may be a, t, c, g, other or unknown
  misc_feature (495)..(495): "n" may be a, t, c, g, other or unknown
acagttaaagaaaaaggtgtttatttaggccatcaactaggatcataataaataacgtaatatactaatgtaataacagatcttctcatgcatttatcgtgtttataaatatagaagaaagctggcttacagggctgttgggacaaatttggaaaagtgtatttggcaattacacagtaaaagttaacagtgttgactatcagattctcttttctgtcagtttttagaatacatcccctatacatctgtgaataaatggtaatggtctcttagagtttctactttttgtgaacatgccagagttaagtaaattgtcaaaggatccaggttgacaatgtgttatttgtcaatatttctaatgaaaaacagatcttagaaaaatgaactcttctgcatttcattggtanaggctgatatattacaagccggaatcattcaacaataaaaaaagtcctccatgaaataaaacccnaaaattatttatcnataatnacngt

SEQ ID NO: 9172 - DNA, 525 bp, Homo sapiens
  misc_feature (9)..(9): "n" may be a, t, c, g, other or unknown
  misc_feature (114)..(114): "n" may be a, t, c, g, other or unknown
  misc_feature (119)..(119): "n" may be a, t, c, g, other or unknown
  misc_feature (159)..(159): "n" may be a, t, c, g, other or unknown
  misc_feature (171)..(171): "n" may be a, t, c, g, other or unknown
  misc_feature (342)..(342): "n" may be a, t, c, g, other or unknown
  misc_feature (362)..(362): "n" may be a, t, c, g, other or unknown
  misc_feature (391)..(391): "n" may be a, t, c, g, other or unknown
  misc_feature (468)..(468): "n" may be a, t, c, g, other or unknown
  misc_feature (472)..(472): "n" may be a, t, c, g, other or unknown
  misc_feature (485)..(485): "n" may be a, t, c, g, other or unknown
  misc_feature (508)..(508): "n" may be a, t, c, g, other or unknown
  misc_feature (514)..(514): "n" may be a, t, c, g, other or unknown
gagacaganttttgctcttgttgcccaggctagaatgcaatggcatgatctcggctcattgcaacatctgcctcctgggttcaagcgattctcctgccttagcctcctgagtanctganactacaggcgcccgccacaacgcctggctaattttttgtncttttagtaaanatggggcttcaccgtgttggccaggctggtctcgaacttctgacctcaggtgatccacccgcctcggcctcccaaagtgctgggattacaggcgttagccacggcgcccggccaagaattttcatatgataggatgaggcatgactctttcaagtattaacaacgctgcanaaagtgagttggcagcacanttgctcccagtgagacattggctctttangggttttttgtatttaaattgaactgcacaaaatgaaacggggccttgccaaaaaatcctggtgcttgctccattcnccantggggggccgtcnctgcttttgtcttcaaaaacctnggacancctattccccc

SEQ ID NO: 9173 - DNA, 425 bp, Homo sapiens
  misc_feature (51)..(51): "n" may be a, t, c, g, other or unknown
  misc_feature (53)..(53): "n" may be a, t, c, g, other or unknown
  misc_feature (127)..(127): "n" may be a, t, c, g, other or unknown
  misc_feature (197)..(197): "n" may be a, t, c, g, other or unknown
  misc_feature (229)..(229): "n" may be a, t, c, g, other or unknown
  misc_feature (352)..(352): "n" may be a, t, c, g, other or unknown
  misc_feature (373)..(373): "n" may be a, t, c, g, other or unknown
  misc_feature (379)..(379): "n" may be a, t, c, g, other or unknown
  misc_feature (402)..(402): "n" may be a, t, c, g, other or unknown
  misc_feature (421)..(421): "n" may be a, t, c, g, other or unknown
ggcagttgaaaaaaatatatttatttcaatttgtggtaaaagtttattgananccaagtttgcctgcaagtgaaaaaaatgcagcaacgaaaaacagggaacacggggcacataataatattctaanactttgtgccattaagttaaaaatatctgttcataaaaaaattgggttccttttccacctcccacccccnaattggaattttcaggctttaaaatttaagtnattcccctggtctgaggatatgatctcttgccattttttcttcaactgttacttgtgagggtttaatttggaaatgataacttaataggtttctctttggagtgaaatttcccattgtaggcnctaggaaaaacaaggcaaaanctgcanttagcgtctcattttcccatttnaaaactctctcgggccctnaccc

SEQ ID NO: 9174 - DNA, 533 bp, Homo sapiens
  misc_feature (81)..(81): "n" may be a, t, c, g, other or unknown
  misc_feature (243)..(243): "n" may be a, t, c, g, other or unknown
  misc_feature (390)..(390): "n" may be a, t, c, g, other or unknown
  misc_feature (428)..(428): "n" may be a, t, c, g, other or unknown
  misc_feature (443)..(443): "n" may be a, t, c, g, other or unknown
  misc_feature (483)..(483): "n" may be a, t, c, g, other or unknown
  misc_feature (491)..(491): "n" may be a, t, c, g, other or unknown
  misc_feature (495)..(495): "n" may be a, t, c, g, other or unknown
  misc_feature (529)..(529): "n" may be a, t, c, g, other or unknown
gcaaaaaaaatcttttattggcatgaaaataatgttgtaaatggcaccaaatattccacttaaatgcatatacagtattanagtcaaaaactattttatccctctttgctgtttttcccccttctgcccactttcctgggtgttgggggggcccgctgacaacagtcacaaatccagcgacctgatggaatagcaccaaggcccacacaaaaagtatgataacctctgtcacacatatcacanaacatcatttcttcttcatggtggggttgtccacatataatgcatgttttacattccatacactgccatgggtaggtcttaatcataaaaacaagctccattgtcatatccaggcaagaaagatggccactattctcacattgggancagtgtataagtgattcacctttcctttcttgttggantccttaccttcaaanaaattccacatatacatttggaatgaactttggcttgttnccaagaantganttggaaaattccaaactttgggaacactttcttngaat

SEQ ID NO: 9175 - DNA, 456 bp, Homo sapiens
  misc_feature (147)..(147): "n" may be a, t, c, g, other or unknown
  misc_feature (289)..(289): "n" may be a, t, c, g, other or unknown
  misc_feature (342)..(342): "n" may be a, t, c, g, other or unknown
  misc_feature (384)..(384): "n" may be a, t, c, g, other or unknown
  misc_feature (394)..(394): "n" may be a, t, c, g, other or unknown
  misc_feature (411)..(411): "n" may be a, t, c, g, other or unknown
  misc_feature (436)..(436): "n" may be a, t, c, g, other or unknown
  misc_feature (452)..(452): "n" may be a, t, c, g, other or unknown
atattttcatttttcatcctaatttactgaagccattttctttggttagctttagaattatctttctttatactaaccagcttagcatgtaataattcttgcccatgtgactacaaaacattagatatctccacaaataaaaacganattcacctacacaaatattccttctctttaagttcacaaaatgcaagaagaaaagaaaaatgatgttaggttgtcagtaaggaaagcatttctagatgagaaaaagaaacttaagtgttatttcccccctacagttttgaanacccggctgaacacagcataaaaattgtcaggaacagtgcattctctttacantatgaagtgaactaaggggttgggttggttcaattctggcancccattccanaaaaaaaaccctccaanttgacagtgccttttgtccgtttangggatggcaacacctnctcc

SEQ ID NO: 9176 - DNA, 382 bp, Homo sapiens
  misc_feature (137)..(137): "n" may be a, t, c, g, other or unknown
  misc_feature (179)..(179): "n" may be a, t, c, g, other or unknown
  misc_feature (239)..(239): "n" may be a, t, c, g, other or unknown
  misc_feature (284)..(284): "n" may be a, t, c, g, other or unknown
  misc_feature (321)..(321): "n" may be a, t, c, g, other or unknown
  misc_feature (323)..(323): "n" may be a, t, c, g, other or unknown
  misc_feature (331)..(331): "n" may be a, t, c, g, other or unknown
  misc_feature (358)..(358): "n" may be a, t, c, g, other or unknown
gagacttaactggtttaattgcttagccctggtgcctcagccacctctcatctgtagggtgagactcaagtccaggcaccaagacacaccagcacccccaacaccatgcggggatcattggcctgaaacttggccanaaaaagctccagtcctgggcctgtaaaaatgggcgctgggantgtctgaagccggcacggtgtcccctgcgttgtcggcccttgcaggtgaagtgtgtgtcnttcccccactttcccccgaatggcacccacggcctcctgctggancccctcccgggcccccctcagggaacaaaactctgcntntgttcaangttcaacctggccacctggaactccanctcaccctgggggtgtggatggat

SEQ ID NO: 9177 - DNA, 473 bp, Homo sapiens
  misc_feature (73)..(73): "n" may be a, t, c, g, other or unknown
  misc_feature (302)..(302): "n" may be a, t, c, g, other or unknown
  misc_feature (345)..(345): "n" may be a, t, c, g, other or unknown
  misc_feature (440)..(440): "n" may be a, t, c, g, other or unknown
  misc_feature (454)..(454): "n" may be a, t, c, g, other or unknown
  misc_feature (459)..(459): "n" may be a, t, c, g, other or unknown
  misc_feature (461)..(461): "n" may be a, t, c, g, other or unknown
  misc_feature (463)..(463): "n" may be a, t, c, g, other or unknown
gaaaatttatttcacatttattactagtcacataatcctcaaaaatctaagttcacaaatgatcatcacatgnagccctcttctccatatacacatttgttagtgtgaaaaaacaattttgtacagtattttagtagttacatgattagcaagcaacagagaagtagtgaaagctgaagaactccaaatgcattgctcataggacaaccactcaaacacaagcagctaggcaataaaggaaaatttcccatccagtcattgagaaatgctaaaggcattttatggtgacatgaatgcttaanttagtatgcaacctatagggcaaataaaactgctatataggtnggtaattttgcatttaaatatttgttagtatggtactacccatttatctaacatttaataatacataaaattttaattctgggttctcaaaacanttgcttggtatttnggtanantntctgttatac

SEQ ID NO: 9178 - DNA, 354 bp, Homo sapiens
  misc_feature (275)..(275): "n" may be a, t, c, g, other or unknown
  misc_feature (334)..(334): "n" may be a, t, c, g, other or unknown
  misc_feature (337)..(338): "n" may be a, t, c, g, other or unknown
  misc_feature (346)..(346): "n" may be a, t, c, g, other or unknown
aatgacaagaattgcacagtttattattttgagacaattgttgcagacataaatatttaaaattttctaagcaaggtgcttttaacaaaatttttaaagttggaaagagctgataacttggatcatagctcacacagaattccaaattaaagtggactccattatctccctatattttgcaaacaatgctttgtataacacttctttaaaacactaaaagagacagcaagctgaaacttttttcaaagcacacaagaaatgtttacttgaaaaangtgctgaggggagaagggagtgaaaaatccttttactatttcccactacaggacagccnctnncagactangaacaagg

SEQ ID NO: 9179 - DNA, 242 bp, Homo sapiens
  misc_feature (49)..(49): "n" may be a, t, c, g, other or unknown
  misc_feature (65)..(65): "n" may be a, t, c, g, other or unknown
  misc_feature (85)..(85): "n" may be a, t, c, g, other or unknown
  misc_feature (93)..(94): "n" may be a, t, c, g, other or unknown
  misc_feature (167)..(167): "n" may be a, t, c, g, other or unknown
  misc_feature (178)..(178): "n" may be a, t, c, g, other or unknown
  misc_feature (236)..(236): "n" may be a, t, c, g, other or unknown
  misc_feature (238)..(238): "n" may be a, t, c, g, other or unknown
  misc_feature (241)..(241): "n" may be a, t, c, g, other or unknown
ctgtagcaatgaaaatttttaatttgaataaaaatcacgtaagcatgangttgttggggaacacngaaaggaaggctcaaattanggggtgtnncacatttatcaggaggtaagatctccatagtctcctacccctcctgggcctggccttttactgtggtatccancctctgggaanaccttgtatggacagtatctccactggggctatcactaggtgaccaggtaggggacanantana

SEQ ID NO: 9180 - DNA, 348 bp, Homo sapiens
  misc_feature (53)..(53): "n" may be a, t, c, g, other or unknown
  misc_feature (117)..(117): "n" may be a, t, c, g, other or unknown
  misc_feature (123)..(123): "n" may be a, t, c, g, other or unknown
  misc_feature (125)..(125): "n" may be a, t, c, g, other or unknown
  misc_feature (157)..(157): "n" may be a, t, c, g, other or unknown
  misc_feature (293)..(293): "n" may be a, t, c, g, other or unknown
  misc_feature (311)..(311): "n" may be a, t, c, g, other or unknown
  misc_feature (331)..(331): "n" may be a, t, c, g, other or unknown
  misc_feature (334)..(334): "n" may be a, t, c, g, other or unknown
  misc_feature (339)..(339): "n" may be a, t, c, g, other or unknown
gattttttgagatgaagtctcgctctgtcacccaggctgcaggggaatagaangatggacaggaaggggagaggatcgggagtgaagaggtcagccaccacaaagcccaggcacganagcaanangcggggtggggctgggggtgaaaagcacaaantaaggcctacaggacgctctgcacgggctgaggaagagggacgtggttcagccatggctgcaggagactgggtggatgtccgtgtcaccaaggcctatagggaacaatggggaggggcgggcttggtgtgatgcangaagactgtggcttcaangctgaggtgacgcggagcangangacanggggacctg

SEQ ID NO: 9181 - DNA, 532 bp, Homo sapiens
  misc_feature (68)..(68): "n" may be a, t, c, g, other or unknown
  misc_feature (94)..(94): "n" may be a, t, c, g, other or unknown
  misc_feature (125)..(125): "n" may be a, t, c, g, other or unknown
  misc_feature (423)..(423): "n" may be a, t, c, g, other or unknown
  misc_feature (461)..(461): "n" may be a, t, c, g, other or unknown
  misc_feature (492)..(492): "n" may be a, t, c, g, other or unknown
  misc_feature (510)..(510): "n" may be a, t, c, g, other or unknown
  misc_feature (524)..(524): "n" may be a, t, c, g, other or unknown
  misc_feature (529)..(529): "n" may be a, t, c, g, other or unknown
cagttgttgtcaactttttattattacatatagcacatagtgggaatatttggttgaaagtaaattanaaataaaaaagggggaaagtaggaanaaaaatcccctcctccaggtctgaaaatcanacaaaaatccttaaaacttgtagccttgccatgctacaccacatctgccaatacatgaaactgacccattagtgctctgctggatcagcctgcccaggcactgctgcctgctggggctgctgtcatcctctggccgctcctccaaaaagggacaatgggttttactcagggctaccactgttgctcctgactggggccaccatggtgcccaggcttcaggcacagggccctgcctccttccccgcaccgccctccaggtggtccacctcgtggctgtcagttcctgttggacctgganctgctccggcttcctgttgtgtggtaagggaacttcantgtgctatgctcttaaaaaaacggccctcanaactactgaaggacccanacacacatggtgtnaccantat

SEQ ID NO: 9182 - DNA, 322 bp, Homo sapiens
  misc_feature (155)..(155): "n" may be a, t, c, g, other or unknown
  misc_feature (244)..(245): "n" may be a, t, c, g, other or unknown
  misc_feature (306)..(306): "n" may be a, t, c, g, other or unknown
  misc_feature (312)..(312): "n" may be a, t, c, g, other or unknown
  misc_feature (314)..(314): "n" may be a, t, c, g, other or unknown
atttcaagttttcttaagaatcagaataaatatatttgagacaataaaacttctcagtgcctttttacaggtggcatcctccttgtagggcacagaacagttattacctgatcagcatcttccaaagttcaggaccactgaaaccataatagaanaatcttgggagctaatgtcaaagaatcattttttgctatgcttgatttaagtccaaactttaatgtgattttaatctattgcatatccnntgaggaatttaactgtgataatactgaaaagaaatattggatgagaaacaagacaggcccnaacccncnaatctcct

SEQ ID NO: 9183 - DNA, 407 bp, Homo sapiens
  misc_feature (300)..(300): "n" may be a, t, c, g, other or unknown
  misc_feature (313)..(313): "n" may be a, t, c, g, other or unknown
  misc_feature (315)..(315): "n" may be a, t, c, g, other or unknown
  misc_feature (333)..(333): "n" may be a, t, c, g, other or unknown
  misc_feature (375)..(375): "n" may be a, t, c, g, other or unknown
  misc_feature (405)..(405): "n" may be a, t, c, g, other or unknown
aaattttacctatacctttccacaagacagttgggaactttcagttcaataacacactttatgttatggattttatattcaagaaaggtatataaatatgtagcaaatatggaaaactacatatataaatatgttgcaaatcttggaaaccttttaggtgtgatggctgctcaggcaaaccatggagcaagattggaaataataatggtctgcatacatcctcccataggcagtgaacaaggttggccacattgactctattatgactgagacagtggcaaattttacttggttccccanaatcagtgaaaananatttttaaaacatatccntaaaaaaaatatactgtggggtatttgaatccaaatattccnatcttaatatgttattatggtattaaaaanct

SEQ ID NO: 9184 - DNA, 511 bp, Homo sapiens
  misc_feature (13)..(13): "n" may be a, t, c, g, other or unknown
  misc_feature (62)..(62): "n" may be a, t, c, g, other or unknown
  misc_feature (224)..(224): "n" may be a, t, c, g, other or unknown
  misc_feature (407)..(407): "n" may be a, t, c, g, other or unknown
  misc_feature (473)..(473): "n" may be a, t, c, g, other or unknown
  misc_feature (478)..(479): "n" may be a, t, c, g, other or unknown
  misc_feature (499)..(499): "n" may be a, t, c, g, other or unknown
  misc_feature (510)..(510): "n" may be a, t, c, g, other or unknown
ctttctttctttnattccttttatgtttcttcttaaaagggaactaatcccattcatgaaanccccaccttcatgacgtaatcacctctcaaaggtctcacctcttaataccatcccattagggattaggcttcaacatattaattttggggaggacacaaacattcagtccatagtaactttgatctttctctttcttgatttctgtagttagaattcctganagctgccttgactcctcctggaacaatgtgggacataaataaacaaatagatggtaactaaaaaatctgactgctgggtggacacaaactggtcctctaatcctaacttcatactaaatttttgcgtgattctccccttgatctctgaccctggtcctacactgacccctaatcccacatggnagtgggacaacctactctcagtttacatgaataacttattgcgggaattggtattttccagccccnggtcnnaattttttacttttttcccnggaatttatcnt

SEQ ID NO: 9185 - DNA, 466 bp, Homo sapiens
  misc_feature (451)..(451): "n" may be a, t, c, g, other or unknown
  misc_feature (461)..(461): "n" may be a, t, c, g, other or unknown
  misc_feature (463)..(463): "n" may be a, t, c, g, other or unknown
attcctgaaagaatgaacattttaatgtgtggttccatcctttcctgacaaggtggttggctaaaaaaaaaaatcaaaatgaaacaaaaacttagctatatattgataaaagcaagataacaaaaggagagagttgcacagttggcaaaggctcagatgaggaaataaacaaataaaaatgcttttcttcaatgtctgggacccactttgctttctcaagaaaggccgaaaaccagtcaactgcgtgacactttgtcttctccttctatgcctttcgtgtcctattgctgaatggaaaaacccgacagtatcttttcccagtgggcccttggatttatgctgcaacttaactcactaagattgtgtgtttcagtaccacggtgattccttactcttgtcttgatgctgtagacctgtatcgaatcccacgctgggcactatgtctactgtnccatgaaaangntcc

SEQ ID NO: 9186 - DNA, 448 bp, Homo sapiens
  misc_feature (3)..(3): "n" may be a, t, c, g, other or unknown
  misc_feature (27)..(27): "n" may be a, t, c, g, other or unknown
  misc_feature (154)..(154): "n" may be a, t, c, g, other or unknown
  misc_feature (396)..(396): "n" may be a, t, c, g, other or unknown
  misc_feature (403)..(403): "n" may be a, t, c, g, other or unknown
  misc_feature (416)..(416): "n" may be a, t, c, g, other or unknown
  misc_feature (427)..(427): "n" may be a, t, c, g, other or unknown
  misc_feature (448)..(448): "n" may be a, t, c, g, other or unknown
ganatggagtctcactttgtcacccangctggagtgcagtggtgtgatatcggctcactgcaacctccacctcccgggttcaagtgattctcctgcctcagcctccccggtagcctgcccccatgcccagctaatttttgtatttttagtaaanatgggatttcaccatgttggccaggctgctctcaaattccttaccccaggtgatctgcctgcccaggcctcccgaaatgctggggttacagcgtgagccgctgtgcccggcccagccacttcttcttattggagtgtgagcactaggagcagggacctttccatggtgcttgctgtgttataccctgcacccagaacttagtaagcgttcaaacaaaatttttaaaaataaatggaagaacnaattaanaaacctcccggtnaattcttaaancgttccccaacaagggaaatn

SEQ ID NO: 9187 - DNA, 346 bp, Homo sapiens
  misc_feature (295)..(295): "n" may be a, t, c, g, other or unknown
  misc_feature (333)..(333): "n" may be a, t, c, g, other or unknown
  misc_feature (338)..(338): "n" may be a, t, c, g, other or unknown
aaagcagctgaaacaggcacttgtttatttccccagaaggaggcagaatggggtccttggggagtctctgtcccagcctggtgccccggacaggcagatctcacttccagaagagcacattccagaaaagtagtcagcaagggcagaggcccagggacagcagtgggaagagcagggcgccttaggtgtggtgctccagcgcaccctgggccagtgctgccaggaagaactgccagcccttggccagtgacagtggtgcctcctgcagctcccgccacaggaatgggctgccaangagcgtggctgctgggcttgtcaacaccagcagggcancacanaaggtcca

SEQ ID NO: 9188 - DNA, 309 bp, Homo sapiens
  misc_feature (208)..(208): "n" may be a, t, c, g, other or unknown
  misc_feature (227)..(227): "n" may be a, t, c, g, other or unknown
  misc_feature (249)..(249): "n" may be a, t, c, g, other or unknown
  misc_feature (271)..(271): "n" may be a, t, c, g, other or unknown
  misc_feature (274)..(274): "n" may be a, t, c, g, other or unknown
  misc_feature (308)..(308): "n" may be a, t, c, g, other or unknown
atagcatttgtattttaaggatttagggcaaatacatttttttttctacttgataaaaagaaaattagtacttaaaaggttcaaaaatatattgattgagttatttttcttacataaataaattatattgatttttaggatttaacagctgaaaaaaccctttctgcttccactggaggcaaaactgaacaaaatgttagttaaatanaaagagcagcatttctaanaaatctgtggtcagcattatanaccatctatgctacaagggatntcnttaaataggatttgttcaattactggattccctnc

SEQ ID NO: 9189 - DNA, 257 bp, Homo sapiens
  misc_feature (101)..(101): "n" may be a, t, c, g, other or unknown
  misc_feature (216)..(216): "n" may be a, t, c, g, other or unknown
  misc_feature (222)..(222): "n" may be a, t, c, g, other or unknown
  misc_feature (231)..(231): "n" may be a, t, c, g, other or unknown
ggagatggagtctcgctctgtcgcccaggctaaagtgcagtggcgtgatctcagctcactgcaacctccacctcccgggttcaagcaattctcctgcctcngcctccctagtagctctgactataggcacgtaccaccacacccggctaattgataaataatttttataaacttaaaaacccttctccttgttaccgcaaatcacaaactttaaangtccancaataaacnctgtccaaaatttcatgctcttcact

SEQ ID NO: 9190 - DNA, 524 bp, Homo sapiens
  misc_feature (46)..(46): "n" may be a, t, c, g, other or unknown
  misc_feature (214)..(214): "n" may be a, t, c, g, other or unknown
  misc_feature (241)..(241): "n" may be a, t, c, g, other or unknown
  misc_feature (249)..(249): "n" may be a, t, c, g, other or unknown
  misc_feature (264)..(264): "n" may be a, t, c, g, other or unknown
  misc_feature (293)..(293): "n" may be a, t, c, g, other or unknown
  misc_feature (351)..(351): "n" may be a, t, c, g, other or unknown
  misc_feature (369)..(369): "n" may be a, t, c, g, other or unknown
  misc_feature (430)..(430): "n" may be a, t, c, g, other or unknown
  misc_feature (436)..(436): "n" may be a, t, c, g, other or unknown
  misc_feature (500)..(500): "n" may be a, t, c, g, other or unknown
  misc_feature (506)..(506): "n" may be a, t, c, g, other or unknown
  misc_feature (510)..(510): "n" may be a, t, c, g, other or unknown
gaggccttaatttttctctatgttcaaggcagttaattgctcaaantatgggtttggaggatctgtaccacaaacttaaaagtaccaagctaacaaatcactcattttgaaagtctactacaaattcataggccatctacccaaatggattttctcctatcaactctagctgcagagcaacatggtgattcaaaataggtgcctggataggaanaggcataccgtgaatctaaggactgtnttgaatantaaggctaacaagantcaggcatctgcaggtgctgatgaactanaaacaggaagggaccgagttaacatttcaggtggccaaggctctccttggaagctgtnaaccaagactgaaggctnatttactctttctgtcctgcaaatctgctttgatatggaacaatacccatggatgcttaantactanctactatatccgctttttttttttgtcccccattaaattgcctaagaactgaaattccccgaanaaaaanaaancccccttttggttc

SEQ ID NO: 9191 - DNA, 561 bp, Homo sapiens
  misc_feature (169)..(169): "n" may be a, t, c, g, other or unknown
  misc_feature (219)..(219): "n" may be a, t, c, g, other or unknown
  misc_feature (229)..(229): "n" may be a, t, c, g, other or unknown
  misc_feature (388)..(388): "n" may be a, t, c, g, other or unknown
  misc_feature (396)..(396): "n" may be a, t, c, g, other or unknown
  misc_feature (398)..(398): "n" may be a, t, c, g, other or unknown
  misc_feature (473)..(473): "n" may be a, t, c, g, other or unknown
  misc_feature (481)..(481): "n" may be a, t, c, g, other or unknown
  misc_feature (496)..(496): "n" may be a, t, c, g, other or unknown
  misc_feature (517)..(517): "n" may be a, t, c, g, other or unknown
  misc_feature (546)..(546): "n" may be a, t, c, g, other or unknown
acttttaaagaagctcaacattttattctcattttcaataacttaaatgaacagcacttaacacattacacaaaattaaagacttgtgcatatatttgatttcaacattaatgtcaaaaatacatagtatgattttacataggatttgtgctacattagaacactaganacaaacatcacttgagtattaaggaaaacattaaatattaaataactganaaaatgtgtnaacactaatctaactgggggttttgctattgcaacatgtccaatgaagtggtttcaacagtacaaaaaggattaggacatgagtttttccagtctacatggaatatatggatttcatttcaggaatcctttcataaaaactggtccaggataacagganaaaatccncnctcctgattgtttaatttggtacctccattctatgctaatttttacttgccaacttgggttctgagtaatacttnaatcaccncccctatcacctctnggtgaaaactgaaggttgttngggatccctgttaaattgaattctatgcnccccctttcaccccc

SEQ ID NO: 9192 - DNA, 408 bp, Homo sapiens
  misc_feature (173)..(173): "n" may be a, t, c, g, other or unknown
  misc_feature (176)..(176): "n" may be a, t, c, g, other or unknown
  misc_feature (339)..(339): "n" may be a, t, c, g, other or unknown
  misc_feature (341)..(341): "n" may be a, t, c, g, other or unknown
  misc_feature (356)..(356): "n" may be a, t, c, g, other or unknown
  misc_feature (358)..(358): "n" may be a, t, c, g, other or unknown
  misc_feature (396)..(396): "n" may be a, t, c, g, other or unknown
aaattctcagtctcaatttaatgtctaagaaaaaatatactcaaatccacagcgaatttttccaaaagggaaaacttatagtcaagaaaaacctcacttgttttttgcacaaccaattttcctgtttacctatagctaggtgtatctgtgcacatcacttaattacttaggantanataatgggttcatttagtttcattcttccatccctaacactttatactcaaggaactgatctctgccttttgccgtttaaggagggttttcctaatatggtttctgatgcaactactacgttggatttatttgatcccttcggaattcaaccccccttttaanantcaatgcagtaaaanancctgagttcttctctataaaatcttcaaagcactgaanaatgacatgagc

SEQ ID NO: 9193 - DNA, 559 bp, Homo sapiens
  misc_feature (4)..(4): "n" may be a, t, c, g, other or unknown
  misc_feature (164)..(164): "n" may be a, t, c, g, other or unknown
  misc_feature (240)..(240): "n" may be a, t, c, g, other or unknown
  misc_feature (296)..(296): "n" may be a, t, c, g, other or unknown
  misc_feature (334)..(334): "n" may be a, t, c, g, other or unknown
  misc_feature (361)..(361): "n" may be a, t, c, g, other or unknown
  misc_feature (375)..(375): "n" may be a, t, c, g, other or unknown
  misc_feature (409)..(409): "n" may be a, t, c, g, other or unknown
  misc_feature (428)..(428): "n" may be a, t, c, g, other or unknown
  misc_feature (441)..(441): "n" may be a, t, c, g, other or unknown
  misc_feature (493)..(493): "n" may be a, t, c, g, other or unknown
  misc_feature (527)..(527): "n" may be a, t, c, g, other or unknown
  misc_feature (545)..(545): "n" may be a, t, c, g, other or unknown
  misc_feature (551)..(552): "n" may be a, t, c, g, other or unknown
gtanaaacgggtctccctatgttgcccaggctggtcttaaacgcctgggctcaagtgatcctcctgccttggcctcccaaaatgctgggattacaggtgtgagcccctgtgcctggccagtgtttatttttaaacaaacacttcaaaaatttaataaacatgtntaaagcactatactgtgccaggcattgttagcaactgggaatatgggaatgcatgaaactagttcctgcccttgantgtctcatcggttctttccctgccctttcagtacggtgggaattgcagctgctgancagggattctggaaagcattgcgtacctgagcccccancatggcgggcctaaagcggcgggcaanccaagtgtggccanaaaaacatggtgagcaagaacatgggctgtacancctgcaccgcatgtttganatcctgggcctcntctgacacacaaaaatgttcgcgtgcttccttccccttgttgaaattcctgnataacacaaacttgaaccctcccaaatgaacttnactccttattggccctgnaccccnnggcccct

SEQ ID NO: 9194 - DNA, 559 bp, Homo sapiens
  misc_feature (170)..(170): "n" may be a, t, c, g, other or unknown
  misc_feature (245)..(245): "n" may be a, t, c, g, other or unknown
  misc_feature (286)..(286): "n" may be a, t, c, g, other or unknown
  misc_feature (335)..(335): "n" may be a, t, c, g, other or unknown
  misc_feature (439)..(439): "n" may be a, t, c, g, other or unknown
  misc_feature (492)..(492): "n" may be a, t, c, g, other or unknown
  misc_feature (511)..(511): "n" may be a, t, c, g, other or unknown
  misc_feature (536)..(537): "n" may be a, t, c, g, other or unknown
  misc_feature (553)..(553): "n" may be a, t, c, g, other or unknown
cagagatggagtcttgcactgttgcctaggctggagtacagtagtgcattcttggctcactgcaacctccacctcccaggctcaagagattctcccgcctcagcctcccgagcagccgggactacaggcgcctgccaccacgcccagccaattttttgcatcttcagtanagacagggcttcaccatgttggccaggctggtctcgaactcctgacctcatgattcacccacctcagcctcccanagtgctgggaccacaggcgtgagccaccgtgcccggccaanatgaacattttttaaaaccaatttttcaggtataacataagatttctanccaaaggaaaattttgttgtattaattccaacatttgctgtgatttggtattatgtggtatttcttttgtgctctaaccaaaatcatgctagatttagatgccnataaatgcccaatttgaattgaaaacatcttttacctcccaataattatgccntaaaattgaatgaaccccncccataaccaaaatccccttctttnnatttttaattaatttnaaattt

SEQ ID NO: 9195 - DNA, 227 bp, Homo sapiens
  misc_feature (52)..(52): "n" may be a, t, c, g, other or unknown
  misc_feature (139)..(139): "n" may be a, t, c, g, other or unknown
  misc_feature (149)..(149): "n" may be a, t, c, g, other or unknown
  misc_feature (157)..(157): "n" may be a, t, c, g, other or unknown
  misc_feature (188)..(188): "n" may be a, t, c, g, other or unknown
  misc_feature (225)..(225): "n" may be a, t, c, g, other or unknown
aaactgaaagtggggtacatggtgcagctggttctgtcattgctcagcctanttggcgtccagcttggccatttcctgcacatagatgcctatactctcgctgtcaaaaagcacgaagtacaccgttttgatggaagangacattgtanacacgaantaactggagatggccttcagaatcagctganctgctgtctgctttggaaaaccgttcctggagaaaanaa

SEQ ID NO: 9196 - DNA, 569 bp, Homo sapiens
  misc_feature (49)..(49): "n" may be a, t, c, g, other or unknown
  misc_feature (51)..(51): "n" may be a, t, c, g, other or unknown
  misc_feature (162)..(162): "n" may be a, t, c, g, other or unknown
  misc_feature (221)..(221): "n" may be a, t, c, g, other or unknown
  misc_feature (235)..(235): "n" may be a, t, c, g, other or unknown
  misc_feature (404)..(404): "n" may be a, t, c, g, other or unknown
  misc_feature (430)..(430): "n" may be a, t, c, g, other or unknown
  misc_feature (507)..(507): "n" may be a, t, c, g, other or unknown
  misc_feature (515)..(515): "n" may be a, t, c, g, other or unknown
  misc_feature (530)..(530): "n" may be a, t, c, g, other or unknown
  misc_feature (563)..(563): "n" may be a, t, c, g, other or unknown
ccacttaaaagtacttgggcttcctttactcatttaattgacacagtcnancaattgctgtgtatgtgcttaggttaacatcaaatttgcctgtgtatcacagcatacattttaataggatgagtttatcaggctatctcagccttatacatgttctctcantgtatgcttttcggccacataatgaactacaaatttttgctcaacccttttccacatanatctgagttttctncctatgggttttctgtaacataaaataagacataattgatcacggaaggcacaaccacattcactgcattcacaaggtttctgtcctgtgcaaatccactgttatctcctgaggctgcacatctgaccactggctgtcccacaaagactacgttcctgtttgcgaagangccgctaatgtttaatgatgtctgangggccacaaaaagcacttgtgttatccccccgttagcaaaatttttctcctgcatgacatcactggtgtgttatganctgtgccnctctgccaggaaganttcccccctgggtgcctctgtttcctccctgtntttttc

SEQ ID NO: 9197 - DNA, 263 bp, Homo sapiens
  misc_feature (94)..(94): "n" may be a, t, c, g, other or unknown
  misc_feature (129)..(129): "n" may be a, t, c, g, other or unknown
  misc_feature (146)..(146): "n" may be a, t, c, g, other or unknown
  misc_feature (205)..(205): "n" may be a, t, c, g, other or unknown
  misc_feature (244)..(244): "n" may be a, t, c, g, other or unknown
  misc_feature (247)..(247): "n" may be a, t, c, g, other or unknown
aaacggtaaatgccagttttaataacaaaaatggtactaaacgcaaatgaacattaaattaatacagtataaaaaagaacagcttaaataaacnggtattcacatatcacaatagcaaagttatgacanaatgaactgaaaacacnaacagttttgaaaattctcttttcagcctacttccaaataaaaatagtcaggctttttncctgtacatagtttgatgctttgtctataccatatatantanaaaaataaattcttta

SEQ ID NO: 9198 - DNA, 443 bp, Homo sapiens
  misc_feature (237)..(237): "n" may be a, t, c, g, other or unknown
  misc_feature (388)..(388): "n" may be a, t, c, g, other or unknown
  misc_feature (413)..(413): "n" may be a, t, c, g, other or unknown
  misc_feature (416)..(416): "n" may be a, t, c, g, other or unknown
  misc_feature (425)..(425): "n" may be a, t, c, g, other or unknown
  misc_feature (442)..(442): "n" may be a, t, c, g, other or unknown
gagataaatttttattttaagacaaactgataaatggtcaagaaaaagttttaaaatattgacataaaaaagctgtttttctcccactaaattgccatgactttgtacttataaagtctactaaattatattcaaaaagtgtgtataactgtaccattttcgttaaaatattgtgtaaaaaaaagtttgggggaatatataacaaataattaactgtagatccctctgggtgtaaanattacaggaggctttcactttgagcactctcaaatagtgtgaaatttggagtttttacaataagcattatgtgtgcagaaaaaattaaaatacataaacgttaagaaacatgaaaaaatgatcagtcctaatcatgcaattaaaactggcnggacctattttcccataattaatgnccnaaaacggtncagtgaaaagttttccnc

SEQ ID NO: 9199 - DNA, 367 bp, Homo sapiens
  misc_feature (137)..(137): "n" may be a, t, c, g, other or unknown
  misc_feature (272)..(272): "n" may be a, t, c, g, other or unknown
  misc_feature (277)..(277): "n" may be a, t, c, g, other or unknown
  misc_feature (290)..(290): "n" may be a, t, c, g, other or unknown
  misc_feature (301)..(301): "n" may be a, t, c, g, other or unknown
  misc_feature (364)..(364): "n" may be a, t, c, g, other or unknown
ggttatattcagtatttttaatttagtaggatagaatatatcagattgcattattttaatttgccaattaaaagtatgactgggacactgtaaaatgtactatttttaatgggtgtgcatgtcaggattttctttanaaatacactggtctggtctaatttatttaagcaggagcactttaaagtatcccaccctaccccattccacccccagtggacagaaaggaaattgactgacttgaggggatgcagacatctgggttattccaacanaccantggttaagaagangggggtggtancattatggcctcgggcaggcccccccaccctgagcctctgaaagctgactttatctgtaagangga

SEQ ID NO: 9200 - DNA, 548 bp, Homo sapiens
  misc_feature (513)..(513): "n" may be a, t, c, g, other or unknown
  misc_feature (521)..(521): "n" may be a, t, c, g, other or unknown
  misc_feature (545)..(547): "n" may be a, t, c, g, other or unknown
aacagaaagtcagagatactttatttttacttctaaatccaaaggctaagtagagcagagttgtaaaaatgaaatcccacttagtctgattcacacgaatactaacgtttaatcctgttttcaaagtccaagattgaaaacttgcaattaaacactgagcaagccacatgtttaagtaatatttcttaaaaagtcttaaagaaaaaagtatgatacaggacctaagttttcagtggcatatatactattaacacatgttctgaaatctggtaggtcacatcagtcctgaattaacttttaataataataataataaaaaaactaactgagctttatactttttctatgccactatagctttctttcacctcattttttaaatgtcgatcttcactttatgccgttctcagtattcttccaaaaatcttcgaacagtagtcctacaacgcaaaatttggggaaaaatgataattagaccacatgttaaaaggcaatttttatgaaaaaatgttnggccatcnctaactgctaattacatgtttttnnng

SEQ ID NO: 9201 - DNA, 541 bp, Homo sapiens
  misc_feature (44)..(44): "n" may be a, t, c, g, other or unknown
  misc_feature (254)..(254): "n" may be a, t, c, g, other or unknown
  misc_feature (483)..(483): "n" may be a, t, c, g, other or unknown
  misc_feature (506)..(506): "n" may be a, t, c, g, other or unknown
  misc_feature (511)..(511): "n" may be a, t, c, g, other or unknown
  misc_feature (517)..(517): "n" may be a, t, c, g, other or unknown
  misc_feature (527)..(527): "n" may be a, t, c, g, other or unknown
gagacagagtctggatctgtcacccaggctggagtgcagtggancgatctcggttcactgcaagctccacctcccaggttcacaccattctcctgcctcagcctcccgagtagctgggactacaggtgcccaccaccacgcccagctaattttgtgtatttttagtaaaaatggggtttcacggtgttagccaggacggtctcgatctcctgacctcgtgatccgcccgccttggcctcccaaagtgctgccanaagtattctttactggcttgacctttgtccccagatacgtaaatatatttatgtaacgaatctccctgacagtagaaaatgtgtaatttccaatctgaataaaactgagctatatctgaataactgagaagagtatgatattactttgattattttaaaagtgaaagggaaaatatctaaaaattggatatcgatgatacttctagaccttgattatgttattcctgantaatttcccttcccaggatccanaaaanaaaatnaacccccggnaacctggtaattta

SEQ ID NO: 9202 - DNA, 439 bp, Homo sapiens
  misc_feature (7)..(7): "n" may be a, t, c, g, other or unknown
  misc_feature (70)..(70): "n" may be a, t, c, g, other or unknown
  misc_feature (161)..(161): "n" may be a, t, c, g, other or unknown
  misc_feature (204)..(204): "n" may be a, t, c, g, other or unknown
  misc_feature (278)..(278): "n" may be a, t, c, g, other or unknown
  misc_feature (315)..(315): "n" may be a, t, c, g, other or unknown
  misc_feature (377)..(377): "n" may be a, t, c, g, other or unknown
  misc_feature (404)..(404): "n" may be a, t, c, g, other or unknown
  misc_feature (414)..(414): "n" may be a, t, c, g, other or unknown
  misc_feature (419)..(419): "n" may be a, t, c, g, other or unknown
  misc_feature (433)..(433): "n" may be a, t, c, g, other or unknown
ccagttngtggaagcctcattttatttaaccaatttcctattaatggacatataaatttttaacaatttnctactattaaaataatactgtaatgaatatcacatgcaaacatcataccacactcgtccagttatttcttagggttcttaacatggaaaangataaatatatatttaaaatttaaatatctacagcttaacccncccaaaggattaaacaacttacattctcaccaaggtagtcctttttttgccctcaccctcattgacactggatnttgtcaaatttaaaaaaaatccttaacaatctgatanatgaaaaaatagtttaagtatactaaggcagtgttttccaaggtgtttttgtttttgttttngaattggaattttgctctgttgccaanctggaatcantggcncgggccccggtcantggcaa

SEQ ID NO: 9203 - DNA, 441 bp, Homo sapiens
  misc_feature (156)..(156): "n" may be a, t, c, g, other or unknown
  misc_feature (158)..(158): "n" may be a, t, c, g, other or unknown
  misc_feature (318)..(318): "n" may be a, t, c, g, other or unknown
  misc_feature (346)..(346): "n" may be a, t, c, g, other or unknown
  misc_feature (359)..(359): "n" may be a, t, c, g, other or unknown
  misc_feature (361)..(361): "n" may be a, t, c, g, other or unknown
  misc_feature (438)..(439): "n" may be a, t, c, g, other or unknown
acaggttgaaattttgattttatttcaaaatgataaataaaccgaggcatagttctgaccaggtactatgtctgcagggcttttgaaattaaagaaacagtccaggagggctccagtcagacccagaatgacaccagccacacttgtgactggcananataacctctttgaccttcagcaattttaaaagttcttcatcctaatttctgagtatcataaaaagtaaaaagtactttcattttatttttcctttgaaaatgtttttagtggcaaacaggactacttgttttccttacttcatttttataagcatagtanttatatgtcaatttacttaaaattaganagggaaaccccananacctgaagtggcactgcccatccactgaaaggcccacataaataggttctcatgtttcatgttatcccgtctaccannta

SEQ ID NO: 9204 - DNA, 379 bp, Homo sapiens
  misc_feature (8)..(8): "n" may be a, t, c, g, other or unknown
  misc_feature (35)..(35): "n" may be a, t, c, g, other or unknown
  misc_feature (75)..(75): "n" may be a, t, c, g, other or unknown
  misc_feature (80)..(80): "n" may be a, t, c, g, other or unknown
  misc_feature (162)..(162): "n" may be a, t, c, g, other or unknown
  misc_feature (207)..(207): "n" may be a, t, c, g, other or unknown
  misc_feature (285)..(285): "n" may be a, t, c, g, other or unknown
  misc_feature (300)..(300): "n" may be a, t, c, g, other or unknown
  misc_feature (370)..(370): "n" may be a, t, c, g, other or unknown
  misc_feature (373)..(373): "n" may be a, t, c, g, other or unknown
  misc_feature (375)..(375): "n" may be a, t, c, g, other or unknown
aattgcanaaagcccctttaatgtctgtggaacanaaaaacatgttggatggggaaagcaggggcaggacacacntgtcncgtatctatggggtgttatcagggttatatctgtgacaggatcaactaacttactggctctcatttcacctgataacataanaccctccccgctgactacacacagtttaggttatcactccttatnactcctgctccctgccctgcaccctaaattctctgggactcaccgcagttttcctgactctgatggaatgtgctggantctattacgaaaccngcttttccaaaaggtgctcaacaaggccctaaaaattttcttctggccaaaggtgggtcaaaccaaattnctncnggct

SEQ ID NO: 9205 - DNA, 527 bp, Homo sapiens
  misc_feature (4)..(4): "n" may be a, t, c, g, other or unknown
  misc_feature (37)..(37): "n" may be a, t, c, g, other or unknown
  misc_feature (104)..(104): "n" may be a, t, c, g, other or unknown
  misc_feature (207)..(207): "n" may be a, t, c, g, other or unknown
  misc_feature (226)..(226): "n" may be a, t, c, g, other or unknown
  misc_feature (287)..(287): "n" may be a, t, c, g, other or unknown
  misc_feature (361)..(361): "n" may be a, t, c, g, other or unknown
  misc_feature (422)..(422): "n" may be a, t, c, g, other or unknown
  misc_feature (451)..(451): "n" may be a, t, c, g, other or unknown
  misc_feature (475)..(475): "n" may be a, t, c, g, other or unknown
  misc_feature (517)..(517): "n" may be a, t, c, g, other or unknown
  misc_feature (519)..(519): "n" may be a, t, c, g, other or unknown
  misc_feature (527)..(527): "n" may be a, t, c, g, other or unknown
aaanataaacatacttcattttgacaagttcaatcanaaaattaaatgttccaaaatacataggtacctaatatagtttcaagaaatataaaagcaatatccanagattcgagtgagacacagacaaacccataatctttgtcagaaatggaatttcacctgtcactcgctgatttaaccttcacttcttccctgacccacacccanaaccaggcaccctccaaanctggcccatctcccctccagcccctgcctccctgcccggcaacaccccgggagctccagcnagtctctggccgctccaagcgctctgagggcaccagcctgtcccactctggccatttcaatgccgctcggacanacctggtgggttcataagccggtgcatacccccaccctgcacgtgctctcccgggtcggcnccaatctggtctgggaaccgcatcctccncctgaaccctccctggttttcccnccggtgccggaacccaaaaattaaagttggggtgggcccccntnaaggcccn

SEQ ID NO: 9206 - DNA, 219 bp, Homo sapiens
  misc_feature (7)..(7): "n" may be a, t, c, g, other or unknown
  misc_feature (65)..(65): "n" may be a, t, c, g, other or unknown
  misc_feature (67)..(67): "n" may be a, t, c, g, other or unknown
  misc_feature (93)..(93): "n" may be a, t, c, g, other or unknown
  misc_feature (145)..(145): "n" may be a, t, c, g, other or unknown
  misc_feature (165)..(165): "n" may be a, t, c, g, other or unknown
  misc_feature (177)..(177): "n" may be a, t, c, g, other or unknown
  misc_feature (191)..(191): "n" may be a, t, c, g, other or unknown
  misc_feature (202)..(202): "n" may be a, t, c, g, other or unknown
gggctanaagtttgggctttaatggcagctggggtaaaaggaaacaaaaacagtaattctgaaanancacaagggaaacaggcacccaggaancaccctgggcccattcccaggccagctgaactgaaatgctgattctgtccangggggctgctgtatgtgtanactgggtggcantcttggggactgangcctcttgganaaaaaaggaaaactgtc

SEQ ID NO: 9207 - DNA, 539 bp, Homo sapiens
  misc_feature (83)..(83): "n" may be a, t, c, g, other or unknown
  misc_feature (365)..(365): "n" may be a, t, c, g, other or unknown
  misc_feature (414)..(414): "n" may be a, t, c, g, other or unknown
  misc_feature (457)..(458): "n" may be a, t, c, g, other or unknown
  misc_feature (504)..(504): "n" may be a, t, c, g, other or unknown
  misc_feature (524)..(524): "n" may be a, t, c, g, other or unknown
  misc_feature (539)..(539): "n" may be a, t, c, g, other or unknown
cagagtgagtttgcattctaaaaattactgcactgggacaatttgaaaagaattatttttaaacattcacaaactttttttcnccttgaaaaaaataaagcatacaaaatttctcatgaggcactttacagaaaaagcatctttctgaccttgatcatgaagttatgtgcttcttgtcgtattctgggaaagttgtctaggaaatgacctattgaggggagaaatacatttcctttgactcttttccacattctcttgggtgactttcagttactctttgtctcagtcagggttctctagagaaacagaacctattatatacatatattaatggagagagattgatttatatttatgtcccctcnattatatgtatatattggagatatcatatacatatttatatatattccnagagagaaagaaaaagagagattttttttaaggaattggctcnngttattcctggaacctggcagttctaaaaaatttaggggtggttgncgggctaaaaacccgcccgntttctctgtttttgn

SEQ ID NO: 9208 - DNA, 487 bp, Homo sapiens
  misc_feature (240)..(240): "n" may be a, t, c, g, other or unknown
  misc_feature (269)..(269): "n" may be a, t, c, g, other or unknown
  misc_feature (271)..(271): "n" may be a, t, c, g, other or unknown
  misc_feature (420)..(420): "n" may be a, t, c, g, other or unknown
  misc_feature (422)..(422): "n" may be a, t, c, g, other or unknown
  misc_feature (443)..(443): "n" may be a, t, c, g, other or unknown
  misc_feature (447)..(447): "n" may be a, t, c, g, other or unknown
  misc_feature (484)..(484): "n" may be a, t, c, g, other or unknown
accgggatactttttaatacatctagtctaaaacttacagggaaggcatcctagcaccttcttttattattgtacagcagtgacagtgacgacagtgatgatggcatctctctatttttatggaaacatctccaggaaatcccaagctgcacagtggagaattacaggaacagaaaaagtggtgtgaagtctgtcggtctcttccctggttcaatgaggagctgaactgaatcatactanaggcatgagtgtctgcgctatttttaaananctctggggaagtgtggttgtcccaccttaggctcctaatataacactcatttctatttgtgggatggttaacaccatcttccatttggtctttcctccactaatatattatccttcactgaagtcttatttctacagtttaatcttttnancccccaaattttttttttttncccncaaaaaccattcttggttcagggggcaaggtctgggnccc

SEQ ID NO: 9209 - DNA, 444 bp, Homo sapiens
  misc_feature (425)..(425): "n" may be a, t, c, g, other or unknown
  misc_feature (433)..(433): "n" may be a, t, c, g, other or unknown
  misc_feature (435)..(435): "n" may be a, t, c, g, other or unknown
ggtaccagttttatttataattaaccacatacaaatcacttttctacaaaataatggttaacatctattccttaattcacagaaatatcacaaaaccaaaatccttcccacgatatattactatttagtctaagctttaattcaaaggttgagaatgacgaattcaagaatttctttcatacataaattgctttccttagttctgcagatgggtaatctgtttgagataagcactgtcatgtttcaaccttagagaacaaaaagctatcaacaagatagtggtaaagaaaatgctagccaaaaaataacactattgagaaataggtgcgtattaagtgcaatacttacaacatctctgatgtcaaatgaccaaaatttagccttagggcactaaagcacatttgcccttttgaagcacatactantatggccncnttttatttc

SEQ ID NO: 9210 - DNA, 538 bp, Homo sapiens
  misc_feature (9)..(9): "n" may be a, t, c, g, other or unknown
  misc_feature (48)..(48): "n" may be a, t, c, g, other or unknown
  misc_feature (101)..(101): "n" may be a, t, c, g, other or unknown
  misc_feature (149)..(149): "n" may be a, t, c, g, other or unknown
  misc_feature (153)..(153): "n" may be a, t, c, g, other or unknown
  misc_feature (171)..(171): "n" may be a, t, c, g, other or unknown
  misc_feature (180)..(180): "n" may be a, t, c, g, other or unknown
  misc_feature (288)..(288): "n" may be a, t, c, g, other or unknown
  misc_feature (316)..(316): "n" may be a, t, c, g, other or unknown
  misc_feature (363)..(363): "n" may be a, t, c, g, other or unknown
  misc_feature (400)..(400): "n" may be a, t, c, g, other or unknown
  misc_feature (412)..(412): "n" may be a, t, c, g, other or unknown
  misc_feature (453)..(453): "n" may be a, t, c, g, other or unknown
  misc_feature (465)..(465): "n" may be a, t, c, g, other or unknown
  misc_feature (478)..(478): "n" may be a, t, c, g, other or unknown
  misc_feature (517)..(517): "n" may be a, t, c, g, other or unknown
  misc_feature (520)..(520): "n" may be a, t, c, g, other or unknown
aagtcaganttgcctttatttttagattcttaaatattctagaatgangtaaaacgaacctgccagtacaaagtgaaaattctacatggtgcatctttggngcttcatgcatgattatttcaatgaacctcttcctggtcactcttaanatanatctgagtttttgactcnccagtctanggctttggcgacactcaatgacataatattcttggaaaaagcagtagcatttctgacttttcatattcagctcggaggtgtattgtctcgggctcctgtgcagtcgancgccacggctgctcatcggatgatccangatgggtccttggcaattttcgggttctcgggtccgaagatggccangccgtgtgtgctcttcccagtgccgaagtatctatcnctcacgggcaanaacttgtctggctgaaaacaaaaaactctctctttgggccncttcctcccctnccaaaaaggcgtncaaaaaattgttccttccctttttttaaaggaaccaaanganctcttccggttaaaaaaa

SEQ ID NO: 9211 - DNA, 426 bp, Homo sapiens
  misc_feature (3)..(3): "n" may be a, t, c, g, other or unknown
  misc_feature (75)..(75): "n" may be a, t, c, g, other or unknown
  misc_feature (83)..(83): "n" may be a, t, c, g, other or unknown
  misc_feature (88)..(88): "n" may be a, t, c, g, other or unknown
  misc_feature (171)..(171): "n" may be a, t, c, g, other or unknown
  misc_feature (179)..(179): "n" may be a, t, c, g, other or unknown
  misc_feature (314)..(314): "n" may be a, t, c, g, other or unknown
  misc_feature (330)..(331): "n" may be a, t, c, g, other or unknown
  misc_feature (340)..(340): "n" may be a, t, c, g, other or unknown
  misc_feature (420)..(420): "n" may be a, t, c, g, other or unknown
  misc_feature (422)..(422): "n" may be a, t, c, g, other or unknown
ccntttctcacatattttgatggtacaaataatgaaacaaactagtgcttaaaagacgaccaatcttgaggaggntgatgtcngtgtnaaaaactaaatgagagtccagaaaggcccagtcataaaacaagcctttctttatttcaatgagatagttttctccttaggaangacaaganatgggtgctagaaacagtttgctttcaagttatcaaaacaaccacgacagttgagaatgtctggaaaagaccatttgttttttagattgtcaactgctacacaaacagaattttctggagttgtgacaggcatcnattaaaaaacaaaccnnaaaaaaacnaaaaaacccaaaaaacaaacacctggccttttgaagaatctatcaagttttaaaaatttcagcatacttgcagtgagccnanatcc

SEQ ID NO: 9212 - DNA, 322 bp, Homo sapiens
  misc_feature (141)..(141): "n" may be a, t, c, g, other or unknown
  misc_feature (297)..(297): "n" may be a, t, c, g, other or unknown
  misc_feature (315)..(315): "n" may be a, t, c, g, other or unknown
  misc_feature (317)..(317): "n" may be a, t, c, g, other or unknown
gggagaatccaaactcactttaatatgagataagccaagcaaatgaagagaaataatggttgtaaccagtccctggtaatacaagcagtggcaaaccttgttgatcaattccaacatataaacaggaaaacataaatgtcnggagctacaaactttagtattcagaggcggacctatgtataatggagccaataagaccaaattgacctttcaggtgtttccttgctatctcccacccccgctcctcatttacctcaagacacaatggtttttgcaaacgattattaaattgcctantaagtcctaaaattattncnttttt

SEQ ID NO: 9213 - DNA, 312 bp, Homo sapiens
  misc_feature (225)..(225): "n" may be a, t, c, g, other or unknown
  misc_feature (244)..(244): "n" may be a, t, c, g, other or unknown
  misc_feature (297)..(297): "n" may be a, t, c, g, other or unknown
  misc_feature (300)..(300): "n" may be a, t, c, g, other or unknown
  misc_feature (303)..(303): "n" may be a, t, c, g, other or unknown
aaatgcacatgaatgcaaattcctgttttatatatttgggtagaaagatagaacatattgaaaataacagataagtatttacaaattctcaccttatttttcccctttacattcaatggctaagtgtggggattcatctgtaaatgctcccaaaaatggcacaaaattgtgctataatggaaccaaacaaccacagtgtttgtttggggttttgatttttctccnataaaaggtacttatttanacagtaaaattttttagtgacaataaaaatttataacataaagaacttttgtnttnccncattgggcc

SEQ ID NO: 9214 - DNA, 435 bp, Homo sapiens
  misc_feature (316)..(316): "n" may be a, t, c, g, other or unknown
  misc_feature (329)..(329): "n" may be a, t, c, g, other or unknown
  misc_feature (353)..(353): "n" may be a, t, c, g, other or unknown
  misc_feature (355)..(355): "n" may be a, t, c, g, other or unknown
  misc_feature (403)..(403): "n" may be a, t, c, g, other or unknown
  misc_feature (426)..(426): "n" may be a, t, c, g, other or unknown
  misc_feature (432)..(432): "n" may be a, t, c, g, other or unknown
gatctattcatttattttactttctaaggaattgatagaaatataaatgtacatatacctaaaaagtggctatcctacatatgacagcccagaatttactaactccataggttttctggatatttcaagcacacattaaaacaattacagagaggacatacatttatgatttatgcaaattaaggcacatcaattacaatctatttttttaagttagtcagtttaaaaatcttcacttacaaaaattcaaaatatgtccaagctcaactttttagtaagaatgttaatttgttggggttgggccatttcctttttncccttaaaggtcnaacatgaaaacaatgaaggaaatntnggtctttgtaaaacacataaatacctgtgatgttttgaatcatttggnccttaaaaatattgcttaacaanttaaanccc

SEQ ID NO: 9215 - DNA, 562 bp, Homo sapiens
  misc_feature (183)..(183): "n" may be a, t, c, g, other or unknown
  misc_feature (314)..(314): "n" may be a, t, c, g, other or unknown
  misc_feature (316)..(316): "n" may be a, t, c, g, other or unknown
  misc_feature (350)..(350): "n" may be a, t, c, g, other or unknown
  misc_feature (356)..(356): "n" may be a, t, c, g, other or unknown
  misc_feature (388)..(388): "n" may be a, t, c, g, other or unknown
  misc_feature (438)..(438): "n" may be a, t, c, g, other or unknown
  misc_feature (491)..(491): "n" may be a, t, c, g, other or unknown
  misc_feature (521)..(521): "n" may be a, t, c, g, other or unknown
  misc_feature (554)..(555): "n" may be a, t, c, g, other or unknown
  misc_feature (562)..(562): "n" may be a, t, c, g, other or unknown
gttgtggttattgaggtgttattcatattatcagattgagaatgttaaactccaagaaaagagctggtaacctattcctcaattcagctgaagaagtcattaatatagggaaaataatctttttttgccaccagctacaaagttagcatatatggttaaaaaaaaaaaagaaaagaaattccnaggaagaaaaaataactaaaaataactctaggcaaaaagacacaataatttcaacctgtcttatattggcagcttattccatggagttctgagatggtacacttttcataacgactaatatctctctgaananttggaaaaataaacactgatgactgctgacaganccaganttaaactgtgttctgtgggtccgcatcaggcngcaatccagtgcaaccttctgcccgtaatcagatgccatccacagtccancatattagggcctcccgcttaaacaaaggactggaccagggtcccaaaaaacntcccttggaatatttgtttttatcccgggntccttcaattcctgaaaatcccccttccctggnnaaaggan

SEQ ID NO: 9216 - DNA, 463 bp, Homo sapiens
  misc_feature (14)..(14): "n" may be a, t, c, g, other or unknown
  misc_feature (39)..(39): "n" may be a, t, c, g, other or unknown
  misc_feature (59)..(59): "n" may be a, t, c, g, other or unknown
  misc_feature (63)..(63): "n" may be a, t, c, g, other or unknown
  misc_feature (147)..(147): "n" may be a, t, c, g, other or unknown
  misc_feature (188)..(188): "n" may be a, t, c, g, other or unknown
  misc_feature (191)..(191): "n" may be a, t, c, g, other or unknown
  misc_feature (266)..(266): "n" may be a, t, c, g, other or unknown
  misc_feature (279)..(279): "n" may be a, t, c, g, other or unknown
  misc_feature (385)..(385): "n" may be a, t, c, g, other or unknown
  misc_feature (414)..(414): "n" may be a, t, c, g, other or unknown
  misc_feature (420)..(420): "n" may be a, t, c, g, other or unknown
  misc_feature (459)..(459): "n" may be a, t, c, g, other or unknown
  misc_feature (462)..(462): "n" may be a, t, c, g, other or unknown
catattggggaganttttattaacttaaattgacattcntaattttgtctgtaagtccntggnatatatgcctttatttgaagcaaacctacaggtgtttcttaatatgacagaatcatgaagacttgcagttaatcagtgtttccnaatgattaaaacaatgttcaaataattacaaagttacttcntcnaaatacttagaaaaatattctgaggagtgtttgaaagctctgtttataaatagtgattgatacatttatcatgtntttggtgctgaanataaacactttttacataaaacattgttttaatatactgctctactaatgaggctagttattagatatactgtattttaacactaaggaataaagctttatcttcntatttatcttatttataggactcttatcnatgaanaactttgtttcccacaataataaactggcaaattgcaanttnc

SEQ ID NO: 9217 - DNA, 421 bp, Homo sapiens
  misc_feature (4)..(4): "n" may be a, t, c, g, other or unknown
  misc_feature (53)..(53): "n" may be a, t, c, g, other or unknown
  misc_feature (76)..(76): "n" may be a, t, c, g, other or unknown
  misc_feature (168)..(168): "n" may be a, t, c, g, other or unknown
  misc_feature (264)..(264): "n" may be a, t, c, g, other or unknown
  misc_feature (377)..(377): "n" may be a, t, c, g, other or unknown
  misc_feature (391)..(391): "n" may be a, t, c, g, other or unknown
  misc_feature (394)..(394): "n" may be a, t, c, g, other or unknown
  misc_feature (407)..(407): "n" may be a, t, c, g, other or unknown
  misc_feature (411)..(411): "n" may be a, t, c, g, other or unknown
ggangcagggtctctccgtagcccagcctggactacagtggcaagatcacggntcactgcagtctcgaattcttanaatcaggtgatcctcctgcctcagcctcccgagcagctgggactaccagggcataccaccacgcctggctaatttttgtactttttgtaaanacggggtttcatcatgttgctcaggctggtctcgaactccttagctcaagcaatctgcccgccttggcctttcaaagtgctgggattacaggtgtnaaccaccgtgcctggctgactacagttttttaattgcacgtttgttccttgaactgaccactgtgggcattccatgccttcctccactgccgcctttttcccaagctgaaaanacaaggaagatgtngcntccaattaaccanaaanaacaccctgt

SEQ ID NO: 9218 - DNA, 316 bp, Homo sapiens
  misc_feature (34)..(34): "n" may be a, t, c, g, other or unknown
  misc_feature (36)..(36): "n" may be a, t, c, g, other or unknown
  misc_feature (88)..(88): "n" may be a, t, c, g, other or unknown
  misc_feature (168)..(168): "n" may be a, t, c, g, other or unknown
  misc_feature (183)..(183): "n" may be a, t, c, g, other or unknown
  misc_feature (240)..(240): "n" may be a, t, c, g, other or unknown
  misc_feature (263)..(263): "n" may be a, t, c, g, other or unknown
  misc_feature (268)..(268): "n" may be a, t, c, g, other or unknown
  misc_feature (294)..(294): "n" may be a, t, c, g, other or unknown
  misc_feature (304)..(304): "n" may be a, t, c, g, other or unknown
gtattaaacacatgtttatttacaacgtggagananaataaggggcagttaaggccactttctcctgtgaaacactgcaaaatatgtncataagtacaacctaatataggcaaaggttctaaaaatcatctttcttggcttcacgtaattatcactcggggagtgganaacggctgccgatancaccaggccatgccaggccacgccaacaagggcgtgtgcattcactttttcattganctgccctcaaaactgctgccganctganccctgcacgggcccaagtgttcgccncaccccacancggtctgaacac

SEQ ID NO: 9219 - DNA, 368 bp, Homo sapiens
  misc_feature (301)..(301): "n" may be a, t, c, g, other or unknown
  misc_feature (321)..(321): "n" may be a, t, c, g, other or unknown
  misc_feature (329)..(329): "n" may be a, t, c, g, other or unknown
  misc_feature (337)..(337): "n" may be a, t, c, g, other or unknown
  misc_feature (347)..(347): "n" may be a, t, c, g, other or unknown
ctggttgcacatgtttgttttctttattgaaagacaatacagaaatgatgaaacaatacctcaagggtcttgaacatggatcaaatgacagaagtctttaatgcaatggcacagaagcttctggcatcagcacctgcaagccctgttcagtcatcattcatgatcgccaaatactccttctggtgttcaaccagcttcaggaatacttggtatttcttatcatagtattttttatcctgtagtctcgggaacacaactttcccgactttgctcatttttgccattgcttcctgtacagaancgaaatcccctgaggcacangcacccanaacagcancacccacaanaacggactccccctcttgcga

SEQ ID NO: 9220 - DNA, 541 bp, Homo sapiens
  misc_feature (21)..(21): "n" may be a, t, c, g, other or unknown
  misc_feature (174)..(174): "n" may be a, t, c, g, other or unknown
  misc_feature (225)..(225): "n" may be a, t, c, g, other or unknown
  misc_feature (230)..(230): "n" may be a, t, c, g, other or unknown
  misc_feature (257)..(257): "n" may be a, t, c, g, other or unknown
  misc_feature (259)..(259): "n" may be a, t, c, g, other or unknown
  misc_feature (291)..(291): "n" may be a, t, c, g, other or unknown
  misc_feature (349)..(349): "n" may be a, t, c, g, other or unknown
  misc_feature (376)..(376): "n" may be a, t, c, g, other or unknown
  misc_feature (402)..(402): "n" may be a, t, c, g, other or unknown
  misc_feature (410)..(410): "n" may be a, t, c, g, other or unknown
  misc_feature (414)..(414): "n" may be a, t, c, g, other or unknown
  misc_feature (453)..(453): "n" may be a, t, c, g, other or unknown
  misc_feature (498)..(498): "n" may be a, t, c, g, other or unknown
  misc_feature (512)..(512): "n" may be a, t, c, g, other or unknown
  misc_feature (534)..(534): "n" may be a, t, c, g, other or unknown
  misc_feature (538)..(538): "n" may be a, t, c, g, other or unknown
gtttttatatttttttttttnactccgtgtgcagtgttttaatttatccatgtacataggcaattatcataatttgaaggacactttttacttattagactataagaaaaactgtacagaaagtttatactataaaattacatccctaagtgattagggtcctcagtaacacanaaataaaaaattgaaaagggtcattgctcggcaatccacataactacagantaaancgcaagctattgttcgtgatcagaaananacttcataaaaacatcttcacatattccctancattatgccctactagtaaaaggaaggcctatgacaatgccattgtttattttgtgtnacgcagcccttctatttccctcaaaantttttttttcctgctataagataaanaaaagggntgtntccctaaaatatatacctaatgaaaaattatctccacanaaactcccacgttttccattttccctggtctcccctgaaattccncctggaacttcccncaccaattttccaaccctttcnttgnttg

SEQ ID NO: 9221 - DNA, 449 bp, Homo sapiens
  misc_feature (6)..(6): "n" may be a, t, c, g, other or unknown
  misc_feature (17)..(17): "n" may be a, t, c, g, other or unknown
  misc_feature (137)..(137): "n" may be a, t, c, g, other or unknown
  misc_feature (198)..(198): "n" may be a, t, c, g, other or unknown
  misc_feature (272)..(272): "n" may be a, t, c, g, other or unknown
  misc_feature (356)..(356): "n" may be a, t, c, g, other or unknown
  misc_feature (380)..(380): "n" may be a, t, c, g, other or unknown
  misc_feature (406)..(406): "n" may be a, t, c, g, other or unknown
  misc_feature (445)..(446): "n" may be a, t, c, g, other or unknown
cttttnttttttttttnttggagacagggtcactctctgttgcccaggttagagtgcagtggcgcgatcacagctcactgtatccttgaactcctgggctcaagcaattcttctgcctcagcttcacaagcatgaancaccatgcctggctaatttttaaaattttttctagaaacagcgtttcactatgttgcacangctagccttgaactcctgggctcaagtgatccttcagccttggcctcctaaagcactgggactacaggcatgancactatgcctgccccctactgccccttttttaaagtacctgggaaaaacaaagtttaaatattctatttttgtgcccctaattnacatacaatttaagacactttcanaattttaccttattgaaaaataattnggttgaaaactttactttcgaatccctttgctgttttgnngcc

SEQ ID NO: 9222 - DNA, 375 bp, Homo sapiens
  misc_feature (204)..(204): "n" may be a, t, c, g, other or unknown
  misc_feature (296)..(296): "n" may be a, t, c, g, other or unknown
  misc_feature (312)..(312): "n" may be a, t, c, g, other or unknown
  misc_feature (316)..(316): "n" may be a, t, c, g, other or unknown
  misc_feature (365)..(365): "n" may be a, t, c, g, other or unknown
  misc_feature (374)..(374): "n" may be a, t, c, g, other or unknown
gaaatacaaatattctttggtttacttatcaaagtaaaaaataacaaaaatcttatcagttaaataaaaaagtgacattctttatcaagccttcttaaacactgaaacgcacgcatttttatgctcatgttctttagcagtatttctccccttttgcccctcattcccctaaattgtttcaatgagttcatctgtagaatgaanattgttacctttcttaatgctacttactttttattatctcaatatcaagaccaatctagacttttttgtctcttacatgtgaaatggatgtnaaaaatggaaaattcnccancactttttaagataacataaaagaagcctaagccaagcctttccagggngggaacccnc

SEQ ID NO: 9223 - DNA, 387 bp, Homo sapiens
  misc_feature (45)..(45): "n" may be a, t, c, g, other or unknown
  misc_feature (48)..(48): "n" may be a, t, c, g, other or unknown
  misc_feature (247)..(247): "n" may be a, t, c, g, other or unknown
  misc_feature (322)..(322): "n" may be a, t, c, g, other or unknown
  misc_feature (340)..(340): "n" may be a, t, c, g, other or unknown
  misc_feature (350)..(350): "n" may be a, t, c, g, other or unknown
  misc_feature (369)..(369): "n" may be a, t, c, g, other or unknown
  misc_feature (386)..(386): "n" may be a, t, c, g, other or unknown
aaattcactacacaaactctgtgatgaggtaagaaaagcgacganggncttcttgctttttttcttaaaccattaaagtaaaaccgtagttttctacagagtacaacacaagttcacacaaaaaagacattttcttttgcaaatcaaaacaggaaagaaaggaaaagctcaaacaaggtgaaggaaaagcatttctacagctgaatcacgactgagttgatcgaagcccattgttgctgcacaacanactgtgcgtttggtcacagcggcaatttttttttctcttcacattgtgaaatcactttacattgttttctagtanaaaaggcaaaaaattgtncaaaaccccnagtgttaaatacgtttgtnccaataaaacactcccnc

SEQ ID NO: 9224 - DNA, 344 bp, Homo sapiens
  misc_feature (269)..(269): "n" may be a, t, c, g, other or unknown
  misc_feature (286)..(286): "n" may be a, t, c, g, other or unknown
  misc_feature (299)..(299): "n" may be a, t, c, g, other or unknown
  misc_feature (326)..(326): "n" may be a, t, c, g, other or unknown
  misc_feature (331)..(331): "n" may be a, t, c, g, other or unknown
ctctgcaaaagacactttaaaaacatgatctcttgaaaaaataaatcgcaacaattttcaacttcatgcaaatcgagggcagaggagtgtgaataatgataaaagggagagctgaaaaaataaacatgattctatttgggcggaatcagttcatctccaaaatcttgaacgccatgccccggctgccaacttcacatctctcgtttccattcctccctcactgtcctcctccgcggctcctgggaagggcacaaggtctttggtctcangatgttgcagggtacancatggcggacaanctcacaccactgaaatcatgggcaaanaaggncgggccctccgga

SEQ ID NO: 9225 - DNA, 555 bp, Homo sapiens
  misc_feature (103)..(103): "n" may be a, t, c, g, other or unknown
  misc_feature (218)..(218): "n" may be a, t, c, g, other or unknown
  misc_feature (372)..(372): "n" may be a, t, c, g, other or unknown
  misc_feature (374)..(374): "n" may be a, t, c, g, other or unknown
  misc_feature (417)..(417): "n" may be a, t, c, g, other or unknown
  misc_feature (425)..(425): "n" may be a, t, c, g, other or unknown
  misc_feature (472)..(472): "n" may be a, t, c, g, other or unknown
  misc_feature (483)..(483): "n" may be a, t, c, g, other or unknown
  misc_feature (497)..(497): "n" may be a, t, c, g, other or unknown
  misc_feature (524)..(524): "n" may be a, t, c, g, other or unknown
  misc_feature (540)..(540): "n" may be a, t, c, g, other or unknown
agaatctctgtacgtcattttattttattttatttatttattttgagacacagtcttgctttgtcacccaggctggagtgcagtgcagtggcatgatctcggntcactgcaacctccacctccagggttcaagtgattctcctgcctcagcctcctgagtagctgggactacagatgcccgccactaagcctggctaatttttgtatttttagtaaanacggggtttcaccatgttgaccaggctgttctagatcttctgacctcatgatccgctcgccttggcctcccaaagtgctgggattacaggtgtgagccactgcacccagcctaaaagtcattttaatttgtaagatatgtttactgttttagananacagaagctaacttttcattttcaaggactgctggaacaatcntccatganttcttgaagttgaataacaggaaactgtcttgttttccaaccatttngctactgttanaaactgcctggtcncaaaaccccctccaataaactgcagtnctattgggcaaccctnggttgaaaatttcac

SEQ ID NO: 9226 - DNA, 329 bp, Homo sapiens
  misc_feature (87)..(87): "n" may be a, t, c, g, other or unknown
  misc_feature (256)..(256): "n" may be a, t, c, g, other or unknown
  misc_feature (272)..(273): "n" may be a, t, c, g, other or unknown
  misc_feature (287)..(287): "n" may be a, t, c, g, other or unknown
  misc_feature (297)..(297): "n" may be a, t, c, g, other or unknown
agattagaataaaaatttatttttgtaaagaattatattttgtatttgcaaaagctgaaaatgctcataaaaattaccagcccagancttggatttccaccggatccaccacgtgagacaaaagagtctgtcacttcttcttgccaggtttgagggccttttctagaccttggatgtgttttcgagggagctgatactcttcaagcaatagccagccgaggtggtggacctggtttccctggatctgcacctgaangctgtccttggccccnngggcaggattgacngtggtgctancctggcatccctgctgaaagatggcaccctga

SEQ ID NO: 9227 - DNA, 431 bp, Homo sapiens
  misc_feature (348)..(348): "n" may be a, t, c, g, other or unknown
  misc_feature (378)..(378): "n" may be a, t, c, g, other or unknown
  misc_feature (393)..(393): "n" may be a, t, c, g, other or unknown
  misc_feature (401)..(401): "n" may be a, t, c, g, other or unknown
  misc_feature (408)..(408): "n" may be a, t, c, g, other or unknown
cttattaaaaaatatatttattaatttttacacctgctgcatagcacaagaatattaacactataactccctgaaaggtacaataaatgttccacatttaaataacaggaataagggtcaacattttcacccagtggggtcagctttagcatctcatgaaagtgctttttagacctagatatcttaagagtttttttgaaagggatacttccaagtcagaaaacaagaagatcaaaacaataggtttttccagaataacaggaattttacatgatgaaatgtctatttctgtcggtacaaatcaacgataaaaacaaaatctacatccaacctactccaaaatactcncactgggactgaatgaagtctacagtgtcnatgttgtcttgaganaagccccnatatccnccctggctacatacatgttttcc

SEQ ID NO: 9228 - DNA, 437 bp, Homo sapiens
  misc_feature (2)..(2): "n" may be a, t, c, g, other or unknown
  misc_feature (21)..(21): "n" may be a, t, c, g, other or unknown
  misc_feature (27)..(27): "n" may be a, t, c, g, other or unknown
  misc_feature (41)..(41): "n" may be a, t, c, g, other or unknown
  misc_feature (81)..(81): "n" may be a, t, c, g, other or unknown
  misc_feature (263)..(263): "n" may be a, t, c, g, other or unknown
  misc_feature (289)..(289): "n" may be a, t, c, g, other or unknown
  misc_feature (301)..(301): "n" may be a, t, c, g, other or unknown
  misc_feature (388)..(388): "n" may be a, t, c, g, other or unknown
  misc_feature (390)..(390): "n" may be a, t, c, g, other or unknown
  misc_feature (402)..(402): "n" may be a, t, c, g, other or unknown
  misc_feature (429)..(429): "n" may be a, t, c, g, other or unknown
  misc_feature (435)..(435): "n" may be a, t, c, g, other or unknown
cntgtttaactttttaattcnttttcnttttaaattggtcntgctaatgaacacagtaatatgggtttacagatttcctanaccaatcctcaatttgggctcagacttgaatatacgtcatccaagagaactttttcgttccttcttaaggtgtttaaaaaataaatggctataaagtatggggagaaaacatttaagaataaggtcagagcacacattcagatacactttggactcagatgttctcttagagaactgtaganataaaatgctaattatagtacatgtnaacatctgttcnaattgataaagagtgaacataaaataataggatgatattattgttacagtcgtctccagacaggaactggtcttgctcttgcagtcncnaagctaaattcnggcgatgatgatctctctctgctgganaaaganaa

SEQ ID NO: 9229 - DNA, 628 bp, Homo sapiens
  misc_feature (196)..(196): "n" may be a, t, c, g, other or unknown
  misc_feature (237)..(237): "n" may be a, t, c, g, other or unknown
  misc_feature (272)..(272): "n" may be a, t, c, g, other or unknown
  misc_feature (375)..(375): "n" may be a, t, c, g, other or unknown
  misc_feature (457)..(457): "n" may be a, t, c, g, other or unknown
  misc_feature (500)..(500): "n" may be a, t, c, g, other or unknown
  misc_feature (507)..(507): "n" may be a, t, c, g, other or unknown
  misc_feature (548)..(548): "n" may be a, t, c, g, other or unknown
  misc_feature (588)..(588): "n" may be a, t, c, g, other or unknown
catgtctatttgattgcttttttcctgtaaagacagtcattaatgctcttcaccaaatgttttcatttcttctgacacatgccaagatcgcacttccccatccttttgaagttacttgcagccatgataattgccctggcccaatgcaatgtgaacaggtaaaagacatattttacttctgggcctaagcttcaanaaccagtgcatattttgttgtcttctctctctctaatgcanataacagaagtcccatgagcctgggtcccacaaanagacatggagtgtagcatccagcaatgtcgttataaacttgtagtgggaattaacaatacacatttgttgttataaactaagatttggttataaaccactaancataacctagccactgctgactgattaattcacaaagtggctatatcactttgtgtttttaagtggcaataatttaactcanttctctattagatacctcaattcccaatatttttttttctganaaatgcntgtttattttatcccaaaatattaaattttaaaaatttttnttcccaaaatttccgttgaaaaggtggtttttggttaatngggaattctccctggggattctgaaaatttggggcccccc

SEQ ID NO: 9230 - DNA, 403 bp, Homo sapiens
  misc_feature (124)..(124): "n" may be a, t, c, g, other or unknown
  misc_feature (190)..(190): "n" may be a, t, c, g, other or unknown
  misc_feature (193)..(193): "n" may be a, t, c, g, other or unknown
  misc_feature (198)..(198): "n" may be a, t, c, g, other or unknown
  misc_feature (310)..(310): "n" may be a, t, c, g, other or unknown
  misc_feature (320)..(320): "n" may be a, t, c, g, other or unknown
  misc_feature (342)..(342): "n" may be a, t, c, g, other or unknown
  misc_feature (364)..(364): "n" may be a, t, c, g, other or unknown
  misc_feature (381)..(381): "n" may be a, t, c, g, other or unknown
ccatttgtacattattttatttttagagtattttcacatacttgcttttttgttgttgttgttaacttcccacagtatcacacggttgctttcatttgagccccccacatccctgtgggtgaanattggcagacttagcttcatttgtcatattgtctgaggcttaaaaagactgaatggcttggccaanatnacaangcagtaaaaagcggggacttgaacctggtggtcctgctctcggttcatttgtatttctcttcatgctcatccctgaacaccacggggaatggcaggagacctctcccacaangacacctaanaaagatttggggcctctgtctntaacaaataaaagctgacctcngacaaaaaaatcttcantctgttggcctgttgggcttcc

SEQ ID NO: 9231 - DNA, 362 bp, Homo sapiens
  misc_feature (131)..(131): "n" may be a, t, c, g, other or unknown
  misc_feature (135)..(135): "n" may be a, t, c, g, other or unknown
  misc_feature (177)..(177): "n" may be a, t, c, g, other or unknown
  misc_feature (300)..(300): "n" may be a, t, c, g, other or unknown
  misc_feature (331)..(331): "n" may be a, t, c, g, other or unknown
  misc_feature (343)..(344): "n" may be a, t, c, g, other or unknown
  misc_feature (356)..(356): "n" may be a, t, c, g, other or unknown
cactgctaaaatattttattttaaaatgtaccacagtgaatggatgtatccatactggttcttataaatgtacacatacacatccatatatttgacaaagtatatatatgaactggttaaagacctatccnaaanaggaaatatttctagaaagttcatgtgtttatacttcattanacaattaaaacttatttgaactgatgaagttttagttgcttagcaatgactaataataccaatgcctgtcaataatgacaactaaattgagaactataaatttcactgctgtgccttgggtcnaaattttcaatgatggaatcctaaataagtnacagttattccnntaatggggtttnttttcc

SEQ ID NO: 9232 - DNA, 390 bp, Homo sapiens
  misc_feature (43)..(43): "n" may be a, t, c, g, other or unknown
  misc_feature (60)..(60): "n" may be a, t, c, g, other or unknown
  misc_feature (96)..(96): "n" may be a, t, c, g, other or unknown
  misc_feature (307)..(307): "n" may be a, t, c, g, other or unknown
  misc_feature (320)..(320): "n" may be a, t, c, g, other or unknown
  misc_feature (373)..(373): "n" may be a, t, c, g, other or unknown
  misc_feature (380)..(380): "n" may be a, t, c, g, other or unknown
  misc_feature (388)..(388): "n" may be a, t, c, g, other or unknown
aaaggtatatattttaaacgtgtgtcgtctacctaagtaaganaatagtctttgaactangtactatgtttgctgtttgggtgatgggttcactanaagcctaaaccccagcattactcaatatatccatctatcaaacctacgtgtgtacccccctagatctataataaaagtaaattaaaacaaatcaaataccagtcaactatttggttgactttggttgtactgattaactggaaatgtgcctctgaagccacacagccagagcaactggctttttgtcattcccaatgaaaagccttgaaanatggttctattanataacgggccacactgaagctaactgtgcatctagatcacatcaaagcagtanaagtganatttagcnca

SEQ ID NO: 9233 - DNA, 447 bp, Homo sapiens
  misc_feature (75)..(75): "n" may be a, t, c, g, other or unknown
  misc_feature (336)..(336): "n" may be a, t, c, g, other or unknown
  misc_feature (367)..(367): "n" may be a, t, c, g, other or unknown
  misc_feature (394)..(394): "n" may be a, t, c, g, other or unknown
  misc_feature (433)..(433): "n" may be a, t, c, g, other or unknown
  misc_feature (436)..(436): "n" may be a, t, c, g, other or unknown
  misc_feature (442)..(442): "n" may be a, t, c, g, other or unknown
acgttgcttcaaaatatttaatacgtgttagacacgtaaaagttacatttttatacaaaaatcaatacaacgaangagaaaatactgtacaaaaaccttatcagctcccccaacctttatacaacaaagactgggagtcaccatatctacaaaaccataaggtctttccacttcgggcttctgtctgtaaactctcattaaacactttttaaaagcactgtgtagtacttctgacctagagcttttaaaaatatatcttttctctataaactccattatttccaagcttgaactcttctgtgaagttcgtcaagctttttctcccctgcggggaancaaaggacgttaatacgcccctttcctagantaatcacaggatataaacgtttcctcnttgggaaaaaaaaggtggggagggacaaaaggaatccanttntttgcncttgg

SEQ ID NO: 9234 - DNA, 403 bp, Homo sapiens
  misc_feature (126)..(126): "n" may be a, t, c, g, other or unknown
  misc_feature (290)..(290): "n" may be a, t, c, g, other or unknown
  misc_feature (306)..(306): "n" may be a, t, c, g, other or unknown
  misc_feature (309)..(309): "n" may be a, t, c, g, other or unknown
  misc_feature (365)..(365): "n" may be a, t, c, g, other or unknown
  misc_feature (378)..(378): "n" may be a, t, c, g, other or unknown
  misc_feature (398)..(398): "n" may be a, t, c, g, other or unknown
cagcttttaactgtttattataaagacatatttacacagaacaatctttacaaacattgaacacaggggaagggaacaatttcttaatgaacagggccttaatatctttgtataaattagtataanaatcataaacaaccactttaaataaggcagcccccctagcccacccactaccctcttctgttccctatctcccagctttcttagccatcccccactttctccccttccccacggggctgggcttggctgcaggtcatggcaggccgatgaggcaggagacacanaaaggaagggggaaanaangcccaatccctgatgggggcgtcagtggcaaaaaaaactttctgggcaccgaccantccccactccaancatgagcctttaagcagcancagca

SEQ ID NO: 9235 - DNA, 546 bp, Homo sapiens
  misc_feature (13)..(13): "n" may be a, t, c, g, other or unknown
  misc_feature (158)..(158): "n" may be a, t, c, g, other or unknown
  misc_feature (338)..(338): "n" may be a, t, c, g, other or unknown
  misc_feature (399)..(399): "n" may be a, t, c, g, other or unknown
  misc_feature (412)..(412): "n" may be a, t, c, g, other or unknown
  misc_feature (487)..(487): "n" may be a, t, c, g, other or unknown
  misc_feature (505)..(505): "n" may be a, t, c, g, other or unknown
  misc_feature (508)..(508): "n" may be a, t, c, g, other or unknown
  misc_feature (519)..(519): "n" may be a, t, c, g, other or unknown
  misc_feature (545)..(545): "n" may be a, t, c, g, other or unknown
ggctatgtaaggnatttttctttattatttttcagtttatcttagtaatgccagaaaaataacagccgttattttcactttaaatgcaaaccaaatactgctgcacacagagtacaaagattacctatgaacatggttaggtacaaaggccatattanatgtatagaccacactttgttcttacatcaaagaccgaccgacagagcaattttttgacaattattttagcaaataaccgtgctactaaacaaaggcaaatacacatatatacacaaacacgtctcaactaaaattatacatgtcactttgacaaacaaattctctggtggtttcaccanatatttgcaccccaaagttccctgcccaaatcccgaccccaaatgctgacttgatctgaanaaaaaaattaganatgttcttaattaaaggcacatttggcagctactgaaagtggcatgcatctggcacaggtgcctcccctaagccnaccacatgttccttccancanctgttatgcanctgtttccttgaatggtatccatgtna

SEQ ID NO: 9236 - DNA, 521 bp, Homo sapiens
  misc_feature (18)..(18): "n" may be a, t, c, g, other or unknown
  misc_feature (402)..(402): "n" may be a, t, c, g, other or unknown
  misc_feature (437)..(437): "n" may be a, t, c, g, other or unknown
  misc_feature (457)..(457): "n" may be a, t, c, g, other or unknown
  misc_feature (470)..(470): "n" may be a, t, c, g, other or unknown
  misc_feature (482)..(482): "n" may be a, t, c, g, other or unknown
  misc_feature (505)..(505): "n" may be a, t, c, g, other or unknown
cttgaggtgtgaccatanattgtctattcatgctctttcagacttttgatataggcatttaatgccataaactttcctcacagcactgcttttactgtatctcggaagttttgataggtttcttgttttgttttgttttgttttgttttttactattatcattcagtcaatttttttcatttccttcttgattttattcttgacccaacaatcattcagaagcaagttatttaatttccgtgtatttgcgtggttttgagggttattctcagtgttgatttcctatgttattccagtggtctgagagagtacttgatataatttcgatttttaaaaatttgttgagacttcttttgtggcctatcatgtatctgtcttggcgaaatgttccatgtgctgatnaataaaaggtatattctgcattgttaggtaaaagntcctgtaaatatccgttaantccatttattgtnggggtatatttnaattccatggtttcctttgctgnactttccggtgggtaa

SEQ ID NO: 9237 - DNA, 451 bp, Homo sapiens
  misc_feature (178)..(178): "n" may be a, t, c, g, other or unknown
  misc_feature (300)..(300): "n" may be a, t, c, g, other or unknown
  misc_feature (335)..(335): "n" may be a, t, c, g, other or unknown
  misc_feature (376)..(376): "n" may be a, t, c, g, other or unknown
  misc_feature (407)..(407): "n" may be a, t, c, g, other or unknown
  misc_feature (419)..(419): "n" may be a, t, c, g, other or unknown
  misc_feature (445)..(445): "n" may be a, t, c, g, other or unknown
  misc_feature (447)..(447): "n" may be a, t, c, g, other or unknown
cccacccacataaactgtatttgtcactattatacacaatatggtgccatcatgcatattttgtacatttgatcaaccaatatttatataaaactttcataaacactttcaaacagttttaccccacagggtgggcaaaggtgcttgtcaatataataaaactgaacaacagtggtanaaaaaggtacacttgtacttatcttcaagtttaaaatgtaaattttttctgttcaatggccactacctcatattatttttaggatctgggatcggacttagcaacacattatgactttcaanaagttgagctcactgttttgtggcgttctttgcanaaacaccatgaacttccggggtgccccatgttgctgacaantgtcaaaaacaactggtgtccacctgacttnaggctggacttntgttataggcactttgttggccatancncccc

SEQ ID NO: 9238 - DNA, 392 bp, Homo sapiens
  misc_feature (14)..(14): "n" may be a, t, c, g, other or unknown
  misc_feature (170)..(170): "n" may be a, t, c, g, other or unknown
  misc_feature (172)..(172): "n" may be a, t, c, g, other or unknown
  misc_feature (179)..(179): "n" may be a, t, c, g, other or unknown
  misc_feature (306)..(306): "n" may be a, t, c, g, other or unknown
  misc_feature (312)..(312): "n" may be a, t, c, g, other or unknown
  misc_feature (348)..(348): "n" may be a, t, c, g, other or unknown
  misc_feature (355)..(355): "n" may be a, t, c, g, other or unknown
  misc_feature (378)..(378): "n" may be a, t, c, g, other or unknown
agaatgagttgtanagttttatttttgtgaatatagtgagtgacagatggcaattacatgaggatatttgaacgaaggtacataagcctaaacaatttcacctaggtaaaatattgatgtcataaccaaactatatggccccgtttcataaaggttactatattctatananagtgaanaggtggcctttctatcccagcttaccctattcttgttattgttcaaattctcctgaagcttgcataactagctgccatcaggtaaatgctattggctagcagaagactgcagttctgttaatattanaaccancagggggaacttgggaacttgacattaaaaatctanaaaacanaattttaggatgggtctcgttanaaacctgaattgtt

SEQ ID NO: 9239 - DNA, 211 bp, Homo sapiens
  misc_feature (2)..(2): "n" may be a, t, c, g, other or unknown
  misc_feature (34)..(34): "n" may be a, t, c, g, other or unknown
  misc_feature (41)..(41): "n" may be a, t, c, g, other or unknown
  misc_feature (54)..(54): "n" may be a, t, c, g, other or unknown
  misc_feature (133)..(133): "n" may be a, t, c, g, other or unknown
  misc_feature (136)..(136): "n" may be a, t, c, g, other or unknown
  misc_feature (195)..(195): "n" may be a, t, c, g, other or unknown
  misc_feature (204)..(204): "n" may be a, t, c, g, other or unknown
  misc_feature (209)..(209): "n" may be a, t, c, g, other or unknown
anagtgcattaaataaatataaattttattaaanacactcncatagcattatcnggaatgatataataataaacagctttcaaataacctgcattcataacattacaatacttacagtatttataaccatccncanatcttataaaccaaacatctcatgaaaatgaaatgaagctagtttttaaaaaagcatanaaaaatgcncacanaa

SEQ ID NO: 9240 - DNA, 367 bp, Homo sapiens
  misc_feature (12)..(12): "n" may be a, t, c, g, other or unknown
  misc_feature (14)..(14): "n" may be a, t, c, g, other or unknown
  misc_feature (39)..(39): "n" may be a, t, c, g, other or unknown
  misc_feature (116)..(116): "n" may be a, t, c, g, other or unknown
  misc_feature (150)..(150): "n" may be a, t, c, g, other or unknown
  misc_feature (166)..(166): "n" may be a, t, c, g, other or unknown
  misc_feature (174)..(174): "n" may be a, t, c, g, other or unknown
  misc_feature (192)..(192): "n" may be a, t, c, g, other or unknown
  misc_feature (322)..(322): "n" may be a, t, c, g, other or unknown
  misc_feature (328)..(328): "n" may be a, t, c, g, other or unknown
  misc_feature (345)..(345): "n" may be a, t, c, g, other or unknown
  misc_feature (358)..(358): "n" may be a, t, c, g, other or unknown
  misc_feature (365)..(365): "n" may be a, t, c, g, other or unknown
gagatagagtcncnctctgttgcccaggctggagtgcantggcgcaatcttggctcacttctacctctgcctcctgagccccaatacaagcaattctccttcctcagcctcccaantaactgggatacaggcatgcaccaccatgcccanataatttttgtatttntagtaganacagagtttctccatgtnggccaggctggtcttgaactccggaccttgtgatccaaccgcctcggcctcccaaagtgctggggttacaggtgtgagccaccacgcccagccaggatgcaatcttattggtgtgtcacttttaccccangaagcnaaaaagtggaatgagtnagctggtacgatnaactgtnat

SEQ ID NO: 9241 - DNA, 492 bp, Homo sapiens
  misc_feature (332)..(332): "n" may be a, t, c, g, other or unknown
  misc_feature (369)..(369): "n" may be a, t, c, g, other or unknown
  misc_feature (427)..(427): "n" may be a, t, c, g, other or unknown
  misc_feature (446)..(446): "n" may be a, t, c, g, other or unknown
  misc_feature (470)..(470): "n" may be a, t, c, g, other or unknown
  misc_feature (479)..(479): "n" may be a, t, c, g, other or unknown
  misc_feature (486)..(486): "n" may be a, t, c, g, other or unknown
gtagagatcaggtctatgttgcccaggctggtctcgaactcctgggctcaggcgatcctctcacctcagcctcccaaagcgctgggattccaggcgtgagacaccatgcctggcctgtgtttttaaacccatgtcacaggacggtattcagcctgaacagtattcctgaacagaagacagggaggaaagccagccacacagcaatacacgcagcaggatgcagcttcggtcacattcaaaaagtgacctcatgctcatggctgcgcacatgcagattcagaaaaaacaaacccacgtgccaagctcctggccatggctgctcagggtattcngggcgcgggacttggggaaggggacaaaggcccccanggaaacaatttaaccaagggcttaaaatgctggccatcttcaacactgacactgtcancaatggctgcttctgggtnaggggaactggatactgtcatttntctatttgnacagttnttaaaa

SEQ ID NO: 9242 - DNA, 509 bp, Homo sapiens
  misc_feature (431)..(431): "n" may be a, t, c, g, other or unknown
  misc_feature (459)..(459): "n" may be a, t, c, g, other or unknown
  misc_feature (468)..(468): "n" may be a, t, c, g, other or unknown
  misc_feature (477)..(477): "n" may be a, t, c, g, other or unknown
aagaattttaagtacattttattaacaatgtatccctttgataagattatgcttcaggaggcttttaatgcccttgacataaactatacacattatacaaaaacaagaaaatcacaacaaaaaaaatcaaggtgagcaaaaccatttggggacaaatcttatttaaattatacacaactcaatgaaatattcttacagaaaaaatataaatactttttctttctatgttacagttatacaatataaatcagatttcaatgtctgttcagtgacctacaaacaccagaacctccaaatatgtagcagcgtattactaaataaaaaagaagaaactcatgtggttagagagcattaagtctgagatttttttcacaattccttaccacttttcaaaactagtttacaccatttgttttacaatgcagctttanggttctgacaggtattttgttcaattanctataaaanttttttccntccccccccctggccccaaaaattggctttgt

SEQ ID NO: 9243 - DNA, 499 bp, Homo sapiens
  misc_feature (250)..(250): "n" may be a, t, c, g, other or unknown
  misc_feature (253)..(253): "n" may be a, t, c, g, other or unknown
  misc_feature (331)..(331): "n" may be a, t, c, g, other or unknown
  misc_feature (353)..(353): "n" may be a, t, c, g, other or unknown
  misc_feature (371)..(371): "n" may be a, t, c, g, other or unknown
  misc_feature (412)..(412): "n" may be a, t, c, g, other or unknown
  misc_feature (440)..(440): "n" may be a, t, c, g, other or unknown
ctaaacttctcttctcgcttcatttcattcttttgatcttcaatcactgatatcctttcttccagttgattgaattggctactgaagcttgtgcattcatcacgtagttctcatgccctgggttttcagctccatgaggtcatttaaggacttctctacactggttattttagttagccattcatctaatcttttttcaaggtttttagcttctttgcgatgggttcagacttcctcctttagctcgganaantttgattgtctgaagcctacttctctcaactcgtcaaagtcattctctgtccagctttgttctgttgctggtaagganctgcgttcctttggaaaggaanaagcgctctgatttttanaattttcagcttttctgctctgttttttccccatctttgtnaatttaactacctttgggtcttgaaganggtgatttcaaatggggttttggggttgatttcccccgtttgttatttccctctaacta

SEQ ID NO: 9244 - DNA, 570 bp, Homo sapiens
  misc_feature (386)..(386): "n" may be a, t, c, g, other or unknown
  misc_feature (424)..(424): "n" may be a, t, c, g, other or unknown
  misc_feature (427)..(427): "n" may be a, t, c, g, other or unknown
  misc_feature (463)..(463): "n" may be a, t, c, g, other or unknown
  misc_feature (489)..(489): "n" may be a, t, c, g, other or unknown
  misc_feature (530)..(530): "n" may be a, t, c, g, other or unknown
  misc_feature (538)..(538): "n" may be a, t, c, g, other or unknown
  misc_feature (561)..(561): "n" may be a, t, c, g, other or unknown
  misc_feature (568)..(568): "n" may be a, t, c, g, other or unknown
atcttctcacatctttattatgtattttataatcctagctcaaaaatcactcttgtacttttagatcacaaatttgcctttaagtaacacataatacacttaaggcagatttgccttacaggtggcctcagcttctaaacaccactacactgctttatataaaaaacaaaaatcacatagaagagaatctagtgacatctttcttggtattttaaacttaaaaactgcataataaattgagttcccataaaatttcgcccttgagataggaaacaaacactactactattttatagttgcctttatctgacttgattgatgcagttataatagtattaataacataatctttaaatttgtgagggaaaaccaatactttatattcnctcctcataaaaggttcaacagcaagcataatgaaganccnttataaaatcctattgctaagtattactttaactcntaattctgcttatataagtgtttgcntatcccagttaacaaattctatttaattatcccagaacttntgccaaantttccttgaatggctttaatacncggaagnta

SEQ ID NO: 9245 - DNA, 501 bp, Homo sapiens
  misc_feature (102)..(102): "n" may be a, t, c, g, other or unknown
  misc_feature (111)..(111): "n" may be a, t, c, g, other or unknown
  misc_feature (117)..(117): "n" may be a, t, c, g, other or unknown
  misc_feature (202)..(202): "n" may be a, t, c, g, other or unknown
  misc_feature (233)..(233): "n" may be a, t, c, g, other or unknown
  misc_feature (277)..(277): "n" may be a, t, c, g, other or unknown
  misc_feature (279)..(279): "n" may be a, t, c, g, other or unknown
  misc_feature (329)..(329): "n" may be a, t, c, g, other or unknown
  misc_feature (352)..(352): "n" may be a, t, c, g, other or unknown
  misc_feature (437)..(437): "n" may be a, t, c, g, other or unknown
  misc_feature (441)..(441): "n" may be a, t, c, g, other or unknown
  misc_feature (472)..(472): "n" may be a, t, c, g, other or unknown
  misc_feature (482)..(482): "n" may be a, t, c, g, other or unknown
  misc_feature (485)..(485): "n" may be a, t, c, g, other or unknown
attttaagggacgtgttttatttcatagctttctgcaagcaaaattgctctgatacaaaatgagttcaatgatacaggtgctactgtccactcaagcaaaanaaaacctcncatgtntatgaacgcactttatacttatattcttacagtataataggtctaatatccaggatgcctctggcctcattgaaagcaatggcanaaaaatgctgcaaggtacttgaatatcatantactggcaagtgcttgaagtaacttcctgtgagttctctgtcananactgcaaaaactgcgtgtgggtgtgtttgtcttttagtcttccacctttnggtttacatttaaatcatctcanaaaatatcccctgcatgtatcattcagcttctcagaatttccataaaaacaggaaaatgtcatgaagtttccctaactccgggantgangtagtgctgtggctgtcccaaaagattttanttacctgttngtncagtactgaatttatt

SEQ ID NO: 9246 - DNA, 384 bp, Homo sapiens
  misc_feature (36)..(36): "n" may be a, t, c, g, other or unknown
  misc_feature (58)..(58): "n" may be a, t, c, g, other or unknown
  misc_feature (78)..(78): "n" may be a, t, c, g, other or unknown
  misc_feature (80)..(80): "n" may be a, t, c, g, other or unknown
  misc_feature (132)..(132): "n" may be a, t, c, g, other or unknown
  misc_feature (140)..(140): "n" may be a, t, c, g, other or unknown
  misc_feature (181)..(181): "n" may be a, t, c, g, other or unknown
  misc_feature (183)..(183): "n" may be a, t, c, g, other or unknown
  misc_feature (219)..(219): "n" may be a, t, c, g, other or unknown
  misc_feature (244)..(244): "n" may be a, t, c, g, other or unknown
  misc_feature (259)..(259): "n" may be a, t, c, g, other or unknown
  misc_feature (289)..(289): "n" may be a, t, c, g, other or unknown
  misc_feature (352)..(352): "n" may be a, t, c, g, other or unknown
  misc_feature (365)..(365): "n" may be a, t, c, g, other or unknown
  misc_feature (367)..(367): "n" may be a, t, c, g, other or unknown
  misc_feature (374)..(374): "n" may be a, t, c, g, other or unknown
aaaacctcccgtttaatatcagatgccacacatacnaaatcgatgtgcacgtcggganaaacacagcacagccaggantnctggcgcacagtgaatacgcttccgtcctttcaaaagcctttcccgaacggnatcttgtnaaaaatgccaaaaataaaatgaaaaaaactgccaggaaaananaactggctttcagtgttaacgaaatggattctccanaagcatggaaatcaggactgccacncaggggaacgcacanacaggtccaaacgcaaacgtgccccctganccccccatcttcaaacacgctcatgcacactggaggcgcttccaccgccaggccccgctgaanacacagccgggtngnccccccnccaacgggcc

SEQ ID NO: 9247 - DNA, 569 bp, Homo sapiens
  misc_feature (447)..(447): "n" may be a, t, c, g, other or unknown
  misc_feature (477)..(477): "n" may be a, t, c, g, other or unknown
  misc_feature (505)..(505): "n" may be a, t, c, g, other or unknown
  misc_feature (509)..(509): "n" may be a, t, c, g, other or unknown
  misc_feature (540)..(540): "n" may be a, t, c, g, other or unknown
  misc_feature (552)..(552): "n" may be a, t, c, g, other or unknown
ggcttatcaaatttcaaatatattttactgtgctgaacaatatattctaatgctgtctaaaacacagctaaattatttttctttatttgtttatacacattcggtaatttctgaaaagcaagatttaaaaatatttattaacaaaactacccaattacaatgactgttctcccatacacgcaactattttctgtagctgtatcttcttacctcattccactttaactctgtataccgtattgatttgtgatgagatgatttattatgagaactcttagggagttctcatcttccatttctcatcaattcaaacagcaacacctttcacaagataacattaattcccttggcagggcagaagcttaagtttgttaaaagcactcactgaaaaacatttttaaatttataggtcatataaaataatttacaaagagacagatgacttcnaatattatttggcagtcaccttactatgtngaaacataaatgaaacaatctgtccacnaaanaccatcccttttggccttttaaaggaatttnttttgggaattnttttctgcaggccttcc

SEQ ID NO: 9248 - DNA, 525 bp, Homo sapiens
  misc_feature (461)..(461): "n" may be a, t, c, g, other or unknown
  misc_feature (477)..(477): "n" may be a, t, c, g, other or unknown
  misc_feature (486)..(486): "n" may be a, t, c, g, other or unknown
  misc_feature (498)..(498): "n" may be a, t, c, g, other or unknown
  misc_feature (523)..(523): "n" may be a, t, c, g, other or unknown
caggggaaggtataatttttattgacgtgtcctcagcacaaggtctgttttcaattttctgagaaatcaacttgagtaacgtataaaaattaaaacaacactgaactttcgttccagttgctgtcaccaccaagcctgctggctggcacctggaggagctgggaacaaaaggtaccatggcaggtgaaaggcccaagtgaccaacactacatgggctgatcatttcagctaaatgccttctgtttactgaaaaacatcttggatagcccagttctgcggtcaagtgtgctgtatctgcctccctgggccacctgctgggtacttgtgcagtaggaactgtgttttacacgtctctgaatcttcctcagtgcttatttctcagtggttgctgaactaatacttgctaaacaaatgaattcttctttattcagagtccatacaaatacaggtaccttcataancccaatgttactgganacataaaanttgaatcaacanaaaacaagttctccctatatcctcnta

SEQ ID NO: 9249 - DNA, 572 bp, Homo sapiens
  misc_feature (117)..(117): "n" may be a, t, c, g, other or unknown
  misc_feature (122)..(122): "n" may be a, t, c, g, other or unknown
  misc_feature (415)..(415): "n" may be a, t, c, g, other or unknown
  misc_feature (488)..(488): "n" may be a, t, c, g, other or unknown
  misc_feature (506)..(506): "n" may be a, t, c, g, other or unknown
  misc_feature (518)..(518): "n" may be a, t, c, g, other or unknown
  misc_feature (534)..(534): "n" may be a, t, c, g, other or unknown
  misc_feature (556)..(556): "n" may be a, t, c, g, other or unknown
aaattatcaacttttatttattgagcacctattgtgtgccaggccccacaccaggctcttcatatgtgtaaccaataatcacaacaaagagtcaaatatattatgtgtatgtagaanaaganaaaactgaggcttacagggactaaataatttatccgacatcaatgctggtaaaatattcaaatgcaatattcaaacccagacccagctgaccctcccacactgccatactttccccatgttgccaaaacactgctttccagagcacccagattctgaaggaggcccaggagaaactcacaatacccttggctggaaacagggaaacactcacgcacacacaaaaggaaaaatgttccaaaatatgtctctcgtgaaattccacttttggtacagaagcacatattgaaagaanatttctctccccatcatgttgggctttgcatctcccgttgctgctactgctgccttcttggccaattaactgnccatgttccatgttctcncatgcccatccntccaggattggttccngatttcctttttgaaaaaattntccccccggctgcacc

SEQ ID NO: 9250 - DNA, 567 bp, Homo sapiens
  misc_feature (98)..(98): "n" may be a, t, c, g, other or unknown
  misc_feature (355)..(355): "n" may be a, t, c, g, other or unknown
  misc_feature (369)..(369): "n" may be a, t, c, g, other or unknown
  misc_feature (534)..(534): "n" may be a, t, c, g, other or unknown
  misc_feature (538)..(538): "n" may be a, t, c, g, other or unknown
  misc_feature (543)..(543): "n" may be a, t, c, g, other or unknown
  misc_feature (551)..(551): "n" may be a, t, c, g, other or unknown
gtagaataaaatactttaaatggtttaatattgtaaaccagcccccctcccacacacactttttaataatgggttaaacttttccctttctgtaaggncatagctggttttctgactagttgcctaaacatgtttctcatataagcgaaactgaacatgctgctgctattaatcatcataaactgtaaaatgtggttttctggaaaactggtactttgggagttttataatccttttggagtctaagccagcacatctctgtgagttcattctaaaaaatgtgctttgtctttatctttagtaatccaagaccactctaaaattaaggccatcagggaaataacaaactgatgangcattttcttatantgcttttttcacctactgcttgaatgaacagatctttctgaaccattttcatcaggcctttcatcatctgaatcaaatccaaaaaatttctgacattcttttgtgcaaaaaaaaccccatttgcttctcattacataaggtggtcgggcttttgcccttctaatncttnccagnatttttanacctttttcttgaata

SEQ ID NO: 9251 - DNA, 574 bp, Homo sapiens
  misc_feature (508)..(508): "n" may be a, t, c, g, other or unknown
  misc_feature (566)..(566): "n" may be a, t, c, g, other or unknown
gcttttcaacaaagattcaacatcttttatttacatgtttatgacatacattaatggtcatacacaatttttaaactaaatctagtaacaacagaggatggaacataaaagacacaattccaaattttagtcaggttgaaatgtttttccactaactgaaagataagataaatgagcagccattataaagttatgggctgtatgtcaattcacgtcttaaaattgaaagtcagccacacagctgttaaaacaatgggaaatttgcaaatgcaaatatataatgcatgcacagctatcacatttattctttatccttaaagccatttttaaagtaaactgggagaggcaacttagtaatatgtacatcaaggcacattcttttcttgtgctttaggaatgatttacatgtgatctgcttatatcttaattttatactttataacagcttctaatacctaaaagcttaatttttaacaattattctttgagtggtagtttcccacaaaanaaatgtggcatctctcatgggtatttccaagtcagaaaattggatacctgaagaagtnggatttaa

SEQ ID NO: 9252 - DNA, 495 bp, Homo sapiens
  misc_feature (71)..(71): "n" may be a, t, c, g, other or unknown
  misc_feature (214)..(214): "n" may be a, t, c, g, other or unknown
  misc_feature (216)..(216): "n" may be a, t, c, g, other or unknown
  misc_feature (255)..(255): "n" may be a, t, c, g, other or unknown
  misc_feature (341)..(341): "n" may be a, t, c, g, other or unknown
  misc_feature (364)..(364): "n" may be a, t, c, g, other or unknown
  misc_feature (392)..(392): "n" may be a, t, c, g, other or unknown
  misc_feature (455)..(455): "n" may be a, t, c, g, other or unknown
  misc_feature (458)..(459): "n" may be a, t, c, g, other or unknown
  misc_feature (482)..(482): "n" may be a, t, c, g, other or unknown
  misc_feature (493)..(493): "n" may be a, t, c, g, other or unknown
gacagacatacttttattcttttatttttgagatggagtttcactgtcacccaggctggagtgcaatggancgatcttggctcactgcaatcctgcttgggtgacagagcgagactttgtctcaaaaaaaattcttttaattaaaaaaaaaaaaaagctttactacttcctgtggagttcataaaaagttcttccctttgttttagtcatccanantaaagtcatagggctcaaagtctttccggaagcggcganccagggtctcctcgtcttccttgctgatctgacactgcctccagtcagacttatcaggaacattaagggatggcttccctggccangaactcccttccaaactgcaaangaaaattctttttaattctgtggaaaancttttctcctgtgtcaagttcaacataaaaatatgctgctcctggctgtgcaatctgcttgangtnnaaatgctctgggaattccaacanctctatctgcngc

SEQ ID NO: 9253 - DNA, 576 bp, Homo sapiens
  misc_feature (188)..(188): "n" may be a, t, c, g, other or unknown
  misc_feature (215)..(215): "n" may be a, t, c, g, other or unknown
  misc_feature (291)..(291): "n" may be a, t, c, g, other or unknown
  misc_feature (372)..(372): "n" may be a, t, c, g, other or unknown
  misc_feature (400)..(400): "n" may be a, t, c, g, other or unknown
  misc_feature (429)..(429): "n" may be a, t, c, g, other or unknown
  misc_feature (488)..(488): "n" may be a, t, c, g, other or unknown
  misc_feature (493)..(493): "n" may be a, t, c, g, other or unknown
  misc_feature (524)..(524): "n" may be a, t, c, g, other or unknown
  misc_feature (540)..(540): "n" may be a, t, c, g, other or unknown
  misc_feature (555)..(555): "n" may be a, t, c, g, other or unknown
ctgaagtggtgaattttaatattgtataaaaaatccaacttgttccacaagtacatatgtcctatgattttatgcatacatccatatacatatatcaaggtaaagtccagtacaaaaaaacagcatttcctatggccagtgttctacagaagtaagactgtgcaaactttatcgtatagtcaaatganattgcacactaaggcaggatgaggcanaagcaagttgtgtccacagtatattacaaaataccttgcatagcttattcattctcacctggtaaattcatcttanaattctgaaggatttttttcctaaaataaatttatacaagttagtggtatacttcttgtctttgttcctgtggcaaaccangtttctcagtactgattgttttacttcncaacattattgatttaacaataacctganctttggggctctgcactgcgttcattgtaatccgtgatacaatgactacaaatgttttncgaantctaatctccacctgtttctcaggcgaattnccaggggtccaatccnctgtgtcattctccnaaacgccgtgttaaattccct

SEQ ID NO: 9254 - DNA, 446 bp, Homo sapiens
  misc_feature (110)..(110): "n" may be a, t, c, g, other or unknown
  misc_feature (233)..(233): "n" may be a, t, c, g, other or unknown
  misc_feature (245)..(245): "n" may be a, t, c, g, other or unknown
  misc_feature (250)..(250): "n" may be a, t, c, g, other or unknown
  misc_feature (397)..(398): "n" may be a, t, c, g, other or unknown
  misc_feature (422)..(422): "n" may be a, t, c, g, other or unknown
  misc_feature (429)..(429): "n" may be a, t, c, g, other or unknown
  misc_feature (437)..(437): "n" may be a, t, c, g, other or unknown
caaagagacaataatttatttttaaaaaccattaaagacttgaattaatggagagatacagaattatcatggatagaaagataacattctttccccaaattaatctatanattcaatgtaattctaataaaaaaccttaacccgattgtttaattctacataatcatttaatcctaaagttcacagaaagagcaaggggtcaagaacagtcaaaaccattttgaaatacaganaagggtgggcanagganacttccttaccggatgtcaagaatttaggataaataacagagagggcattataatcagcagggaaacgttggaccattccataaactgctaagacaactgattatccatatgggaaaataatggactttatgccataaacaaaattnntttcaaagtgaattaacaaaatanaaaggcnaaatcctnaaattttta

SEQ ID NO: 9255 - DNA, 305 bp, Homo sapiens
  misc_feature (34)..(34): "n" may be a, t, c, g, other or unknown
  misc_feature (88)..(88): "n" may be a, t, c, g, other or unknown
  misc_feature (117)..(117): "n" may be a, t, c, g, other or unknown
  misc_feature (195)..(195): "n" may be a, t, c, g, other or unknown
  misc_feature (240)..(240): "n" may be a, t, c, g, other or unknown
  misc_feature (242)..(242): "n" may be a, t, c, g, other or unknown
  misc_feature (258)..(258): "n" may be a, t, c, g, other or unknown
  misc_feature (279)..(279): "n" may be a, t, c, g, other or unknown
  misc_feature (302)..(302): "n" may be a, t, c, g, other or unknown
aaaataaaaaaggtttttgtgctttatttattcntggtccttttgagttgaaagggaaaaaagttttaatattttcaggttggtatcncaaggactgaataatacacttatgaaggntttcaaaaaaatgcttgatttgtttctaaaggaaaggctgctgatggtaatttgtgtgctgctgtgcaactggatganctggaactgtcaccggaaagcctgccagttgaggcaaattggaantnttgttctgataaaatnacatatccacagacatccccntttgctgtgtgtaagcagttgtncca

SEQ ID NO: 9256 - DNA, 597 bp, Homo sapiens
  misc_feature (37)..(37): "n" may be a, t, c, g, other or unknown
  misc_feature (431)..(431): "n" may be a, t, c, g, other or unknown
  misc_feature (506)..(506): "n" may be a, t, c, g, other or unknown
  misc_feature (514)..(514): "n" may be a, t, c, g, other or unknown
  misc_feature (583)..(583): "n" may be a, t, c, g, other or unknown
  misc_feature (585)..(585): "n" may be a, t, c, g, other or unknown
  misc_feature (593)..(593): "n" may be a, t, c, g, other or unknown
gataaactctagtatttattaaattataaattttgtnatcaaaaagaaaaatgcagaccaaaaaaacctcaaactataagactagacagcaaagcctatgggaacaccatgaaatgtgttacaaacattctgaaacataagttactggctgttttcatttccatttcaataactttactataaaatagttgttattcatctattttgaaatcccaaattcacatctattcatacattaaattatgtttcctgttcataatatcaaacatctcacaggtgccaaattttagtaatggtcttatgccaatccatgcagaaaaataagacacaatgcaggagtcagatgaggaccattaatgcacagataatgcaaacacactggccaaaagaactacagaagtttttaaaaagtattaagtaaacagacctcnagaaaactgggttattactaaacagctctcactattaacacccaagttccttacattaaataaattctcacaganactgttanacttttaattatgaatctatccttcccatacccctccacccaactccccaaatgcctactagggaagantntaagtttnttgg

SEQ ID NO: 9257 - DNA, 401 bp, Homo sapiens
  misc_feature (88)..(88): "n" may be a, t, c, g, other or unknown
  misc_feature (174)..(174): "n" may be a, t, c, g, other or unknown
  misc_feature (260)..(260): "n" may be a, t, c, g, other or unknown
  misc_feature (299)..(299): "n" may be a, t, c, g, other or unknown
  misc_feature (310)..(310): "n" may be a, t, c, g, other or unknown
  misc_feature (323)..(323): "n" may be a, t, c, g, other or unknown
  misc_feature (368)..(368): "n" may be a, t, c, g, other or unknown
  misc_feature (381)..(381): "n" may be a, t, c, g, other or unknown
  misc_feature (401)..(401): "n" may be a, t, c, g, other or unknown
aagctggaatcttgctctgtccccaagctggaatgcaatggtgtgatctcagctcactgcaacctctgcctccccggttcaagcgaanctcctgcctcagcctcccgagtagctggggattacaggcacaagccaccacgcctggctagtttttgtatttttagtaaaaatgangtttcgccatattggccaggctggtctcgaactcctggcctcaagtcatctgcctgcctcagcctcccaaggtgctgggattgcangcatgaaccaccgtgcccagccaatgactgtctcttganaagggtgtaangacttggcatacngcaaaacccaagatcaaattcctggggcctgccatggcttgggtnggggttgggaaantgttagggaagttaatcccn

SEQ ID NO: 9258 - DNA, 505 bp, Homo sapiens
  misc_feature (37)..(37): "n" may be a, t, c, g, other or unknown
  misc_feature (43)..(43): "n" may be a, t, c, g, other or unknown
  misc_feature (50)..(50): "n" may be a, t, c, g, other or unknown
  misc_feature (81)..(81): "n" may be a, t, c, g, other or unknown
  misc_feature (182)..(182): "n" may be a, t, c, g, other or unknown
  misc_feature (200)..(200): "n" may be a, t, c, g, other or unknown
  misc_feature (237)..(237): "n" may be a, t, c, g, other or unknown
  misc_feature (293)..(293): "n" may be a, t, c, g, other or unknown
  misc_feature (303)..(303): "n" may be a, t, c, g, other or unknown
  misc_feature (323)..(323): "n" may be a, t, c, g, other or unknown
  misc_feature (389)..(389): "n" may be a, t, c, g, other or unknown
  misc_feature (427)..(427): "n" may be a, t, c, g, other or unknown
  misc_feature (471)..(471): "n" may be a, t, c, g, other or unknown
  misc_feature (488)..(488): "n" may be a, t, c, g, other or unknown
  misc_feature (501)..(501): "n" may be a, t, c, g, other or unknown
  misc_feature (503)..(503): "n" may be a, t, c, g, other or unknown
attctgtaaaaatggggaatctcactatattgcccangctggncttgaantcttcgcttcaagcaatcctctcactttggnctcccaaaatgctggggattatgggcataagccactgtgcccagcctagcaaactgttcattttgaaatggttaattttatgttaagtgaatttcacctcnagtgaaaaaaaggaagangaaacagtactgtgttcatcatacgttgtcctcaaanacagcctcagttctggcctgggaccttttccactataaaacctgttcacatcagancatctgtgancaaagggcatggcactggangatttgtgggagaaatgaagtgagaacttacatggcacctcagtatcaacccctcatcctcatcanataaacctgctctccacaagcccttcccacctccccantcaacaaggctcctttcccggttcctcccatccccacccgcagnctctcctctgaatccancaattctgctccnanca

SEQ ID NO: 9259 - DNA, 593 bp, Homo sapiens
  misc_feature (102)..(102): "n" may be a, t, c, g, other or unknown
  misc_feature (188)..(188): "n" may be a, t, c, g, other or unknown
  misc_feature (329)..(329): "n" may be a, t, c, g, other or unknown
  misc_feature (387)..(387): "n" may be a, t, c, g, other or unknown
  misc_feature (443)..(443): "n" may be a, t, c, g, other or unknown
  misc_feature (456)..(456): "n" may be a, t, c, g, other or unknown
  misc_feature (544)..(544): "n" may be a, t, c, g, other or unknown
  misc_feature (582)..(583): "n" may be a, t, c, g, other or unknown
  misc_feature (585)..(585): "n" may be a, t, c, g, other or unknown
  misc_feature (592)..(592): "n" may be a, t, c, g, other or unknown
acttcagaaacatttttacttaatttctttaataaattactgcttaaacaccctatctcccaactatatttttacatttcaaaaattatttctaaaacaganttgtaattttaaaaggcacctaccatccatatgacatactgattaatataatcaggatcactgagttgatttattaatggaggaanaattcctcgtgcaaggatttccctgacaaagtatcgcatgatcttgttctggaaatctccaggaggtagcaataaatatagtaagacctcacacaaatcccttaggaatccttcttcatctttgggggaagtgcacactanatcacggcaaacctccttctccatttcaacttcaacttcaaagaaaagtatctacaanatcttctgctgtacctttcacttgatcatctttctctgttattttctgttgagccnttctgaatactcntaagtgtttgccaaagtcatctacaatgcttttattaaaataaaggtgccagtctatttcttttgacctattaccaactgaaataatnctttttgaaaattctgcccatttccaaaaaaaaaatcnncncccttant

SEQ ID NO: 9260 - DNA, 455 bp, Homo sapiens
  misc_feature (28)..(28): "n" may be a, t, c, g, other or unknown
  misc_feature (286)..(286): "n" may be a, t, c, g, other or unknown
  misc_feature (309)..(309): "n" may be a, t, c, g, other or unknown
  misc_feature (344)..(344): "n" may be a, t, c, g, other or unknown
  misc_feature (413)..(413): "n" may be a, t, c, g, other or unknown
  misc_feature (434)..(434): "n" may be a, t, c, g, other or unknown
  misc_feature (443)..(443): "n" may be a, t, c, g, other or unknown
  misc_feature (451)..(452): "n" may be a, t, c, g, other or unknown
catggtcgaaataattttatttatccanaatatacagtttaattcctctatctacacttatttacatggctaaaataacattgaaaaaagtcttttgaaaagttgaggtcataaatttcaaggcaccattgaaagtgtccacagttgcgcaaaaaaagtcctctgtaaaaaaaggggggggtcttttgaaatgcaataacttacatgcaaaaaaaagctttacacatgaatctttttcagttttccgaacttccccatatgaattcctttctttatgattttctanaacagcaaaacacagtagtcccnaaaaagagagtaagagagagcagcccatctaatanagtgtcccggaggccagcgccagcgggtgctgtaaggagcccggcggcggcaggtgggaattgattganctggctgcacttgtgtaccangatgcaaanttctccanntta

SEQ ID NO: 9261 - DNA, 535 bp, Homo sapiens
  misc_feature (108)..(108): "n" may be a, t, c, g, other or unknown
  misc_feature (255)..(255): "n" may be a, t, c, g, other or unknown
  misc_feature (479)..(479): "n" may be a, t, c, g, other or unknown
  misc_feature (481)..(481): "n" may be a, t, c, g, other or unknown
  misc_feature (483)..(483): "n" may be a, t, c, g, other or unknown
  misc_feature (493)..(493): "n" may be a, t, c, g, other or unknown
  misc_feature (528)..(528): "n" may be a, t, c, g, other or unknown
gtgatttaattatggtttatttcacagttatcaaaactaaataaacaacagggtaaaaaatatgcacagattaaatctttaatcagcacaatataagttgcttaagantactctgttcaaaataaaggtgttattaaccacaggaaaagctgtttttaagtaatctgaataaagttttactcagtttcatgactatcaaaaagtcttgatataacactacagacagaattaaggggtttaaattttaggattaanaatttagctatctgaataatttaaatttcaaacatttttctttccctacatttcactggcaaaattaacttcaactattattcaattctcctggattatgcaaaagctgctgaaaatttgatgtatgacacatttggctgacactctattgcaacctatgaatgggtttaactattacacagtattcattttcctttcaaagattttacacaatagtgacagtnananaaaatatgtnttaacaaaaaatcccggaaaatgggcctatatganaaatatc

SEQ ID NO: 9262 - DNA, 561 bp, Homo sapiens
  misc_feature (4)..(4): "n" may be a, t, c, g, other or unknown
  misc_feature (81)..(81): "n" may be a, t, c, g, other or unknown
  misc_feature (115)..(115): "n" may be a, t, c, g, other or unknown
  misc_feature (218)..(218): "n" may be a, t, c, g, other or unknown
  misc_feature (304)..(304): "n" may be a, t, c, g, other or unknown
  misc_feature (385)..(385): "n" may be a, t, c, g, other or unknown
  misc_feature (456)..(456): "n" may be a, t, c, g, other or unknown
  misc_feature (523)..(523): "n" may be a, t, c, g, other or unknown
  misc_feature (526)..(526): "n" may be a, t, c, g, other or unknown
  misc_feature (528)..(528): "n" may be a, t, c, g, other or unknown
  misc_feature (531)..(531): "n" may be a, t, c, g, other or unknown
gggncaaaaaaactttattagcttagtctccacccttttaaatgtactctaggtacaaaataaacattatacacatataanatcagtctttccaactttagaatgtataaataanaatgacattttaaaataaaatagtttagtcacagtcacacaaaactaccttctaaggaaaactgtccagtgaagccgttaaatttgtgctttcagctatgaanaattaaacttaaaatgcattcattcttcttttaatgaaaaataacctacccttggaaacagcataagcattgttatggtagtctanctcctaaatgaaaatgtggactgagttacagtttactgtagtaacctacctaagaagcctttgaaaattagcaatcgatcnaagtatttacataaattcaagcctttttcttaggacaaaaggtaacacagttccttaacctcttttaaaangaactttgaaattaaacttatggtcacacttcattccaaaatgtgcttaaatatcaaattcctctcncanangcnatgtccatttcctcgtaacctcccctgtta

SEQ ID NO: 9263 - DNA, 576 bp, Homo sapiens
  misc_feature (9)..(9): "n" may be a, t, c, g, other or unknown
  misc_feature (27)..(27): "n" may be a, t, c, g, other or unknown
  misc_feature (165)..(165): "n" may be a, t, c, g, other or unknown
  misc_feature (313)..(313): "n" may be a, t, c, g, other or unknown
  misc_feature (320)..(320): "n" may be a, t, c, g, other or unknown
  misc_feature (508)..(508): "n" may be a, t, c, g, other or unknown
  misc_feature (517)..(517): "n" may be a, t, c, g, other or unknown
  misc_feature (525)..(525): "n" may be a, t, c, g, other or unknown
  misc_feature (553)..(553): "n" may be a, t, c, g, other or unknown
  misc_feature (562)..(562): "n" may be a, t, c, g, other or unknown
gagatggantctcactctatcacccangctggggtgtaatggtgtgatcttggctcactgcaacctctgcctcctgggttcaagcaattctccttgcctcagcctcctgaatagctggggttacaggcgcctgctaccatgcctaatttttgtattttagtaaanatggggtttcaccatgttgatcaggctggttttgaaatcctgacctcaaatgatctgcctgcctcggcctcccaaagtgctaggattacaggcatgagccaccgtgcccagccccatttgtttttttttcaagccaggcttcatccanaaaaaanaatctgtatcatccttgcttcatctatagaaatataatataaataaatttagcaagtgatatttcctcaaacttgtttcctctttcctcctattatctctactccgatttccttctactgtgctttttctattttcttaaatatttatgaatctcattgtttctttctctcaactgtatgttttaaanttcatctanttttaaanattcaccattgttacccccattcatttnctaattggnccaattaacattga

SEQ ID NO: 9264 - DNA, 542 bp, Homo sapiens
  misc_feature (400)..(400): "n" may be a, t, c, g, other or unknown
  misc_feature (440)..(440): "n" may be a, t, c, g, other or unknown
  misc_feature (518)..(518): "n" may be a, t, c, g, other or unknown
  misc_feature (534)..(536): "n" may be a, t, c, g, other or unknown
  misc_feature (540)..(540): "n" may be a, t, c, g, other or unknown
gctagtagaacatatatatttatttttattctgtatgttaacatatatattaatatatatatagaagcatgcatatatagcctaatatgatggaagtataatagatttaactatatttcaagaaatagtatctatgcatagatagataaatatgtacatatttctaaaggagaagaacaggaattttaaaatttctttcctcatagaactatggcattatttttgctataaccatttacataaagtactatattgttacagatatcaaaaatgttcaaatttatggttgcttatgaaattgtcattagattttaaagcctgtgaagaaaaggccatacatattttatcatctttgaatctctatagtcctgggaaatatagtttaccatgtcaactttcnataaaatgaattaatagtaagtacatcttaaaataatccngaaaaaaataaactttaacacttccataagataattggcaagtaattaatatacctcccttttactttgagaaaatanatcccctattttcccnnngttntt

SEQ ID NO: 9265 - DNA, 381 bp, Homo sapiens
  misc_feature (152)..(152): "n" may be a, t, c, g, other or unknown
  misc_feature (313)..(313): "n" may be a, t, c, g, other or unknown
  misc_feature (372)..(372): "n" may be a, t, c, g, other or unknown
  misc_feature (376)..(376): "n" may be a, t, c, g, other or unknown
gaacgcttagtaaaatatttcattcagtacgtcttgtttttctgagagaggcaacggcagagggttgggggcagtgtgtgtgtatttgtgatgaacctaactcctcatgccagttctctcgagatttcttcgcgggggctgccgcgaggaancaccctcgcccctgtcggtggaaagaaggaagagagttctctaccacagaccgctgtgggtgtagccactgggtccggctctgcaacaaacgggttgtgtatgtgtctgcagaactggggtgacgcccatctggtttaccgctcagggtgatggaatccantgagctgattaggagaacgctgtcattttccccagcctgggggtaccatcaaatcgccncccntttga

SEQ ID NO: 9266 - DNA, 502 bp, Homo sapiens
  misc_feature (7)..(7): "n" may be a, t, c, g, other or unknown
  misc_feature (165)..(165): "n" may be a, t, c, g, other or unknown
  misc_feature (298)..(298): "n" may be a, t, c, g, other or unknown
  misc_feature (318)..(318): "n" may be a, t, c, g, other or unknown
  misc_feature (427)..(427): "n" may be a, t, c, g, other or unknown
  misc_feature (453)..(453): "n" may be a, t, c, g, other or unknown
  misc_feature (476)..(476): "n" may be a, t, c, g, other or unknown
  misc_feature (479)..(479): "n" may be a, t, c, g, other or unknown
  misc_feature (496)..(496): "n" may be a, t, c, g, other or unknown
cttgaanatgttatttcggtaaaactgaagctctttgatgctttcactaatgtcatcaagtgccctatgagaagcagccttctttggtgcaaattcatattcttctggataccagcgtctgcacagttctttaacagtgctcacatcaattattctataatgaanatgtttcatgaactggggcatgtatttgtcaagaaacttcttatcttcatgaactgaatttcctagaaagacacgaagcatactgcatctctatatttctagtattatacaacaggatatcaaaattcataanttgtatttgaaatggagatnattttttaaaattcaaacaattcctaaaagccctctatatttctaaatcaggtttgggtaaatgtgattagcttacaagtacagatttccaagtacttagtccgtttancctccttataaatttgttaatgaccnccctgaacagaaaggacaatctntcntccccatgccttgaatnttatgc

SEQ ID NO: 9267 - DNA, 540 bp, Homo sapiens
  misc_feature (373)..(373): "n" may be a, t, c, g, other or unknown
  misc_feature (378)..(378): "n" may be a, t, c, g, other or unknown
  misc_feature (444)..(444): "n" may be a, t, c, g, other or unknown
  misc_feature (450)..(450): "n" may be a, t, c, g, other or unknown
  misc_feature (484)..(484): "n" may be a, t, c, g, other or unknown
  misc_feature (491)..(491): "n" may be a, t, c, g, other or unknown
  misc_feature (508)..(508): "n" may be a, t, c, g, other or unknown
aactgatgaaacatacatttattttttccaatcaagtcttaaaagtttgatgaaagcgcattattgttaccaaaagtcttcaggcaataacagagataaaacttaacacagacaaacaatgattttattccatagtctcttggacttgagaatccatttgagtttcagaaagaatactaaattaatgggggttatgtcaggatgccaatgtccatgctgaggcttctcctgatacaatcttttgcaacataaccaacaaagatcaggagcttaaaacaaaacaaaacaaaaacaaacaaaaaacaagttcatgttatttctacaatgtccaaaaagaaagaccaagatctttgcttaaaaatagaaatgcatnctgcngtggctcaaaaacttaggcctgcatccaaattacatgaagcgcttgttaaaacagattgagccccntctgcnaagtttgtgacccagtgtttggtgggggccaatnatttgtnttctacaggttcctaantgaatcaagccctggtgtcgaaacacctttaa

SEQ ID NO: 9268 - DNA, 474 bp, Homo sapiens
  misc_feature (16)..(16): "n" may be a, t, c, g, other or unknown
  misc_feature (208)..(208): "n" may be a, t, c, g, other or unknown
  misc_feature (392)..(392): "n" may be a, t, c, g, other or unknown
  misc_feature (427)..(427): "n" may be a, t, c, g, other or unknown
  misc_feature (438)..(438): "n" may be a, t, c, g, other or unknown
  misc_feature (446)..(446): "n" may be a, t, c, g, other or unknown
  misc_feature (459)..(459): "n" may be a, t, c, g, other or unknown
acttgacttcaatganctcttcggcttctgaagcacctgtaataggttagatacacccaaaacgggactcaacatcagcttccggctcactgattttcgcaacacagatctctgacagtctttctcagaaatgtatcagtacgttctccaagttgtgagctgttttttcatctttttccgtgtctgctttggcttcccaggaacttanagtttctgctaaatggttaaatagctgcccatgttgcaatcctgggtctttgagaactgcatcaataaaagggatcaacgtgtgcatgtcttcatttgtatcctttgtaatatcatttatagtaaactggtaaattgtttctctgagttctgtgagacagtctagcaaattaagcaaaccccangaaggggtcatggggatcccgaattaaaatttaancttggtgggcnaaaacccnagttaaaaaaccngggggctgccaatgg

SEQ ID NO: 9269 - DNA, 386 bp, Homo sapiens
  misc_feature (310)..(310): "n" may be a, t, c, g, other or unknown
  misc_feature (346)..(346): "n" may be a, t, c, g, other or unknown
  misc_feature (348)..(348): "n" may be a, t, c, g, other or unknown
  misc_feature (353)..(353): "n" may be a, t, c, g, other or unknown
  misc_feature (355)..(355): "n" may be a, t, c, g, other or unknown
gtaaaattctgtatgtatgtcaccattttttttcacatgatacacagaaaactcaaggacccagaggggaaccaagttatgttataccatttacaaaataccaaggagtccacagctacctaacacatttactacagcacaggaaccaatgaaggtacagtgtacaaaaaactgtaaacacggcacaataaatagataaaacagcaggttccgcaccatgcacatgatgtgatgacacttcatctctacacaatctcacatctcacactctttgttgcaattgatttccctcccaccccccacccccaantgcaaagcatcacaaatgaacatttctgttttcaantnacatntntacaaggggtattacaaatatgcagtactgt

SEQ ID NO: 9270 - DNA, 390 bp, Homo sapiens
  misc_feature (87)..(87): "n" may be a, t, c, g, other or unknown
  misc_feature (333)..(333): "n" may be a, t, c, g, other or unknown
  misc_feature (363)..(363): "n" may be a, t, c, g, other or unknown
  misc_feature (370)..(370): "n" may be a, t, c, g, other or unknown
  misc_feature (384)..(384): "n" may be a, t, c, g, other or unknown
  misc_feature (388)..(388): "n" may be a, t, c, g, other or unknown
aaaaataaaaatatttatttggaaaatattagtagcatgataactcaacctcaccagatattaacagttcatcaggtcaggcaatanaacaagtccacatgagcttcttaaaaagaaatggatgaccacttcaatagctgactccatcttccattttattactggatgattcataatccaaaatatgaagttttgggactttttctcaaaaggagaaactttgggaaagtgtctgaagcaatggtattgatcttttttttccccctttatgaaactttaactgcatacttcagtctggtggaatcttttgtgttattctgactggtccataanaacccaaggactatgttgataatcctgatnatttcancaacacttccaaanttcnct

SEQ ID NO: 9271 - DNA, 537 bp, Homo sapiens
  misc_feature (52)..(52): "n" may be a, t, c, g, other or unknown
  misc_feature (123)..(123): "n" may be a, t, c, g, other or unknown
  misc_feature (142)..(142): "n" may be a, t, c, g, other or unknown
  misc_feature (155)..(155): "n" may be a, t, c, g, other or unknown
  misc_feature (176)..(176): "n" may be a, t, c, g, other or unknown
  misc_feature (235)..(235): "n" may be a, t, c, g, other or unknown
  misc_feature (282)..(282): "n" may be a, t, c, g, other or unknown
  misc_feature (297)..(297): "n" may be a, t, c, g, other or unknown
  misc_feature (407)..(407): "n" may be a, t, c, g, other or unknown
  misc_feature (415)..(415): "n" may be a, t, c, g, other or unknown
  misc_feature (442)..(442): "n" may be a, t, c, g, other or unknown
  misc_feature (484)..(484): "n" may be a, t, c, g, other or unknown
  misc_feature (507)..(507): "n" may be a, t, c, g, other or unknown
  misc_feature (514)..(514): "n" may be a, t, c, g, other or unknown
  misc_feature (524)..(524): "n" may be a, t, c, g, other or unknown
catgtaattcagttgatatttaattacaagggaactcaggttcttacacaangcaggaaatggaatcagccgctccccacaagccttttcaacctgggtgactgaagctgaagaaatgggganacatggaacatatgggganggttctggcacantgtgtcctgcccaaagctganggtggtggccactggggatctgccctcgcgctggccaaggtctgccatcactccatgangcaaaactctgactcctgctgtcgcatgttgggtaacacatacaganccacagctgcaatanccaaaaataccataggcttccacaacccaaacatgttctcattcttgtcgttctggggggccatgggcttttcaaggcattccatgcactccttgaactccctttcacangcatccanctcttccttcaagtctttctgcttggncaataacttttccatctgctcttgcaactgggctgttttccncccggcttatctggttacatggnctcaccncctgcacttnattacactttccc

SEQ ID NO: 9272 - DNA, 563 bp, Homo sapiens
  misc_feature (212)..(212): "n" may be a, t, c, g, other or unknown
  misc_feature (491)..(491): "n" may be a, t, c, g, other or unknown
  misc_feature (493)..(493): "n" may be a, t, c, g, other or unknown
  misc_feature (509)..(509): "n" may be a, t, c, g, other or unknown
  misc_feature (533)..(533): "n" may be a, t, c, g, other or unknown
  misc_feature (550)..(550): "n" may be a, t, c, g, other or unknown
gagaaactatggcactttaattattttgctgttagagccataaatttcacttaacttcataatctatgttaagagtattagcttaaaaatgtattttgaaaagattttacatacagatttaaaagatagtaccttgaaatggtttacagttaagcaaatgaaatatcacaaatacaagcagagctttgagatctgagttttgtaaatgctanaactttgtttcctaattttttagttcttcaaagaattaagaggctgcattatataattcattttagtatgtttacctcaagtacttttagaactagactgtattttcactgccacagatgtatcatgcagggagtatcctggtttaaattctgaagtgctttcactcctacttggttcaccttgaaaatcgtctaaaaagaagttggcacattattttgcgaatgttactggacatcaggaaatacatgactggatctaagccactattgaaagatgananaaccccctgatctccntgggtttgttaaaaattcttcccnttccaaaaaaacttttnccgtgtaaaaaat

SEQ ID NO: 9273 - DNA, 381 bp, Homo sapiens
  misc_feature (11)..(11): "n" may be a, t, c, g, other or unknown
  misc_feature (86)..(86): "n" may be a, t, c, g, other or unknown
  misc_feature (229)..(229): "n" may be a, t, c, g, other or unknown
  misc_feature (259)..(259): "n" may be a, t, c, g, other or unknown
  misc_feature (289)..(289): "n" may be a, t, c, g, other or unknown
  misc_feature (322)..(322): "n" may be a, t, c, g, other or unknown
  misc_feature (337)..(337): "n" may be a, t, c, g, other or unknown
  misc_feature (340)..(340): "n" may be a, t, c, g, other or unknown
  misc_feature (378)..(378): "n" may be a, t, c, g, other or unknown
agagttatgangttttcacttttatttataaactcaaaaagggctggagttacacgatatttatttgcacacagcttcgtgatgtncaatgtgtgttcacatgctccatgttttttgatccccacgtaaggctgtgagatagacttgatttattagtcttggtttttaggctgaggaacaagtccaggaggttcaagggactcatcaggatcacacagccagaaaatancaaagtctgttcctgactccaagtcagtangttttgtcagtctgtgttgttgttggaganaacagtcgggagacacatggactaacacaaaangaatggatgggagancangcaaaggtttggacctgccttgtcatcccacaggacangta

SEQ ID NO: 9274 - DNA, 485 bp, Homo sapiens
  misc_feature (177)..(177): "n" may be a, t, c, g, other or unknown
  misc_feature (291)..(291): "n" may be a, t, c, g, other or unknown
  misc_feature (405)..(405): "n" may be a, t, c, g, other or unknown
  misc_feature (447)..(447): "n" may be a, t, c, g, other or unknown
  misc_feature (449)..(449): "n" may be a, t, c, g, other or unknown
  misc_feature (453)..(453): "n" may be a, t, c, g, other or unknown
  misc_feature (484)..(484): "n" may be a, t, c, g, other or unknown
attttactttaaattccgggatacatgtgcagaacttacaggtttgttacataactgtatgtgtggcatggtggtttgcttcacctatcaactcgtcaccctagtgttaagccctgcatgcattagctatttgtcctgatacttcccctcccctcaccctcacccccaccccaatangccccgatgtgtgctgttactctctctgtgtccctatgttctcatagttcagttcccacttatgaatgagaacatgcggtacttggttttctgttcctgtgttagtttgctgangatgatggcttccagcttcatccatgtctctgcaaggggcattatctcattcctttttagtccatggtctttttgcactgctagataatctctctaaccctggcggggaaagcncttgcctgcctaacaatctttgtttgctcatgcattccatcnancctncatgcatttcctccacaaaaatttaattaanc

SEQ ID NO: 9275 - DNA, 423 bp, Homo sapiens
  misc_feature (86)..(86): "n" may be a, t, c, g, other or unknown
  misc_feature (352)..(352): "n" may be a, t, c, g, other or unknown
  misc_feature (413)..(413): "n" may be a, t, c, g, other or unknown
  misc_feature (421)..(421): "n" may be a, t, c, g, other or unknown
acttggccaactggctcttgttctcaaccctgtgagggaggcatcaaccctgtcggtgtacagatgagactgtggggcagagccanctcgcccaaggcacttgcttacaatggcagagacagaccttgtgacacaggactccctgataactgggcatgttgtctcgatgagtcggggacaggtttcccctcttgcatcttgtaaacaaaagccacccctaagtcaggaatcttcacacacaagccccaggaagctgcggtttccctcctagctggcctctggaccgagtgcagccccacttgtctccctttccctccaccatgtcaggctccgactgggtcaggccaggtangcaacagagttggcccagccatatctttctggagactctgaatcccctgggacactctcanggcaacanaa

SEQ ID NO: 9276 - DNA, 384 bp, Homo sapiens
  misc_feature (161)..(161): "n" may be a, t, c, g, other or unknown
  misc_feature (169)..(169): "n" may be a, t, c, g, other or unknown
  misc_feature (301)..(301): "n" may be a, t, c, g, other or unknown
  misc_feature (304)..(304): "n" may be a, t, c, g, other or unknown
  misc_feature (331)..(331): "n" may be a, t, c, g, other or unknown
  misc_feature (347)..(347): "n" may be a, t, c, g, other or unknown
  misc_feature (372)..(372): "n" may be a, t, c, g, other or unknown
acatgtctctgcctctgttttcagtgtggctttggacaggaatatatgaataaatcactgccatacaggttttccaatacacaagtgctagaaaatacacacaattccccaatgcgtaagttgtgctaatgtctttccaagttctgggttgggaagtgganggtggcancgtttgtttgtgcgcaaccgtccagtcctgttcacagcgaggatttggagtcctccagggtctcatcatgggagtgatttgtcagcggacgcctctgccctgtctggcttcaggtccaaggaaactttgaancantcaagccttgtctttgtaccccatgtntcctgtctttgttgantcactcaaaaatcactcctggaccnctgggggttgga

SEQ ID NO: 9277 - DNA, 330 bp, Homo sapiens
  misc_feature (279)..(279): "n" may be a, t, c, g, other or unknown
  misc_feature (285)..(285): "n" may be a, t, c, g, other or unknown
  misc_feature (312)..(312): "n" may be a, t, c, g, other or unknown
  misc_feature (320)..(320): "n" may be a, t, c, g, other or unknown
  misc_feature (326)..(326): "n" may be a, t, c, g, other or unknown
gcataagagattttaagagagcagatttaagaaagattcagatgacttcacgtgagctactgaccatataaaccttgcatgtgctggccccagggaatatggaagcttcggaaggtattgctctgccctgcctgggtcccttgctcctattgcagccagaagtcccaaaaaacctcagaacagatatttgcttctaggggatatgaggggaaagcaccgggaattaccatgaggtaatggatacggctatgcaggtggcttcttgatgacaataacccntcctcnggaggaagcttttttttgtttcttccncagactcnaaatanctga

SEQ ID NO: 9278 - DNA, 537 bp, Homo sapiens
  misc_feature (232)..(232): "n" may be a, t, c, g, other or unknown
  misc_feature (255)..(255): "n" may be a, t, c, g, other or unknown
  misc_feature (341)..(341): "n" may be a, t, c, g, other or unknown
  misc_feature (373)..(373): "n" may be a, t, c, g, other or unknown
  misc_feature (393)..(393): "n" may be a, t, c, g, other or unknown
  misc_feature (427)..(427): "n" may be a, t, c, g, other or unknown
  misc_feature (457)..(457): "n" may be a, t, c, g, other or unknown
  misc_feature (484)..(484): "n" may be a, t, c, g, other or unknown
  misc_feature (500)..(500): "n" may be a, t, c, g, other or unknown
  misc_feature (505)..(505): "n" may be a, t, c, g, other or unknown
  misc_feature (535)..(535): "n" may be a, t, c, g, other or unknown
ccaatttaaattaaacttcctttaatgaaataaaaaacaaatggtgcattgcataatatttgtggtcacagtataaaacaatacaattagttcatataacattggatatggacaaaaatacacaagatcctttctttgtctacggaaaattctgcagatccttatgtgccacacttaaaaagaaagtcagcgttttctcttctagggatctgcacacatatttatcactganaatttggtcaaacagtggagganaacttacccaaatcccagttcccttcttcctctgttgtcatcggtgaagctaaaaaaaagttttctgaaagtagcaagttgtgtantattgcttattattcctgccaaaaaggctcantctttggctcacagatgtcngtgacaaaatcatggctgcaggcagtctgcaaancaagaaacaagggccccggggaaacaaacnaaagtctgggcaggaagggcccctctnccaaaatctccggganccccncaaatggtaaggttaaggggggaaaaaacncc

SEQ ID NO: 9279 - DNA, 339 bp, Homo sapiens
  misc_feature (53)..(53): "n" may be a, t, c, g, other or unknown
  misc_feature (175)..(175): "n" may be a, t, c, g, other or unknown
  misc_feature (177)..(177): "n" may be a, t, c, g, other or unknown
  misc_feature (281)..(281): "n" may be a, t, c, g, other or unknown
  misc_feature (312)..(312): "n" may be a, t, c, g, other or unknown
  misc_feature (314)..(314): "n" may be a, t, c, g, other or unknown
  misc_feature (330)..(330): "n" may be a, t, c, g, other or unknown
  misc_feature (337)..(337): "n" may be a, t, c, g, other or unknown
cctttttacaaaaacatgcatacatacacagggtatggtgggtcctaagaaanaacacacacacgcctcactcacacacacgctcacacacacgcctcactcacacacatgctcacacacattttccttcttgaccccaggcctggacccccaaaagccttgaaaactttgccanancagcctcccctcctccatgtctgtatcttctctcccaccccttccccctcagtcaggctattcctatgtggggtgggaatcaaaactatggtgggggaagcccncaaacaaaaaaaggtccccccaattgggcantnggcccaggggtcccangggtatnct

SEQ ID NO: 9280 - DNA, 413 bp, Homo sapiens
  misc_feature (11)..(11): "n" may be a, t, c, g, other or unknown
  misc_feature (116)..(116): "n" may be a, t, c, g, other or unknown
  misc_feature (124)..(124): "n" may be a, t, c, g, other or unknown
  misc_feature (153)..(153): "n" may be a, t, c, g, other or unknown
  misc_feature (219)..(219): "n" may be a, t, c, g, other or unknown
  misc_feature (301)..(301): "n" may be a, t, c, g, other or unknown
  misc_feature (321)..(321): "n" may be a, t, c, g, other or unknown
  misc_feature (377)..(377): "n" may be a, t, c, g, other or unknown
  misc_feature (379)..(379): "n" may be a, t, c, g, other or unknown
  misc_feature (383)..(383): "n" may be a, t, c, g, other or unknown
  misc_feature (407)..(407): "n" may be a, t, c, g, other or unknown
acatttgttangttctcaccagcaagaattctttgaaaaatcctggtctcagattttaccttaagaacttgccacattcagtacatttagtaaagtttctgtcctctatggtctanctaacggngtattaagccttgaacaaaaactaaaggntctgctacattcattatacttgcaaagtttttctccagtataaattattgtatgtcttacaagggntttaatgctaactgaacactctgccacattaattacatgtgttagatttctttccggcatgaaatctctgatgacgtacaanatatgaattgtcgcggaaanaatttgccacattcattacatttgaaatgtttctctccagtgtggatcgcatgacnanatantgaggcttgaacgcatactaaaancttggc

SEQ ID NO: 9281 - DNA, 452 bp, Homo sapiens
  misc_feature (7)..(7): "n" may be a, t, c, g, other or unknown
  misc_feature (85)..(85): "n" may be a, t, c, g, other or unknown
  misc_feature (223)..(223): "n" may be a, t, c, g, other or unknown
  misc_feature (285)..(285): "n" may be a, t, c, g, other or unknown
  misc_feature (330)..(330): "n" may be a, t, c, g, other or unknown
  misc_feature (376)..(376): "n" may be a, t, c, g, other or unknown
  misc_feature (392)..(392): "n" may be a, t, c, g, other or unknown
  misc_feature (423)..(423): "n" may be a, t, c, g, other or unknown
  misc_feature (428)..(428): "n" may be a, t, c, g, other or unknown
  misc_feature (444)..(444): "n" may be a, t, c, g, other or unknown
cctcganatgaacatcatcctttaatatgtgccttttccatttcatcacaaagaatattaaaaagacgtgtacttaaggtctganatttaataaaattaataatttttactgcttcatcaaaaacattcttaagtcaaactggcattttattgtaagtgcatggtggtgaaatatacaactgctagtataatttggcaccacttccttgctttgtgctaaggncccaacagtttcacccacctttgctttggtaccattggtgcaaatgtcagcagggtgaaaanacaaaactgtattagtattattataaaaatagtttaaccttgcanatgctctaaaaagatctcggggaccactcccagggatctgcaggtnacacttaaaaaaaccnctgctctatttgccatatgctgccaactgtnactcntttatcccaaaatttnttcctgaa

SEQ ID NO: 9282 - DNA, 381 bp, Homo sapiens
  misc_feature (193)..(193): "n" may be a, t, c, g, other or unknown
  misc_feature (286)..(286): "n" may be a, t, c, g, other or unknown
  misc_feature (332)..(332): "n" may be a, t, c, g, other or unknown
  misc_feature (354)..(354): "n" may be a, t, c, g, other or unknown
  misc_feature (369)..(369): "n" may be a, t, c, g, other or unknown
  misc_feature (372)..(372): "n" may be a, t, c, g, other or unknown
gcagaaacatgtactttaattcacattttctagattctggtgggtacaacagtaaattatttggaattctgttcaaaatcaaagctgcacctgtagatattccttaaaatacagtacacatagatttgtgtgtgtgtttttttaccaaataatttccacgataccatgcacctaatctgtgtattttggtgantagctatggtttctgcaggtacctcagtttgcaaactactgaaaggtttactgtgaactgttcccaaattttcagctgaaggcaatgctgatnaaaatcaaaataactgtcctttcttatatacagtggcacataggcnaagttgaaaaaacatggcaaantttcatatacttacnganattacaaat

SEQ ID NO: 9283 - DNA, 447 bp, Homo sapiens
  misc_feature (299)..(299): "n" may be a, t, c, g, other or unknown
  misc_feature (321)..(321): "n" may be a, t, c, g, other or unknown
  misc_feature (333)..(333): "n" may be a, t, c, g, other or unknown
  misc_feature (362)..(362): "n" may be a, t, c, g, other or unknown
  misc_feature (417)..(417): "n" may be a, t, c, g, other or unknown
  misc_feature (430)..(430): "n" may be a, t, c, g, other or unknown
  misc_feature (436)..(436): "n" may be a, t, c, g, other or unknown
  misc_feature (440)..(440): "n" may be a, t, c, g, other or unknown
ccaaaaccacacagcttccctttttattgatgctcaagaagtgaactttaaatgacatttcataagcaaaacacaaatgaaaacacctaatgtgcatgtatagtatatgtaaacatacatagtatatggactcaatcatcctcatctaaatataaaaagaacaactggttctttgacctcaaaaataaattcaatgttggcattactgtttttaacttacagtgttttatatttaacaggaaaaattatgaataaccaagtttggtgtggtcatggatttcatgttaaggtataaatanagtttttaagaaataatctgtntaataaaataantttacttttgaatcgcagtacagtcattnccttcaatcaataaaaatatcccttgattacaaagcaccttattttgcaaatgtnttcaggaaaatanctctancatnttgaaat

SEQ ID NO: 9284 - DNA, 361 bp, Homo sapiens
  misc_feature (53)..(53): "n" may be a, t, c, g, other or unknown
  misc_feature (70)..(70): "n" may be a, t, c, g, other or unknown
  misc_feature (85)..(85): "n" may be a, t, c, g, other or unknown
  misc_feature (115)..(115): "n" may be a, t, c, g, other or unknown
  misc_feature (180)..(180): "n" may be a, t, c, g, other or unknown
  misc_feature (279)..(279): "n" may be a, t, c, g, other or unknown
  misc_feature (318)..(318): "n" may be a, t, c, g, other or unknown
  misc_feature (321)..(321): "n" may be a, t, c, g, other or unknown
  misc_feature (349)..(349): "n" may be a, t, c, g, other or unknown
  misc_feature (358)..(358): "n" may be a, t, c, g, other or unknown
cctcaggacccaataaattttatttcaggtggggataagggacaagcaatgtnaaaacagggaaggaaanaaggaagtctctatnttctgaaggactgcctaccccactgttganagtgccacattctgcccttttagcaattttaattaatttttactaggactttggtaacaccacanaaaccctgtggcttcctgttaaaatgactgtgttacatgccttatttttattaaagtggaatttaacaaatacttttattattttgaagcatttcatcnattctcggtggaagcactacatcatcgaatgggaaatcnacnaatgaaaaatgaaaaaaaagattatccnttcccagtnagc

SEQ ID NO: 9285 - DNA, 336 bp, Homo sapiens
  misc_feature (142)..(142): "n" may be a, t, c, g, other or unknown
  misc_feature (158)..(158): "n" may be a, t, c, g, other or unknown
  misc_feature (273)..(273): "n" may be a, t, c, g, other or unknown
  misc_feature (276)..(276): "n" may be a, t, c, g, other or unknown
  misc_feature (287)..(287): "n" may be a, t, c, g, other or unknown
actttttgaaagtttcatttaggtgctatcatttaaaaaatcagaagatatcacttaagaatccagcattctagtttctttcgaaaaatcagaagatctggcaacactaggcccacattccggcatggcaacaaccagctanagcggtgctggctgtnccccctctgtggggcttgtgctctggtttctgaagtcctaaccctcaccaggcccaactgccacctacgccagctgcatggcccctacactgtgtctctgcacgaggcagcccancangaaggaacaanagtgggggtgatgagaggttgtcctgttcagccctccccactacccaca

SEQ ID NO: 9286 - DNA, 519 bp, Homo sapiens
  misc_feature (3)..(3): "n" may be a, t, c, g, other or unknown
  misc_feature (157)..(157): "n" may be a, t, c, g, other or unknown
  misc_feature (191)..(191): "n" may be a, t, c, g, other or unknown
  misc_feature (195)..(195): "n" may be a, t, c, g, other or unknown
  misc_feature (259)..(259): "n" may be a, t, c, g, other or unknown
  misc_feature (307)..(307): "n" may be a, t, c, g, other or unknown
  misc_feature (350)..(350): "n" may be a, t, c, g, other or unknown
  misc_feature (381)..(381): "n" may be a, t, c, g, other or unknown
  misc_feature (384)..(384): "n" may be a, t, c, g, other or unknown
  misc_feature (390)..(390): "n" may be a, t, c, g, other or unknown
  misc_feature (449)..(449): "n" may be a, t, c, g, other or unknown
  misc_feature (457)..(457): "n" may be a, t, c, g, other or unknown
  misc_feature (489)..(489): "n" may be a, t, c, g, other or unknown
  misc_feature (495)..(495): "n" may be a, t, c, g, other or unknown
  misc_feature (498)..(498): "n" may be a, t, c, g, other or unknown
canaatacatttctttcttaatctttgtgagtacataccaccatactggtggcaatggcggtgagagcctctgtggaccaggggaagctgtggtgtgagttccatgctagctctataagccaggctctggggcagcatccaagacgctctgtattanatactgaccagtctcatgtgccactggtgaggangaanacaacgtgcttttcccaaagggcgatgatctccccaaatgatgacccttctcaggaggcaggancgctttcccggaataaccttttggctccttattcagctgctgcagcanatactcattaattaccaccaaggatctctgactttcatggaanaatggcaactgtcttctcccgctttttccanctnggcaanctcctggttccaggcaacccccctgcatggtcacctgttggtttttgtccaaaaatcancataattntttgactgttgcccctcccaattgaaatggcncccctnccnccactgttgaatttttcctga

SEQ ID NO: 9287 - DNA, 452 bp, Homo sapiens
  misc_feature (8)..(8): "n" may be a, t, c, g, other or unknown
  misc_feature (43)..(43): "n" may be a, t, c, g, other or unknown
  misc_feature (73)..(73): "n" may be a, t, c, g, other or unknown
  misc_feature (199)..(199): "n" may be a, t, c, g, other or unknown
  misc_feature (364)..(364): "n" may be a, t, c, g, other or unknown
  misc_feature (366)..(366): "n" may be a, t, c, g, other or unknown
  misc_feature (387)..(387): "n" may be a, t, c, g, other or unknown
  misc_feature (412)..(412): "n" may be a, t, c, g, other or unknown
  misc_feature (417)..(417): "n" may be a, t, c, g, other or unknown
ccattcanaaagcctatacttggcctgttctgggcctgattanaaatcataataccttctcaacgcttcaacnacttgctgttaatacggggaaaacacacccccaaagccctgcgtgtgtcgcacaggcatgctgccttggcgatgctttatggaacttttttaaaactacgtctgcaatgtctgccccttaaaaaanaaaagctgatgggcagcaaactgcagccatttctccatcttccttcgctttcccacccccatcctgggcagctttcccctccccccaatctcctggaggttgtggcattaagctctgcagttgtgtgcacattcaagtgtttatggcaaaaactggggaaaaaanancaaattgtttccaagctaganctcccatgttgcaactttgctttanaaaanacttccatctggggaaagctcatattctgatgaaa

SEQ ID NO: 9288 - DNA, 483 bp, Homo sapiens
  misc_feature (469)..(469): "n" may be a, t, c, g, other or unknown
  misc_feature (471)..(471): "n" may be a, t, c, g, other or unknown
  misc_feature (476)..(476): "n" may be a, t, c, g, other or unknown
ctctttcctttctttctggctctttttcacccaggctggagtgcaatggcaagattatagctcactgcagcctcaaactcctgggcccaagagatccttccgtttcagcctcctgagtagttgggaccacaggtatatgccaccacgcatggctacatttgttttgttttgttttgtttaagagaaggatgtctcactaggtttctcaggcctgtctagaactcctggactcaagccatcttcccacagtctcccaaactgctgggattacaggtgtgagctactgcaccaggcaggttttttgtctttctgtgagggaaatgtgggagagacagggagatgttttctatttttggcctctgcaagctttaatatattttgctagaagctgttttagtgtcttgagtactataatgatgactgtttacacatagtctctttagtaatctaaatgtctatgtgaaataanantccanttgtgcc

SEQ ID NO: 9289 - DNA, 432 bp, Homo sapiens
  misc_feature (181)..(181): "n" may be a, t, c, g, other or unknown
  misc_feature (183)..(183): "n" may be a, t, c, g, other or unknown
  misc_feature (337)..(337): "n" may be a, t, c, g, other or unknown
  misc_feature (339)..(339): "n" may be a, t, c, g, other or unknown
  misc_feature (343)..(343): "n" may be a, t, c, g, other or unknown
  misc_feature (409)..(409): "n" may be a, t, c, g, other or unknown
  misc_feature (419)..(419): "n" may be a, t, c, g, other or unknown
atttattttgagacacagtcttgctttgtcacccaggctggagtgcagtgcagtggcatgatctcggctcactgcaacctccacctccagggttcaagtgattctcctgcctcagcctcctgagtagctgggactacagatgcccgccactaagcctggctaatttttgtatttttagtananacggggtttcaccatgttgaccaggctgttctagatcttctgacctcatgatccgctcgccttggcctcccaaagtgctgggattacaggtgtgagccactgcacccagcctaaaagtcattttaatttgtaagatatgtttactgttttagananacanaagctaacttttcattttcaaggactgctgaacaatcatccatgaattcttgaaattgaataacangaaactgttncttgtttttccaa

SEQ ID NO: 9290 - DNA, 499 bp, Homo sapiens
  misc_feature (139)..(139): "n" may be a, t, c, g, other or unknown
  misc_feature (287)..(289): "n" may be a, t, c, g, other or unknown
  misc_feature (309)..(309): "n" may be a, t, c, g, other or unknown
  misc_feature (368)..(368): "n" may be a, t, c, g, other or unknown
  misc_feature (391)..(391): "n" may be a, t, c, g, other or unknown
  misc_feature (464)..(464): "n" may be a, t, c, g, other or unknown
  misc_feature (475)..(475): "n" may be a, t, c, g, other or unknown
  misc_feature (478)..(478): "n" may be a, t, c, g, other or unknown
  misc_feature (483)..(483): "n" may be a, t, c, g, other or unknown
  misc_feature (492)..(492): "n" may be a, t, c, g, other or unknown
aaacaaattaactttattacattgctacttcaacttcagtccttacattgatttgttttttaaaaaataccagtttgaaacacattactgaaagtgagtgtacacaataaatagaaaatagggatgcatagtgctgganacattcaaccaacttatcttcatctgttgcctactgttgtagacaaaatttgacacacaattagcatcactgaaagagcagccaaactacctcggaaaaagtggcaaactactggaaaagtagcttaaagctctggaccactcacccnnnaaaaaaaaaagaagaaaatnccctgtttatctgggagctagcctcattatggcaatgaaatttatctactagtcataanaacaatttttaaaatatcaaaantccagggaaccttccctaacagtttttgtttttgtttttggaaacaaatccccctctgttgcccaggctggantgcacaggggnatnttggntaactgcanccccccc

SEQ ID NO: 9291 - DNA, 414 bp, Homo sapiens
  misc_feature (337)..(337): "n" may be a, t, c, g, other or unknown
  misc_feature (345)..(345): "n" may be a, t, c, g, other or unknown
  misc_feature (360)..(360): "n" may be a, t, c, g, other or unknown
  misc_feature (403)..(403): "n" may be a, t, c, g, other or unknown
  misc_feature (406)..(406): "n" may be a, t, c, g, other or unknown
aattcaatattttattatagtccacgtataaagataattttcatgagggttacatgatggatagctagcaaaagaaatatgctagcacagggtggtaactgccaactaagcatgcactgaaccaacagactacttcagtaagtccttgattattgccagcttttctataatgttcaggttctcaaaggtcactgaattttataattatctccaaacaattttcttcatggtcatttaagctttgtctaaacagctgggtgtgttgccaagcgacatcaccatctcctctgcttaattctgcttccaaaataacttcagtggcaccagaaaaaatcancataggantgaaaactgttatcncctgtcagttctacttgtgctgtatcaaatcgcaatttccatnctnctgttcca

SEQ ID NO: 9292 - DNA, 521 bp, Homo sapiens
  misc_feature (58)..(58): "n" may be a, t, c, g, other or unknown
  misc_feature (79)..(79): "n" may be a, t, c, g, other or unknown
  misc_feature (136)..(136): "n" may be a, t, c, g, other or unknown
  misc_feature (171)..(171): "n" may be a, t, c, g, other or unknown
  misc_feature (256)..(256): "n" may be a, t, c, g, other or unknown
  misc_feature (460)..(460): "n" may be a, t, c, g, other or unknown
  misc_feature (467)..(467): "n" may be a, t, c, g, other or unknown
  misc_feature (479)..(479): "n" may be a, t, c, g, other or unknown
  misc_feature (498)..(498): "n" may be a, t, c, g, other or unknown
  misc_feature (511)..(511): "n" may be a, t, c, g, other or unknown
ccagtgcttatgacattctttattcaattcacatagaaaagcatgcagtattaatgtnaaacagtacaatattaatgtnaaatgttcagtgcacattaaacagcatacaaacccatttttaaagacctatataggnataccaaatacgtttagaacaatacactttttcanagcctaaattaaaaattgtgcttacctcttacctatcttcaccccctcaacactcttcacagaaaagttttgtcctacataaaanatattctatcagccaactgaaacctctttttcttaagtatggaaaacacagcaagcaaaaatgctaccatgcatagtttccacaaagaacaggaacatgcaaacaagaaacatactactcaaaagaaaactcccctggaatgcaagtggatcaagaacttggcgatgaagctctttcaaacctgttacatctggaacaatgaanctatgangttttaggtccnctaaaacccaagtggtccnaggcctccttccntagtatggcc

SEQ ID NO: 9293 - DNA, 465 bp, Homo sapiens
  misc_feature (144)..(144): "n" may be a, t, c, g, other or unknown
  misc_feature (281)..(281): "n" may be a, t, c, g, other or unknown
  misc_feature (407)..(407): "n" may be a, t, c, g, other or unknown
  misc_feature (424)..(424): "n" may be a, t, c, g, other or unknown
  misc_feature (426)..(426): "n" may be a, t, c, g, other or unknown
  misc_feature (461)..(461): "n" may be a, t, c, g, other or unknown
  misc_feature (463)..(463): "n" may be a, t, c, g, other or unknown
aatgggcattgtgaatgaaaatatgtaatgtcaacctttactttatggtatcttaggtttgtcttcttccccttcatagttttcccctttgaggataacccttcaagctcaaaagggcacaaaagctaaaacgttattcacgtncaaaataccaagtatatagctgttctgcagtttgatacagaacaaaagaaaataacttttctaattaaatccctcattctgtacttaggccagactccatccccactacagttttacttgtattaacaggttaagancaatctaggaacatttggcaaacaagtacattttttacatggaaaaaactcaatcaacatcaccattctctggtacaagaaatacaaaacacatttcctttaaaaaatcctcccagtgctgaagtntcttctaagcttcccanantatgtcctaagctttataaataataaatctttcananat

SEQ ID NO: 9294 - DNA, 557 bp, Homo sapiens
  misc_feature (238)..(238): "n" may be a, t, c, g, other or unknown
  misc_feature (447)..(447): "n" may be a, t, c, g, other or unknown
  misc_feature (481)..(481): "n" may be a, t, c, g, other or unknown
  misc_feature (529)..(529): "n" may be a, t, c, g, other or unknown
  misc_feature (538)..(539): "n" may be a, t, c, g, other or unknown
  misc_feature (557)..(557): "n" may be a, t, c, g, other or unknown
attttttaaagctcatgtgcaccagaattgagaatcatagaactagaaaattactgaactggaacacaatttcataataagtttccactatcataacagagttgaccagttattcagattaatccatgtaaaacctgataacccataaacctttttctcttggactataaactcatagaattaaacaagcacatccttttacttcttggtggggaggccctcttcattgaactttganaggctcaggtcactaccacacatggaaacctaagagtaggagttcgggtagtatggctcaattactgctgagttaccacttttgtcctgcttggccaaaagcgctaaatggaagagtagatgaaaaagacacaatgcatatatttttcatttttcaaatcacccttttactgttcacattttaaatggagacaaacaccccggaaaacnaagaacacttatttgccaaatccttttcccaacnttaagacccctttgattccctccattactcccaaatgtttgttttccnaaaattccnnttccttacaaatcctgan

SEQ ID NO: 9295 - DNA, 592 bp, Homo sapiens
  misc_feature (438)..(438): "n" may be a, t, c, g, other or unknown
  misc_feature (487)..(487): "n" may be a, t, c, g, other or unknown
  misc_feature (549)..(549): "n" may be a, t, c, g, other or unknown
  misc_feature (571)..(571): "n" may be a, t, c, g, other or unknown
  misc_feature (581)..(581): "n" may be a, t, c, g, other or unknown
  misc_feature (587)..(587): "n" may be a, t, c, g, other or unknown
gaaaggcatctatatataaaatctttattacaggcagtattggtccatacactaacacaataccaacagtacaggtttaatctttcaaaatcatcatttaaacagcaaaagaccaagaaataaaatttgagtcaattatttttcaaaatattctcaatgcacattatccttaattcccttattatagtgaaacatacaaatacagaaaaataccccatttaacaaatactagtgttaaatggttatttggcttaaaatctgagttaagaaaatcctttttagcaacctacatacagataagtagcaaactttattatattaaacaaattcattctgctaaaacatgtaaagaatttcatccatcatgtattctgatcccagtacaagtgtttattctcttaccgtcacgattcttatatgaaggaccaactcaaaganttgtcctagatataaccttatcctctccccaacacacttcatccaaaantctgttcaacagatggcaaccgggttgcatcacttcaccatctgatgccattggtcccgganaacgtggccaggcctgtgaaanacccattccnactacngtggg

SEQ ID NO: 9296 - DNA, 487 bp, Homo sapiens
  misc_feature (124)..(124): "n" may be a, t, c, g, other or unknown
  misc_feature (153)..(153): "n" may be a, t, c, g, other or unknown
  misc_feature (238)..(238): "n" may be a, t, c, g, other or unknown
  misc_feature (296)..(296): "n" may be a, t, c, g, other or unknown
  misc_feature (320)..(320): "n" may be a, t, c, g, other or unknown
  misc_feature (360)..(360): "n" may be a, t, c, g, other or unknown
  misc_feature (362)..(362): "n" may be a, t, c, g, other or unknown
  misc_feature (414)..(415): "n" may be a, t, c, g, other or unknown
  misc_feature (469)..(469): "n" may be a, t, c, g, other or unknown
  misc_feature (471)..(471): "n" may be a, t, c, g, other or unknown
  misc_feature (485)..(485): "n" may be a, t, c, g, other or unknown
caaagccgcgcaatcatctgcattttatttgcacctcatttgcaagttgttaatttgcaactctgctccttccactccaggttccttctctcccatcacccctcaaattccccagtggcccagnaaaaaatatcttggtctttgccaaggtanactcagccttgtcagcaggcctgtcctgtgttctcaggggaggcctttacccaaggccacaacaacagcaggaatcccgagtaanacgccaccttgacggcagggaaggctggatcttttcacagggcaaaactgatttgatnaggtgaacagtaaggtgagcaaangtgggaaaggccagtgggtgaatgcaggaacagcaccagnanctagaacccaactctggcctgtgggctgtctcccggtcctcaaaagcggganngggttccccacccaccaccactgtttccccattattttctggcatctccaaacncnggaaaaacccaatncc

SEQ ID NO: 9297 - DNA, 305 bp, Homo sapiens
  misc_feature (252)..(252): "n" may be a, t, c, g, other or unknown
  misc_feature (297)..(297): "n" may be a, t, c, g, other or unknown
  misc_feature (303)..(303): "n" may be a, t, c, g, other or unknown
acttccctaaaggaacctgtgatgcaaggcggaataaaacccctgattcatgtaagaaggctgatgtagagcagtggttctcagcccagggagcccagtagattcacctggggagctcaaaaccggctgtgtggggctgcagcccaggccaagaaactcagcatctccggcatagtgagaagggggctctgtgttgaggagtacaattctggattcaaatctgtcacctagtgggtatgtgaccttgagcancttctaaaccgttttgaacataatctcatctgtgacatgaaggtntactcnct

SEQ ID NO: 9298 - DNA, 442 bp, Homo sapiens
  misc_feature (156)..(156): "n" may be a, t, c, g, other or unknown
  misc_feature (296)..(296): "n" may be a, t, c, g, other or unknown
  misc_feature (388)..(388): "n" may be a, t, c, g, other or unknown
  misc_feature (409)..(410): "n" may be a, t, c, g, other or unknown
  misc_feature (427)..(427): "n" may be a, t, c, g, other or unknown
  misc_feature (440)..(440): "n" may be a, t, c, g, other or unknown
acaatagaaaaatattgttcactggtttatttttccaaatgagcatcaggctatttacaaatacgcagccctccaatgacgtgtattaaaatggcaagtctatcactgtttgaaatctaaatgaaaacaaatttattaaggcacatttgatctganaatttaactttctggtataatgacagattcatttcacttttgtccccaaaacacatgagcaccaaaattgtcaaagaacacttaatatttagtaaaacagtaaggaatataaaaattaaggaggggaaaaagcgtttccnaaaggaaatctttggagatcggtttactgcaaataaaacagactaaacaccctcccgatacacataaataatactaactaacaggtctcaanaatggcgaacctctgaacacnnattttaattaatttaanggttttcccaatncc

SEQ ID NO: 9299 - DNA, 533 bp, Homo sapiens
  misc_feature (53)..(53): "n" may be a, t, c, g, other or unknown
  misc_feature (247)..(247): "n" may be a, t, c, g, other or unknown
  misc_feature (311)..(311): "n" may be a, t, c, g, other or unknown
  misc_feature (366)..(366): "n" may be a, t, c, g, other or unknown
  misc_feature (387)..(387): "n" may be a, t, c, g, other or unknown
  misc_feature (421)..(421): "n" may be a, t, c, g, other or unknown
  misc_feature (432)..(432): "n" may be a, t, c, g, other or unknown
  misc_feature (493)..(493): "n" may be a, t, c, g, other or unknown
  misc_feature (509)..(509): "n" may be a, t, c, g, other or unknown
  misc_feature (518)..(518): "n" may be a, t, c, g, other or unknown
  misc_feature (531)..(532): "n" may be a, t, c, g, other or unknown
gaagaataacaattgagttttattctttaaaggcattctctgatttacatganaattgagaaactgagatgtatgatttgtctgttagtcaatttcacaccctttcattctcataagccccaaattttgctcagttaaggagcttgctttaggcccacctatgtaagtctgttatactagctaatgtgcccatttgaatagttcaagggtcagctaatgctctgagcttcatggctccagtataaanaacaaatttaacaaaattaagctgttactgtagccgaattacccttctgctccacacatatgtnttgggatcttgcaggatttccatagtgccaattatcaaaggccttgactacttancattgctgtattacagatgtncaaactgaggcctgaaaagtccaatttaaagtcntattgaagggnccaaaaaggaagcttattttggggctttggccattttacctacttatctaaaattgctgcnaaacaccttttaaacntttcaaatnttttgacggtttnna

SEQ ID NO: 9300 - DNA, 430 bp, Homo sapiens
  misc_feature (37)..(37): "n" may be a, t, c, g, other or unknown
  misc_feature (72)..(72): "n" may be a, t, c, g, other or unknown
  misc_feature (115)..(115): "n" may be a, t, c, g, other or unknown
  misc_feature (301)..(301): "n" may be a, t, c, g, other or unknown
  misc_feature (358)..(358): "n" may be a, t, c, g, other or unknown
  misc_feature (388)..(388): "n" may be a, t, c, g, other or unknown
  misc_feature (392)..(392): "n" may be a, t, c, g, other or unknown
  misc_feature (395)..(395): "n" may be a, t, c, g, other or unknown
  misc_feature (425)..(425): "n" may be a, t, c, g, other or unknown
aatcattgagtgttttattgaacaattaagaaatgtntaaccatttcattactttacaatagtaaaactganttgtaactttttctgtgaatatgcgaatttgtatttgaaagantttagacttgtattgaatgagatgtatcttgactataaagtgttttctttttcagtacaaaatatacaaaccagtacatgttttaaacataaatataactgagaataggttatgcttctactcaaatgcacttgtggaaagtaccattcatccgcaaagacacttttaataagctttgacaggaanacaaactcgacagtgttgtcagattttctatttaaaattacatttatattaaccccnacctttcattttagcaaaatggtttatggnttcntcnactttataatatttacaaagttaaacttcnactcc

SEQ ID NO: 9301 - DNA, 473 bp, Homo sapiens
  misc_feature (19)..(19): "n" may be a, t, c, g, other or unknown
  misc_feature (314)..(314): "n" may be a, t, c, g, other or unknown
  misc_feature (320)..(320): "n" may be a, t, c, g, other or unknown
  misc_feature (382)..(382): "n" may be a, t, c, g, other or unknown
  misc_feature (401)..(401): "n" may be a, t, c, g, other or unknown
  misc_feature (452)..(452): "n" may be a, t, c, g, other or unknown
  misc_feature (458)..(458): "n" may be a, t, c, g, other or unknown
  misc_feature (465)..(465): "n" may be a, t, c, g, other or unknown
caagttatttctatagcanacatatttttgaagtctacccacccctgagttcagcaattatactttgagtgtaaaattatatgcccttaattaacaacatgtacaaagctacaaaatgtcatctatacagattaaaaacaattttaaaatattatttaccaattattgattgaatggttttactggggtacgtatttcaaacctttcagccaactggctttcagttttaagcccaaattgattcatatattcactgcaggatatttcaaaaagagtgcaacaataaggcattagtaaaaataacattgtagtanaaacanattttgcatatgtgaaaaggtaatttataaaatacattaatcactttttaaaaagaacttanttgtagtatcattaactcncatgggtactgaaaaactggacctttcacaattttttttttctataaaaanttccanctacctntaagcaaa

SEQ ID NO: 9302 - DNA, 482 bp, Homo sapiens
  misc_feature (91)..(91): "n" may be a, t, c, g, other or unknown
  misc_feature (108)..(108): "n" may be a, t, c, g, other or unknown
  misc_feature (244)..(244): "n" may be a, t, c, g, other or unknown
  misc_feature (334)..(334): "n" may be a, t, c, g, other or unknown
  misc_feature (370)..(370): "n" may be a, t, c, g, other or unknown
  misc_feature (406)..(406): "n" may be a, t, c, g, other or unknown
  misc_feature (427)..(427): "n" may be a, t, c, g, other or unknown
  misc_feature (462)..(462): "n" may be a, t, c, g, other or unknown
  misc_feature (465)..(465): "n" may be a, t, c, g, other or unknown
  misc_feature (474)..(474): "n" may be a, t, c, g, other or unknown
cagtagcttttcaagtttatttaaaaaagcagaacacacaaaaatacatacaacaccccagataatgtcctttacagaatcccagtatgtncaacagatacagcagancctgtctgttggaaggtgggaggccctgcagccctgtctccctgcctcctgctctatcgccacacccccactgcagcctacaaggttcctaaggtacttttggaaaatcctaggcctctgaggaacagtttgaaanactactttagaaaatctttcaagactaacgttcaactctatcctaaattataagataaagaggttgatgacaaactggaaatcaccctcntgcagaaaaaaacaaacagggtctaaagcaccctanggagaacacaatgtttctcaaagcacaaagacctcnagctctgagccccctcctgtnttacctggggaaatccttaaccttctaggccttanctncctcccttntgaattta

SEQ ID NO: 9303 - DNA, 538 bp, Homo sapiens
  misc_feature (104)..(104): "n" may be a, t, c, g, other or unknown
  misc_feature (232)..(232): "n" may be a, t, c, g, other or unknown
  misc_feature (357)..(357): "n" may be a, t, c, g, other or unknown
  misc_feature (415)..(415): "n" may be a, t, c, g, other or unknown
  misc_feature (457)..(457): "n" may be a, t, c, g, other or unknown
  misc_feature (512)..(512): "n" may be a, t, c, g, other or unknown
  misc_feature (517)..(517): "n" may be a, t, c, g, other or unknown
  misc_feature (522)..(522): "n" may be a, t, c, g, other or unknown
  misc_feature (529)..(529): "n" may be a, t, c, g, other or unknown
cagttgtaaaaaattgacatcattattctaaatgttatgtggaatcacaggaagaaacatcattgcaatcattattcaaagtaatattaaagataacataaganatgtttggtcttaaatgtcaatttgaatgtatagtgtctacaataatagatcaaagagaaagtaagtatatctgtaataaaaacaagaaaaaatgagttgcaaatactgtattctacaatgaaagaanaatgcagattaaggataaaacagtcttaccaactaggccacctttaaggatcatttttcagggtagctaaaaggagtaacaataaagctctacacatataactaaaatgtttgcaattaatctantcccagcacttttatttgtagagttctcaaatcaaaagtaacaaataattatacctcngggattgttaggaataccaattattttacaactgcccctacntgtttctcctccctgaccaagtggcacaaatccagcctgctgtgtttaatacaanccctnccttncgtcaanaactccttt

SEQ ID NO: 9304 - DNA, 480 bp, Homo sapiens
  misc_feature (43)..(43): "n" may be a, t, c, g, other or unknown
  misc_feature (89)..(89): "n" may be a, t, c, g, other or unknown
  misc_feature (243)..(243): "n" may be a, t, c, g, other or unknown
  misc_feature (386)..(386): "n" may be a, t, c, g, other or unknown
  misc_feature (426)..(426): "n" may be a, t, c, g, other or unknown
  misc_feature (451)..(451): "n" may be a, t, c, g, other or unknown
  misc_feature (455)..(455): "n" may be a, t, c, g, other or unknown
  misc_feature (463)..(463): "n" may be a, t, c, g, other or unknown
gtatttaataaaatggcaatttgtaaattctggtgaatactcnaaattgtagctaaaaacagctatctgaatataggtttaaaacctcnaagacacagagctaagaaatatggaatacattgtatattgctttttcaatagagtagacataaaattgatgacaaatgtttccaaaccctcaataagaactcaaaacatcatactatgccaagctgaattacagaagggtatctaagaaagaanacagtgcatcagttatctctagataaagagccagtaaaatcaagttgcatttgatgtatacatcttattgggagtagttttcagaaagcaatttccctacaaacagaaaaagcattttttttttctatttcagtctttaacantgtggtctcccataaaaaaaaatgactacttgaaaataanaagtttttcctaccttaaaactttnttangggggttnaaataggaaattgtccc

SEQ ID NO: 9305 - DNA, 513 bp, Homo sapiens
  misc_feature (107)..(107): "n" may be a, t, c, g, other or unknown
  misc_feature (110)..(110): "n" may be a, t, c, g, other or unknown
  misc_feature (464)..(464): "n" may be a, t, c, g, other or unknown
  misc_feature (481)..(481): "n" may be a, t, c, g, other or unknown
  misc_feature (497)..(497): "n" may be a, t, c, g, other or unknown
cgattcaattcatattttatttagtacatggctgatgtttcctgtgaatttgtgaacatcagtgggaaaaatacatggcaataaagtaaaattataaaatacagtanaanattatggtttgaggtaataccaatttggatagattttagcaagtaaaaaatatacaaatgaagtatatttatatacccaagtcattaaacagccctttatttcttgagctataattttaatgaggggaatgtgaactaagacctataagcacatagctatgtatagttctcattgtggttattacctttgatggagacttgtttttcttttaagcctttttctcccctgtttgatccttgaagtccatgtcatctcttgatagtactgcagacagctgggtctgtgccaaatgctgtagtagatgtcatgatcctttccctctttatcattccattcacttttggattcatgtnttccacaaatattatcnatatttacagatggcncagatgaactccctcc

SEQ ID NO: 9306 - DNA, 563 bp, Homo sapiens
  misc_feature (352)..(352): "n" may be a, t, c, g, other or unknown
  misc_feature (444)..(444): "n" may be a, t, c, g, other or unknown
  misc_feature (496)..(496): "n" may be a, t, c, g, other or unknown
  misc_feature (533)..(533): "n" may be a, t, c, g, other or unknown
  misc_feature (560)..(560): "n" may be a, t, c, g, other or unknown
aatgaaaagaaacatttatttacactttgtacatatcgattccaacaaacaataaaaggcctacacatcagtataatcataatatatgcgaacttccgatcttctcacactttgcagtgatctgatgctttcactcctggttctgatatttgattttttgaacagccttcttgaaaatgacctacacatgaaaaagtaaattattggatccaggcaaacattacacgcagacaagaaaagtgtaatttctttgcagtaatataggattttttgtgcagattcatctaaaagcctgtctaagtgactaaaagtaaaaggaattctgcacaagtgatatggtagaaagcaggtnaaaaacacagccacaacaaccctgatgctctggttatgttttcgctttcggcttgactgacttatgaattgcctgctggatttgtggatgtnctggatatggctatgttacatccgatcagaatcccaccacggcacaaacaancactgttcccataggttactgccgtatgccctttganccccaaaggacttttaatttttgaacnatc

SEQ ID NO: 9307 - DNA, 510 bp, Homo sapiens
  misc_feature (114)..(114): "n" may be a, t, c, g, other or unknown
  misc_feature (271)..(271): "n" may be a, t, c, g, other or unknown
  misc_feature (305)..(305): "n" may be a, t, c, g, other or unknown
  misc_feature (457)..(457): "n" may be a, t, c, g, other or unknown
  misc_feature (477)..(477): "n" may be a, t, c, g, other or unknown
  misc_feature (485)..(485): "n" may be a, t, c, g, other or unknown
aaatttgagacggagcctcgctgtcacccaggctggagtgcaatggcacgatctcggctcactgcaacctccgcctcctgggttcaagtgattctcctggctcagcctctcgantagctgggattacgggtgcccaccaccatgcccagctaattcttgtatttttagtaaaaatggggtttcaccaggttggccaggctggtctcaaactcctggcctcaaatgatccacctgcctcagcctcccaaagtgctgggattataggcatganccacagcgccagcccacctcacagatttactganattaaatgaaaaacatcctataaatagtttgtcccaggcaccatctaagcacaaaatacagtggtggataaaacaaaaaacaaatccctgccttcctggaactgaaattccaaggcgttaaagtggaaaaagcaaaatcaaaaaattagctntcaattcgtttttaaaaccncaccccantggttgccaaccattggcattttcc

SEQ ID NO: 9308 - DNA, 437 bp, Homo sapiens
  misc_feature (34)..(34): "n" may be a, t, c, g, other or unknown
  misc_feature (169)..(169): "n" may be a, t, c, g, other or unknown
  misc_feature (302)..(302): "n" may be a, t, c, g, other or unknown
  misc_feature (390)..(390): "n" may be a, t, c, g, other or unknown
  misc_feature (410)..(410): "n" may be a, t, c, g, other or unknown
  misc_feature (428)..(428): "n" may be a, t, c, g, other or unknown
gagatggagtcttgctctgttgcccaggctggantgcagtggcataatcttggctcactgcaacctctgcctcctgggttcaagaaattctcctgcctcagcctcccaggtagctgggactataggcgcgcaccaccacacctgtctaatttttgtatttttagtaaanatggggtttcacgatgttggccaggctggtctctaactcctgacctcgtgagctgcccgccttggcctcccaaagtgctgggattacaggcgtgagccaccgcgcccgcccaacacctcttaagggtcaagtnctgatttaagacctgggggtccatcaagaatgacaaatgctcccggctctcgggcggttcccggccaatggaagaaaaaccacttgtnaaaaaaacatgctcaactcnaacaggacctgaaccatnaaaaaaaat

SEQ ID NO: 9309 - DNA, 556 bp, Homo sapiens
  misc_feature (8)..(8): "n" may be a, t, c, g, other or unknown
  misc_feature (10)..(10): "n" may be a, t, c, g, other or unknown
  misc_feature (118)..(118): "n" may be a, t, c, g, other or unknown
  misc_feature (126)..(126): "n" may be a, t, c, g, other or unknown
  misc_feature (149)..(149): "n" may be a, t, c, g, other or unknown
  misc_feature (192)..(192): "n" may be a, t, c, g, other or unknown
  misc_feature (197)..(198): "n" may be a, t, c, g, other or unknown
  misc_feature (218)..(218): "n" may be a, t, c, g, other or unknown
  misc_feature (220)..(220): "n" may be a, t, c, g, other or unknown
  misc_feature (264)..(264): "n" may be a, t, c, g, other or unknown
  misc_feature (294)..(294): "n" may be a, t, c, g, other or unknown
  misc_feature (313)..(313): "n" may be a, t, c, g, other or unknown
  misc_feature (330)..(330): "n" may be a, t, c, g, other or unknown
  misc_feature (349)..(349): "n" may be a, t, c, g, other or unknown
  misc_feature (364)..(364): "n" may be a, t, c, g, other or unknown
  misc_feature (414)..(414): "n" may be a, t, c, g, other or unknown
  misc_feature (446)..(446): "n" may be a, t, c, g, other or unknown
  misc_feature (489)..(489): "n" may be a, t, c, g, other or unknown
  misc_feature (502)..(502): "n" may be a, t, c, g, other or unknown
  misc_feature (519)..(519): "n" may be a, t, c, g, other or unknown
  misc_feature (534)..(534): "n" may be a, t, c, g, other or unknown
  misc_feature (536)..(536): "n" may be a, t, c, g, other or unknown
  misc_feature (545)..(545): "n" may be a, t, c, g, other or unknown
  misc_feature (553)..(553): "n" may be a, t, c, g, other or unknown
ggaacaananattttaactttttatggcaaaatttactggtgtcaattgtattttaattgaaaggtcaacaccatgttgctgtctctattccactgaacaaaaatgactttgaaatanaggaaaanaatagccagttttaactggcganaattttttaaaatcacattttcacaacactacaacatatgganatgtnnacagttagtctttaacacanantgctgtagtattttatactgtggtgcttggggaaatattcctantgaataaccggcagtctgtgcaggaaccancagtccacacttctaggtntaaatatggaggaaaancttctgctcccgcctcaanaaaagtggactcccnaagggtacctgtctcattttaaaacctataccatgaaaaccaattcccanttcctacactctgttctaccttcataattttnctttcacatatttctttccgccagccatccaggctcctgccanttattaacttccncaaaataatcccatttnccctccttccccctnanaaaggactncttttaanttt

SEQ ID NO: 9310 - DNA, 513 bp, Homo sapiens
  misc_feature (153)..(153): "n" may be a, t, c, g, other or unknown
  misc_feature (349)..(349): "n" may be a, t, c, g, other or unknown
  misc_feature (365)..(365): "n" may be a, t, c, g, other or unknown
  misc_feature (372)..(372): "n" may be a, t, c, g, other or unknown
  misc_feature (469)..(469): "n" may be a, t, c, g, other or unknown
  misc_feature (478)..(478): "n" may be a, t, c, g, other or unknown
  misc_feature (488)..(488): "n" may be a, t, c, g, other or unknown
ctggctaattttgttttttaatgagaaacatctgagttgtacatatcacaaacagcttcaagtttctgtaccaaccccccgcccccacccccgccgtggccaaacagttaaaacccaaagcaaagcatcactttggatgtgaaaaagtcttanaaaattaacttacaaaaacatccctatcaagtcggtagtttggcatttactttacattagtcaaaagctccagctaaaatctaatttttttaaaaaaaaatcgaagtttacattattcatacagattgggcattgttaaaaaatatgcacaaataaccacatccatgcaatataatttctttaaaaatttaaagcnatataaaagagcaganctaggtnctgaacagaacattttggtgtataaccggcagctcaaaattgccagctgattggaattaaactgaatctaacgttttaaatatgaatgatgtttccntccactaanggtgcccatnatttctgaaacattccagggtgaat

SEQ ID NO: 9311 - DNA, 458 bp, Homo sapiens
  misc_feature (65)..(65): "n" may be a, t, c, g, other or unknown
  misc_feature (307)..(307): "n" may be a, t, c, g, other or unknown
  misc_feature (371)..(371): "n" may be a, t, c, g, other or unknown
  misc_feature (375)..(375): "n" may be a, t, c, g, other or unknown
  misc_feature (415)..(415): "n" may be a, t, c, g, other or unknown
acatttgcctggtttttattgagtggatctctcacgacaaaatcatgaatattacactgaaaggnttattacattatctttgtgtagttactctcctgtataaaccctgtgatgttccggttttgatgcctgggtaaaagcttaagcatgcacgttacatttgtatggtttcatcaaaaaagtttttgatgcctagtgagactttggcctgcggaaaatctctatcacatataattattataaatgctctttagtatggattctctgatgttgatgaatgtttgaagtcataatggtttcccactcncagtgtttttgtttctctcaagcatgaatttttgcaatattgtacaatgtgagaattgtgccanaaanaacttgccacattcattacatttgttagggttctcaccancaaaaaatcctttgaaaaatcctggtctcaaattttaccttaa

SEQ ID NO: 9312 - DNA, 464 bp, Homo sapiens
  misc_feature (101)..(101): "n" may be a, t, c, g, other or unknown
  misc_feature (313)..(313): "n" may be a, t, c, g, other or unknown
  misc_feature (354)..(354): "n" may be a, t, c, g, other or unknown
  misc_feature (416)..(416): "n" may be a, t, c, g, other or unknown
  misc_feature (453)..(453): "n" may be a, t, c, g, other or unknown
  misc_feature (463)..(463): "n" may be a, t, c, g, other or unknown
ggtaatgacagggtcttgctgtgttgcccaggctggtcttgaattcctggtctcaaggggatccaaggaatcctcccacttcggcctaccaaagtgctganatttcaggcgtgagctactgcacccagccagtcacttacaagtgtgtctgatttccacatatttgtgagtttcccaacttttcattgttttctaacttcatcccatgtggtcagagggcatgctttgcatgatttcagtctacttatatttattaaggcttgttttatgctttaacttatgacctattttggagatgtttcatatgcactcnaaaaaaatatgtattctgatgttgggtggaaagttctatanatgtcttttaggtcaatttgccttataatgttgttcaagtcttctatttcctggtttatctnctgtctaggtgctctattattgaaaaaaggggttttnaatatcccanc

SEQ ID NO: 9313 - DNA, 524 bp, Homo sapiens
  misc_feature (254)..(254): "n" may be a, t, c, g, other or unknown
  misc_feature (443)..(443): "n" may be a, t, c, g, other or unknown
  misc_feature (445)..(445): "n" may be a, t, c, g, other or unknown
  misc_feature (498)..(498): "n" may be a, t, c, g, other or unknown
aattggaatcagacatttaatggcataaaaacattgcatatatggctttgctgttccgaatgtcatgaacttaaaatccaaatatgacataagcagttttaagacttattttggccagcctccccaatcccaaaggagatttaaaagtaataatgtaaaaaagttaaggtcaaggtgttttaaaatcaacatctcagctaatgactaaccctttgtttcctggggacttctgctctactgtgaaaactgctgancttaacccgctgttgaacaactggttagttattagttccctgggtgattgtccctgaagttaagccatgctctggggacacatgaggcactttaattggggtagttactttttccaggttgggtacaatgtttggctctcaaaaacaaggtaaacagtttacagtcaaaaagaatgctctgtgaatgtntncccttgggatcaagggttgaaatcttaaaattttccccctaacctccttttcnagtttcccaaaaaaattttaaaggtt

SEQ ID NO: 9314 - DNA, 485 bp, Homo sapiens
  misc_feature (339)..(339): "n" may be a, t, c, g, other or unknown
  misc_feature (459)..(459): "n" may be a, t, c, g, other or unknown
  misc_feature (461)..(461): "n" may be a, t, c, g, other or unknown
  misc_feature (470)..(470): "n" may be a, t, c, g, other or unknown
gttttgtcctccaaattttcctgtagcaaaatgaaattgttgtctcctatcagattatagcaatcctggcattattataaaagatttcccttatctaattggaactaagaagtgatatgttttaatctgagatatttctagactgacataaaaagtaaagttttgaatttggctatatcacttaacccataaacaagcttagtacaccttacttcagattccttatgaataaattctgactttgatagaaaaattaacacaagtttattgtatgttttgtgtgtcagaaattgtgctacatgatagaaaacacacagaaacataagattctcataaggntaaggactatgaaatataaggaaatcaataaaattagccaaaatgcctcatgaaaatgcaaatcatgttttaaatgctaaagagactcatattaactgtatagaactttatattcccacncnttatgaaantgaaccaccagtgaa

SEQ ID NO: 9315 - DNA, 469 bp, Homo sapiens
  misc_feature (420)..(420): "n" may be a, t, c, g, other or unknown
  misc_feature (422)..(422): "n" may be a, t, c, g, other or unknown
  misc_feature (442)..(442): "n" may be a, t, c, g, other or unknown
cacaaaaagatgtattttcattcatgagtatttacatttttcatatttgtttaaagaatatcatataactgataccttctgaaatgtttcatgcttttaaactcttctatttacacttatctgacatggaattaaaactaaaatggtcaaataccatgataatagaaagcaaccagccaacatagctaggtcttctcttaaatttgctgatcaacattagcagtagttaccttaataataaattattcattttaaaatcagtagtaactttagacaattcataaataagtgtgctctgtgcaatttacacgtttaatatcctgtggatactaaaagcttgtatattgtcagatttgcacattattactttatcaaaaacagtaagctttcccaaagatgaagctggggaaacttgaaaananattctaaagggtctctgganaattatccaagctctgcctgctttaca

SEQ ID NO: 9316 - DNA, 332 bp, Homo sapiens
  misc_feature (87)..(87): "n" may be a, t, c, g, other or unknown
  misc_feature (154)..(154): "n" may be a, t, c, g, other or unknown
  misc_feature (156)..(156): "n" may be a, t, c, g, other or unknown
  misc_feature (210)..(210): "n" may be a, t, c, g, other or unknown
  misc_feature (301)..(301): "n" may be a, t, c, g, other or unknown
  misc_feature (327)..(328): "n" may be a, t, c, g, other or unknown
attctaaaatctcaaccaaaatgatgggatcatgggtgcaaagtgggtttttcctttaaattgtgagaaaccatttccacatttcanatctaatggtgttctcatgacattgcaaagtagtattttatgccctcaaaactgaaccttaaggtananacaattgctccccgggccaaacacagatccctccaacccctcactgtaccttangaaagctggggtaaactacagattcaacaaaatctcaataagaaaatcccaaaaaccttccccaatgccctgtggtttggcctgaacatanggaaaatggactgctgggtggctacnnaaca

SEQ ID NO: 9317 - DNA, 495 bp, Homo sapiens
  misc_feature (424)..(424): "n" may be a, t, c, g, other or unknown
  misc_feature (426)..(426): "n" may be a, t, c, g, other or unknown
  misc_feature (428)..(428): "n" may be a, t, c, g, other or unknown
  misc_feature (440)..(440): "n" may be a, t, c, g, other or unknown
  misc_feature (454)..(454): "n" may be a, t, c, g, other or unknown
  misc_feature (459)..(459): "n" may be a, t, c, g, other or unknown
  misc_feature (468)..(468): "n" may be a, t, c, g, other or unknown
ggctgtgataggtttattcagaggaagcactagactctggggtagctcacatgggtaagaaagacttccaggagcaggcattgaagggttggcaccctgggtgagtgtccaaggtcagcgagagtcacttgtggaggggacggaagatgacctggctgatctggccagggatggtgtagaagaccaggaggaggaagacggtgagcagcaccagtagcagcagcaccagggtgcgccagtaccggcgccagatgaagaagacaaaggtcttcagcgggttcacaaaccagttgaaggaagttttggggcggctgggtttctccagaggctctggctgcttccgccccttccccactggccgtttctcggcctcctccacagtcagcagctcaaactctgcctccaccttgcccgtgaggatgtncncnttgccacccatntctgtgaactccangtctnctggccggnccttcctcctcctctgctttcgcttct

SEQ ID NO: 9318 - DNA, 336 bp, Homo sapiens
  misc_feature (250)..(250): "n" may be a, t, c, g, other or unknown
  misc_feature (311)..(311): "n" may be a, t, c, g, other or unknown
  misc_feature (316)..(316): "n" may be a, t, c, g, other or unknown
aacaggaaggattatttattcttctttatagtgttatcaattgatacaatgtcccaaatgttgagaaaatgctaaacttttagcctacaaggattaccttaacaaccaacagaacacaagcagtcatccttacaaatcgtagttttaccccagtgataagtttgtctaacctccagcctgcgctgtttctcaggatcttcctcattcatgattcgctccttctctgctctttttttctcctcccgccganactgtgctgcttcctgtctttgcacatgtgtcagtttcaagaaattctcttctactcgggnacggntcttatctgctttttgtttg

SEQ ID NO: 9319 - DNA, 437 bp, Homo sapiens
  misc_feature (9)..(9): "n" may be a, t, c, g, other or unknown
  misc_feature (76)..(76): "n" may be a, t, c, g, other or unknown
  misc_feature (205)..(205): "n" may be a, t, c, g, other or unknown
  misc_feature (283)..(284): "n" may be a, t, c, g, other or unknown
  misc_feature (342)..(342): "n" may be a, t, c, g, other or unknown
  misc_feature (408)..(408): "n" may be a, t, c, g, other or unknown
  misc_feature (436)..(436): "n" may be a, t, c, g, other or unknown
gagacagantctcactctgtcacccaggctggagtgcagtggcatgatctcgctcactgtaacctctgccccccanagttcaagtgattctcttgcctcagcctcccaagtagctaggattacaggtgcgtgccaccacacttggttaattttttttttttttttttttttgaaatggagtctcactctgttgcccaggctggantgcaatggtacaatctcggctcactataacttctgcccccgggttcaagcgattctccccgcctcagcctcctgagtnnctgggattataggcacctgccaccacatctggctaatttttgtatttttagtaaaaanaaggtttcatcaccttgggcaagttggtcttgaacttctgaactccaggtgatcctcctgcctcancctcccaaattgttgggattaccacttna

SEQ ID NO: 9320 - DNA, 477 bp, Homo sapiens
  misc_feature (135)..(135): "n" may be a, t, c, g, other or unknown
  misc_feature (169)..(169): "n" may be a, t, c, g, other or unknown
  misc_feature (404)..(404): "n" may be a, t, c, g, other or unknown
  misc_feature (445)..(445): "n" may be a, t, c, g, other or unknown
  misc_feature (468)..(468): "n" may be a, t, c, g, other or unknown
aatgaattctaggatgaaagaccaaaattaggaaagaacaaagatgcattcatgaattcaagaggagtcataaagaagccaagagtattttaacttacacagtaataacataacattaatcaaaagttacagaanacacagctcaggcttgtaggtttacaggcaatanacactgtaatgacagtgttttttttttttgtcagtacttctatatgaattacgtttcatcttttatttgtatatccattcacatgctacataatgttcactcttgtaaactcccaacacattccagttggctccattaacttcagggagttctgtagcacctctgattgttaataggatacacaactcccataggggaatattatctccccactgagccaagctaactgtgagangtatcaccttcccaaccagccttcttccgcccctttctgangcatcgagctgcagctccaggtngacaatcca

SEQ ID NO: 9321 - DNA, 429 bp, Homo sapiens
  misc_feature (254)..(254): "n" may be a, t, c, g, other or unknown
  misc_feature (395)..(395): "n" may be a, t, c, g, other or unknown
  misc_feature (397)..(397): "n" may be a, t, c, g, other or unknown
  misc_feature (427)..(427): "n" may be a, t, c, g, other or unknown
ggagctttttaaacaaataaacaaacaaaatagacaaaacataattttacccacaagtacttcagtatgcatttctaacaaattaggatctttaaaaaaacataacaacaatatcatatcacacctatcaagattaacaataactcctcaatgtcagtccatatccatttaaactctttgtaatggaggaacatattcctttaaacataagcttgtagaatcacacaatttaagtggaataaggtgaagggaangagagaggcagagtcctgcccttcacccttgtcccagaagtttgaaaagtttgaaagtcgctattttacccctgacagttcgaaagtcgctattttacccctgaccctccttttgcatcctgagaaacactgaaggtccananaaaaaacggtaaatggtcaaggtcataaanca

SEQ ID NO: 9322 - DNA, 455 bp, Homo sapiens
  misc_feature (91)..(91): "n" may be a, t, c, g, other or unknown
  misc_feature (129)..(129): "n" may be a, t, c, g, other or unknown
  misc_feature (160)..(160): "n" may be a, t, c, g, other or unknown
  misc_feature (347)..(347): "n" may be a, t, c, g, other or unknown
  misc_feature (368)..(368): "n" may be a, t, c, g, other or unknown
  misc_feature (370)..(370): "n" may be a, t, c, g, other or unknown
  misc_feature (451)..(451): "n" may be a, t, c, g, other or unknown
gtactgacgtttggcattgcctttatttactttgcaaatgacccattctcaggctgaggcgttcagatacttcacttctctctccgaaaantaagcatgacggcccagtgcggtggctcatacctgtantcccagctactcaggaggctgaggcaggaanattgcttgagcacagacgttcaaggttacagtaagctacgatggcaccattgcgctccagcctgagcaacagagcaagatgttttctcagtgcctttctgcttctccaggaagttgtacccgtcagcacctgctgagggctttgttgtccaaaccctgacaggtaaaaaaattcctgtagaataaanccagaccagctggctttgaananaaacccccagtttgggctgcgtttgcctcctctccttttctatgaagaccgaagctttgtcccttgatcgtcaaccgtganatgc

SEQ ID NO: 9323 - DNA, 492 bp, Homo sapiens
  misc_feature (4)..(4): "n" may be a, t, c, g, other or unknown
  misc_feature (73)..(73): "n" may be a, t, c, g, other or unknown
  misc_feature (102)..(102): "n" may be a, t, c, g, other or unknown
  misc_feature (109)..(109): "n" may be a, t, c, g, other or unknown
  misc_feature (117)..(117): "n" may be a, t, c, g, other or unknown
  misc_feature (155)..(155): "n" may be a, t, c, g, other or unknown
  misc_feature (161)..(161): "n" may be a, t, c, g, other or unknown
  misc_feature (211)..(211): "n" may be a, t, c, g, other or unknown
  misc_feature (373)..(373): "n" may be a, t, c, g, other or unknown
  misc_feature (402)..(402): "n" may be a, t, c, g, other or unknown
  misc_feature (409)..(410): "n" may be a, t, c, g, other or unknown
  misc_feature (418)..(418): "n" may be a, t, c, g, other or unknown
  misc_feature (436)..(436): "n" may be a, t, c, g, other or unknown
  misc_feature (448)..(448): "n" may be a, t, c, g, other or unknown
  misc_feature (480)..(480): "n" may be a, t, c, g, other or unknown
gggntttgaaaacaacacttttatttacaacaaatagatggtagtgcaacagcactcgtgggatgtttacganaaataaaaatactagtattctggcatccnttgggtncaggcccntttatatttatagatgtctacaatgactcataaaagtnaaatcnataaaggctattaatttgtatttcaacctgaatttgagaaaccaatgaanattaatcatttatttgggatctagatccatatatctgaaaactgaagtataaagtttctcatttccatttaccttgtcaacaaacatatcccaaacatttcagcatctgtaaaaggtgatctatttagcatctgtaataagtgatttatagttatatatgcnaaataaaggttgacacagctggatcctanaaactcnnattttatnaatttaaaataaattaantttttatgcccnaaaacaaaaccggatcttggattttttttaanttttgaaatccc

SEQ ID NO: 9324 - DNA, 497 bp, Homo sapiens
  misc_feature (4)..(4): "n" may be a, t, c, g, other or unknown
  misc_feature (37)..(37): "n" may be a, t, c, g, other or unknown
  misc_feature (41)..(41): "n" may be a, t, c, g, other or unknown
  misc_feature (102)..(102): "n" may be a, t, c, g, other or unknown
  misc_feature (155)..(155): "n" may be a, t, c, g, other or unknown
  misc_feature (249)..(249): "n" may be a, t, c, g, other or unknown
  misc_feature (294)..(294): "n" may be a, t, c, g, other or unknown
  misc_feature (330)..(330): "n" may be a, t, c, g, other or unknown
  misc_feature (341)..(341): "n" may be a, t, c, g, other or unknown
  misc_feature (439)..(439): "n" may be a, t, c, g, other or unknown
  misc_feature (445)..(445): "n" may be a, t, c, g, other or unknown
  misc_feature (462)..(462): "n" may be a, t, c, g, other or unknown
  misc_feature (472)..(472): "n" may be a, t, c, g, other or unknown
  misc_feature (474)..(474): "n" may be a, t, c, g, other or unknown
  misc_feature (478)..(478): "n" may be a, t, c, g, other or unknown
  misc_feature (496)..(496): "n" may be a, t, c, g, other or unknown
atanacataatttttattaatatggtatccctgaaanacanattaggtgtaaacattattttgctttacagaaagggaaatggaggcaggttaacttacaanacatctggaaccagaatatctgttgataccacaaccaatgcttttcccacganactatacatagatatactaaagacaatactttttttttttttgacattacagcacacttcctaaatcatctgaaatcctgaggcactgcttcanactggtgtttcttgtagcttcctgtctgcttaggcaacataacanaagtaccatcttcccttaattcctaataaatattanatttttttgtnctaagattcaacagcagaatcctaattaatctctaacacaacaagctatgaattatagaatactatatcttcctactgctctccctgatcttattccnccccanaattctaattgaatgtnaaaagggtcntntccnatccttggccacttggcnt

SEQ ID NO: 9325 - DNA, 457 bp, Homo sapiens
  misc_feature (37)..(37): "n" may be a, t, c, g, other or unknown
  misc_feature (101)..(102): "n" may be a, t, c, g, other or unknown
  misc_feature (131)..(131): "n" may be a, t, c, g, other or unknown
  misc_feature (169)..(169): "n" may be a, t, c, g, other or unknown
  misc_feature (221)..(221): "n" may be a, t, c, g, other or unknown
  misc_feature (233)..(233): "n" may be a, t, c, g, other or unknown
  misc_feature (236)..(236): "n" may be a, t, c, g, other or unknown
  misc_feature (363)..(363): "n" may be a, t, c, g, other or unknown
  misc_feature (369)..(369): "n" may be a, t, c, g, other or unknown
  misc_feature (388)..(389): "n" may be a, t, c, g, other or unknown
  misc_feature (411)..(411): "n" may be a, t, c, g, other or unknown
  misc_feature (426)..(426): "n" may be a, t, c, g, other or unknown
  misc_feature (428)..(428): "n" may be a, t, c, g, other or unknown
cagaatgaaactaacaagggtagtaaatatctatgantacagtaacaaaactatgtatttccatgggcacaatacattttgtaaattctaatttgtattcnntgtcttggggttagggaggaatgattaanataaagaaatagatcagtaatctctctacttcactaanatgagggaagggaaaagtgtaatgtacaggtcaaaataatgctgaaatgcanaatgcttttcanaantatgccattagaccttcaaatgtgctgtaggtgctaatagtacttgtctaacaagaaaatattgagtcattgtcttttgaaggttttaaactgttttatgtcccaaacacatccctaccaggcgtantaagantaatccattaatgttttcnntgattaaaagttgaaattatanaatattgtggaaatntntttttgcattaacttttattttaatcccc

SEQ ID NO: 9326 - DNA, 378 bp, Homo sapiens
  misc_feature (18)..(18): "n" may be a, t, c, g, other or unknown
  misc_feature (89)..(89): "n" may be a, t, c, g, other or unknown
  misc_feature (91)..(91): "n" may be a, t, c, g, other or unknown
  misc_feature (214)..(214): "n" may be a, t, c, g, other or unknown
  misc_feature (273)..(273): "n" may be a, t, c, g, other or unknown
  misc_feature (307)..(307): "n" may be a, t, c, g, other or unknown
  misc_feature (316)..(316): "n" may be a, t, c, g, other or unknown
  misc_feature (373)..(373): "n" may be a, t, c, g, other or unknown
aatttataaaggaaagangtttaattgactcactgttccacatggctggggaggcctcaggaaacttacaatcatggcagacagtgaanangaacaaggcatcttcacaaggtggcaggaaggagaatgaacacaggaggaactatcaaacttataaaatcatcagatctcgtgagaactatcacaagaacagcatgggggaaccgcccccaanatccaattacctccacctgatctctcccttgatgtggggattatagggattacaattcnagatgatattttaggtgggggcacagctaaaccntatcctacnaggaatgactgaaactaaagatactaatttcctttcccttggttggccaagctgtcntcttc

SEQ ID NO: 9327 - DNA, 451 bp, Homo sapiens
  misc_feature (64)..(64): "n" may be a, t, c, g, other or unknown
  misc_feature (109)..(109): "n" may be a, t, c, g, other or unknown
  misc_feature (141)..(141): "n" may be a, t, c, g, other or unknown
  misc_feature (330)..(330): "n" may be a, t, c, g, other or unknown
  misc_feature (384)..(384): "n" may be a, t, c, g, other or unknown
  misc_feature (428)..(428): "n" may be a, t, c, g, other or unknown
  misc_feature (434)..(434): "n" may be a, t, c, g, other or unknown
acataagtggtctcatctacataacaaggccacccttttgctagccaaggctaaactgaaggantagtggtggtgacccaatgtgaaaattgtgccctgttcactacanaaacctgagtttggttcctaagtctagttctncctgtttgatatttgtgttacttttaaagcgtcagcagtttgtcccagctatgatgtggtaataaaagattcaaaaggattttcttcacaagttctatgattaaaagcttaattaaaagcaaatttctttttttttttaattgtactttaagttctggggtacatgtgcaaaacatgcaggttacatangtatacacatgccatggtggcttgctgcatccatcaacccatgatctacattanttatttctcctaatgccatccctctcctagccccccaccctganaggccnaatgtgtgatgttcccc

SEQ ID NO: 9328 - DNA, 265 bp, Homo sapiens
  misc_feature (116)..(116): "n" may be a, t, c, g, other or unknown
  misc_feature (181)..(181): "n" may be a, t, c, g, other or unknown
  misc_feature (203)..(203): "n" may be a, t, c, g, other or unknown
  misc_feature (249)..(249): "n" may be a, t, c, g, other or unknown
ataaaacccacatgaatcactgtggcatccagtttctattcacaaagaaaaagctccagtccatcttttaatttttttgaaaaattcctgacattacagaactaaactgaaatgtnttaatattccactcttacatttccatgacaaacagaaaaattcatgagccaaaaaaaaaaaaccnaaaaaaaaaaaaaaccaggganaagcttataaaactaaatatggatctcagcatcaacagctgaacanaaaaaggaattaaaac

SEQ ID NO: 9329 - DNA, 397 bp, Homo sapiens
  misc_feature (116)..(116): "n" may be a, t, c, g, other or unknown
  misc_feature (226)..(226): "n" may be a, t, c, g, other or unknown
  misc_feature (245)..(245): "n" may be a, t, c, g, other or unknown
  misc_feature (320)..(320): "n" may be a, t, c, g, other or unknown
  misc_feature (338)..(338): "n" may be a, t, c, g, other or unknown
  misc_feature (365)..(365): "n" may be a, t, c, g, other or unknown
ccaatttaatgccctttattttctgatgggtgccaagtcacttactacataaactacaacaataccaagttttcagctaattgtttgcttaaagaatcacagaacttacattcaanatttcatttacatacaaaattcacttgaggctttctggttgaaactttcaatagctttaaaaattatattctctaatttttaaatcacttgcagtttaagctcatttganaaacttttttctccttcanagtaccgtattcatttatcacagcaaaaacgcacctttaaaggtttgtttttgttatggttgctgtttgttcccntatgtttgtttgtatgcntgttttttaagtatgatactgaaggcngaaacaatctgaattccatattccggttcaca

SEQ ID NO: 9330 - DNA, 556 bp, Homo sapiens
  misc_feature (5)..(5): "n" may be a, t, c, g, other or unknown
  misc_feature (8)..(8): "n" may be a, t, c, g, other or unknown
  misc_feature (28)..(28): "n" may be a, t, c, g, other or unknown
  misc_feature (35)..(35): "n" may be a, t, c, g, other or unknown
  misc_feature (44)..(44): "n" may be a, t, c, g, other or unknown
  misc_feature (55)..(55): "n" may be a, t, c, g, other or unknown
  misc_feature (113)..(113): "n" may be a, t, c, g, other or unknown
  misc_feature (121)..(121): "n" may be a, t, c, g, other or unknown
  misc_feature (169)..(169): "n" may be a, t, c, g, other or unknown
  misc_feature (220)..(220): "n" may be a, t, c, g, other or unknown
  misc_feature (276)..(276): "n" may be a, t, c, g, other or unknown
  misc_feature (315)..(315): "n" may be a, t, c, g, other or unknown
  misc_feature (357)..(357): "n" may be a, t, c, g, other or unknown
  misc_feature (400)..(400): "n" may be a, t, c, g, other or unknown
  misc_feature (408)..(408): "n" may be a, t, c, g, other or unknown
  misc_feature (437)..(437): "n" may be a, t, c, g, other or unknown
  misc_feature (452)..(452): "n" may be a, t, c, g, other or unknown
  misc_feature (467)..(467): "n" may be a, t, c, g, other or unknown
  misc_feature (474)..(474): "n" may be a, t, c, g, other or unknown
  misc_feature (495)..(495): "n" may be a, t, c, g, other or unknown
  misc_feature (513)..(513): "n" may be a, t, c, g, other or unknown
  misc_feature (554)..(556): "n" may be a, t, c, g, other or unknown
gaaanggngttttgctcttcttgcccangctggantgccacggngcgatcttggntctacacaacctccacctcccaggttcaagtgattctcctgcctcagccttccaagtngctgggantacaggcatgcgccaacacaccccgttaattttgtagttttagtaaanacggggtttctccatattggtcaggctggtctcgaactccaggtcaggaanatctcaggtgatcttcccgtctcggcctcccaaagtgctgggattacaggcatganccactgcgcctgtccattccttattcttaatcagataanaattgctggttttcacaactaattactccacctcaaaccaanatgccaccacacgcttaaagctcaaaatttctctaaatatgcntccatttnattgtgtttttccactatctccaaggaanaaaaaatctgaattncccatttaatccccnccttccnccttaattgggaaaaaatacnataactattcctttcctnttaacttcaaatctttccccggttccctccaatcttccccnnn

SEQ ID NO: 9331 - DNA, 336 bp, Homo sapiens
  misc_feature (264)..(264): "n" may be a, t, c, g, other or unknown
  misc_feature (308)..(308): "n" may be a, t, c, g, other or unknown
  misc_feature (331)..(331): "n" may be a, t, c, g, other or unknown
cagttaaaatgtagtttatctaaatctcaaaatgtttaataaaaacaagtatcttctccatttaacactttgctttctaactgtacagtaaattgcattgtagagagtacacttctgtcttcaaactgtatcttctttggatggaattaagatgtaactgtatagttttaagataaataaatgggaagttggtccaactaagatgacagcagatatattacatgcaggatttaatattttctaattctctcttttaaaaaaaangatgctgttggattgggaaaaaaaaaagtctaaaaagaacccanattcaatatataaaaatgtcccncaata

SEQ ID NO: 9332 - DNA, 446 bp, Homo sapiens
  misc_feature (291)..(291): "n" may be a, t, c, g, other or unknown
  misc_feature (353)..(353): "n" may be a, t, c, g, other or unknown
  misc_feature (383)..(383): "n" may be a, t, c, g, other or unknown
  misc_feature (403)..(403): "n" may be a, t, c, g, other or unknown
gatttttactggattttatggtttttgaaaagctattttccagtgccatggttttgtaatcctacttttcaactttctgttagagctctaagttattttacttagtacgaggtagtgtttctggcatcaaaagataaattttaaattcctgctttttcaaatttgcgtatgatttttgcatatgatttgtttcagtgggttcttggtgtgctttattttgttgcagggagaggctgaaggctgggaaaaaaaagggagctgaactgggaagataataactggtgacaatanatgtgagttaaactttaggaaaaaggattccctttttttaaaaaaaatcaatacctcaaaancagctttgggacaagaaaacccaaagtggnctgcttttcccacccagganctcattatcccattctgtgccactgaattaggaaactgactgt

SEQ ID NO: 9333 - DNA, 341 bp, Homo sapiens
  misc_feature (80)..(80): "n" may be a, t, c, g, other or unknown
  misc_feature (87)..(87): "n" may be a, t, c, g, other or unknown
  misc_feature (100)..(100): "n" may be a, t, c, g, other or unknown
  misc_feature (133)..(133): "n" may be a, t, c, g, other or unknown
  misc_feature (148)..(148): "n" may be a, t, c, g, other or unknown
  misc_feature (231)..(231): "n" may be a, t, c, g, other or unknown
  misc_feature (258)..(258): "n" may be a, t, c, g, other or unknown
  misc_feature (278)..(278): "n" may be a, t, c, g, other or unknown
  misc_feature (280)..(280): "n" may be a, t, c, g, other or unknown
  misc_feature (294)..(294): "n" may be a, t, c, g, other or unknown
  misc_feature (316)..(316): "n" may be a, t, c, g, other or unknown
  misc_feature (336)..(337): "n" may be a, t, c, g, other or unknown
ctgtttcatccaattttattctttttcataaaagcaatgcagtaaagataaaactaaatgtggaccctgggaacaaggantccagangttgcccaaagantcgcaaagtgcatcaggaaacctgaatgtgaanatcggtgaccgaaancctgatgccagcctcctcttgggtcttgactgaaatcttcccaggttgctattggattttgcatgttcgaacctccatcagangatagacttaggcatatggtttgcccngtgaattgaaaaatctccanantttatgaattgaanaatgggatgaataccatacacngagcaccgaacaaaccatcnnaatc

SEQ ID NO: 9334 - DNA, 468 bp, Homo sapiens
  misc_feature (3)..(3): "n" may be a, t, c, g, other or unknown
  misc_feature (14)..(14): "n" may be a, t, c, g, other or unknown
  misc_feature (40)..(40): "n" may be a, t, c, g, other or unknown
  misc_feature (351)..(351): "n" may be a, t, c, g, other or unknown
  misc_feature (423)..(423): "n" may be a, t, c, g, other or unknown
  misc_feature (445)..(445): "n" may be a, t, c, g, other or unknown
  misc_feature (456)..(456): "n" may be a, t, c, g, other or unknown
ganatttttagtanagatgggatttcaccatgttggccanactggtttcaaactcctgacctcaagcgatccacctgcctcgggctcccaaagtgccaggattacaggcgtgagccaccgcgcccggccacacaaggcattttggcattaacgtatcaagtcttaaaaatctgtatatcatttgtcccccaaattttatttctagggatctgatgcaaagaaatagatcaaatatataaaaagcacgtaccagtacagtaataatattttaaatgtcaaaacattgaaaacaaattatgccacataaacatagtgggccactgcacatttatttaaaaaaaaagattatanaaacttggatataaaaatttgcagctgggcgttgtggctcatgcctgtaatcccaccacttttggaaggctnaggcaggcggatcacaaagtcnaaaaaaaattntttaggaaatcc

SEQ ID NO: 9335 - DNA, 499 bp, Homo sapiens
  misc_feature (312)..(312): "n" may be a, t, c, g, other or unknown
  misc_feature (368)..(368): "n" may be a, t, c, g, other or unknown
  misc_feature (437)..(437): "n" may be a, t, c, g, other or unknown
  misc_feature (455)..(455): "n" may be a, t, c, g, other or unknown
  misc_feature (484)..(484): "n" may be a, t, c, g, other or unknown
atggacaatgaattactattttttattaaattgtggaatgtaatgacaaaatattttttgaataatctaacaaggccttttggaaggacatcattcagtaggtgaatatgcacatatctttacagtatcaatatagactatcttgagaaaataggtgtgaaacagaacttctctatcattctacatatagaaaatcagaaataatctccaagaatgctattagtgttaataattacatcaaagttgcagggtacaaggccaatattcaaatgattggtttgttaatacaaaccaacagtgtatgatccaacnagaagatgacaaatgtttcccacttataataacatctaaaataactaaatacttangaataaacctaaccaaggaagtgaaatacttgttgaatgattagaaagaaagactctgaaagaaagccnagaaggttaaaataattnaaaaggcccccgttttcctggataggaantctaatccttctaat

SEQ ID NO: 9336 - DNA, 365 bp, Homo sapiens
  misc_feature (30)..(30): "n" may be a, t, c, g, other or unknown
  misc_feature (35)..(35): "n" may be a, t, c, g, other or unknown
  misc_feature (52)..(52): "n" may be a, t, c, g, other or unknown
  misc_feature (80)..(80): "n" may be a, t, c, g, other or unknown
  misc_feature (96)..(96): "n" may be a, t, c, g, other or unknown
  misc_feature (135)..(135): "n" may be a, t, c, g, other or unknown
  misc_feature (208)..(208): "n" may be a, t, c, g, other or unknown
  misc_feature (232)..(232): "n" may be a, t, c, g, other or unknown
  misc_feature (243)..(243): "n" may be a, t, c, g, other or unknown
  misc_feature (311)..(311): "n" may be a, t, c, g, other or unknown
  misc_feature (320)..(320): "n" may be a, t, c, g, other or unknown
  misc_feature (339)..(339): "n" may be a, t, c, g, other or unknown
  misc_feature (345)..(345): "n" may be a, t, c, g, other or unknown
  misc_feature (354)..(354): "n" may be a, t, c, g, other or unknown
  misc_feature (356)..(356): "n" may be a, t, c, g, other or unknown
  misc_feature (360)..(360): "n" may be a, t, c, g, other or unknown
ggggcagtccaaaaattgtattctctacanatggnctgtttgcaaacagtangtctgggtttgactattggaatacaccntgcaagaaactactcnaaaaggaaattccacttcatgaaccaggaaagttgcccnatagcctgtcccatctgagggtcctttacatgattagatactcaatatctcagttccacaacgttatttacanacatgttttcaaatatttcgtgtnaatggcagaanggagctgggagcagtccccctgcctccattacttttttagctttcacatatgttcttgacttgtacanaaaatcccnaattttaaatgattccccnactcanccagttctntnaatnaagcc

SEQ ID NO: 9337 - DNA, 543 bp, Homo sapiens
  misc_feature (12)..(12): "n" may be a, t, c, g, other or unknown
  misc_feature (34)..(34): "n" may be a, t, c, g, other or unknown
  misc_feature (94)..(94): "n" may be a, t, c, g, other or unknown
  misc_feature (108)..(108): "n" may be a, t, c, g, other or unknown
  misc_feature (180)..(180): "n" may be a, t, c, g, other or unknown
  misc_feature (197)..(197): "n" may be a, t, c, g, other or unknown
  misc_feature (209)..(209): "n" may be a, t, c, g, other or unknown
  misc_feature (215)..(215): "n" may be a, t, c, g, other or unknown
  misc_feature (239)..(239): "n" may be a, t, c, g, other or unknown
  misc_feature (248)..(248): "n" may be a, t, c, g, other or unknown
  misc_feature (262)..(262): "n" may be a, t, c, g, other or unknown
  misc_feature (289)..(289): "n" may be a, t, c, g, other or unknown
  misc_feature (327)..(327): "n" may be a, t, c, g, other or unknown
  misc_feature (331)..(331): "n" may be a, t, c, g, other or unknown
  misc_feature (346)..(346): "n" may be a, t, c, g, other or unknown
  misc_feature (414)..(414): "n" may be a, t, c, g, other or unknown
  misc_feature (452)..(452): "n" may be a, t, c, g, other or unknown
  misc_feature (485)..(485): "n" may be a, t, c, g, other or unknown
  misc_feature (489)..(489): "n" may be a, t, c, g, other or unknown
  misc_feature (505)..(505): "n" may be a, t, c, g, other or unknown
  misc_feature (507)..(507): "n" may be a, t, c, g, other or unknown
  misc_feature (542)..(543): "n" may be a, t, c, g, other or unknown
cttggtaaaaanagggtctccctctgttgcccangatggtttggaactcctgggctcaagcaatcctcccactttggcttcccaaagtgctganattacaggcatganccactatgcccaacctgagcaggatgacttaaacctgatcaattctactccaaaacagcaactatcattaantcaggggtgtcaaggangactctgtgaangcaaanactaaactgggatgtgtgcgaaantgggataanaagcccatccctancaaactgcaggagtgactctggcatanaattcatggccagccctaactaatgtgatgggtggcanggangaagcatctgctcantgttcaaacaaaatccttacaagttctggggctggaactctgtgtcctcctgaatccccatgtttccnttacctttacaaaaaactggttttgttcctgtttgccnaagggccaaaaccgttttcctaaattaccttcntaanaataaattaccccctngnaaaaaaaaaacccccaaaaatttttgggttccccnn

SEQ ID NO: 9338 - DNA, 527 bp, Homo sapiens
  misc_feature (133)..(133): "n" may be a, t, c, g, other or unknown
  misc_feature (293)..(293): "n" may be a, t, c, g, other or unknown
  misc_feature (465)..(465): "n" may be a, t, c, g, other or unknown
  misc_feature (472)..(472): "n" may be a, t, c, g, other or unknown
  misc_feature (509)..(509): "n" may be a, t, c, g, other or unknown
attttgctttatcattttattggtaaaatttatttcaatgcaaaacatatacagagacaagtacacggtggtaaatgtatagctcaataaatctaatgaaataaacacaccaatgttacagatcaagaaagangacattactagcttccagatgccctatcatgtggcttcccagtttagttccctcaaggataatgaatattctgactattaatgtcatagatcagttttatcttcttttgaagtttatgtaagtggaatcttttctgtctggtcaatatcatgtttccganattcatctatattgttgcctttagttggagactgttcattctcattactggatggccatcctgtgaatatacttgggcagttaatatttgatcaattaatttcttccctcaagggtagctcaaaagttgaacatgggctccctacaccgccctgatttcaatctgaaatccncaggaanaatcccccttactctaatgacttgctttgaatttccnaaaccccaaaatttggat

SEQ ID NO: 9339 - DNA, 421 bp, Homo sapiens
  misc_feature (388)..(388): "n" may be a, t, c, g, other or unknown
  misc_feature (398)..(398): "n" may be a, t, c, g, other or unknown
  misc_feature (403)..(403): "n" may be a, t, c, g, other or unknown
gtgaaaatgttcagccattttattgttctgtaaaggaacatcatctgggtcaaaaatgaattctataaatcaaagaatattctacaccttgggaaaagaaaatcagcagtaacattctcactgaatattgtaaattacatttttcttcataaaaggtacatactattctgcacttttccaccaaaagcagtggtgtgttatgcttgttatataaaaaaaagttatatcctgtggcaggaaaaaccctttctctttcacttttactaaacaactggagaaaatgttcaagtctgtataaagttgcctataagctggaaagtgaacttgttcaatctccatttacattttagtgcattttttgacaattgtcacatttttaacaaaagtnagaaaatgcntatanccctaaagaatttttcct

SEQ ID NO: 9340 - DNA, 579 bp, Homo sapiens
  misc_feature (46)..(46): "n" may be a, t, c, g, other or unknown
  misc_feature (61)..(61): "n" may be a, t, c, g, other or unknown
  misc_feature (69)..(69): "n" may be a, t, c, g, other or unknown
  misc_feature (82)..(82): "n" may be a, t, c, g, other or unknown
  misc_feature (85)..(85): "n" may be a, t, c, g, other or unknown
  misc_feature (107)..(107): "n" may be a, t, c, g, other or unknown
  misc_feature (140)..(140): "n" may be a, t, c, g, other or unknown
  misc_feature (152)..(152): "n" may be a, t, c, g, other or unknown
  misc_feature (196)..(196): "n" may be a, t, c, g, other or unknown
  misc_feature (220)..(220): "n" may be a, t, c, g, other or unknown
  misc_feature (377)..(377): "n" may be a, t, c, g, other or unknown
  misc_feature (406)..(406): "n" may be a, t, c, g, other or unknown
  misc_feature (450)..(450): "n" may be a, t, c, g, other or unknown
  misc_feature (472)..(472): "n" may be a, t, c, g, other or unknown
  misc_feature (514)..(514): "n" may be a, t, c, g, other or unknown
  misc_feature (523)..(523): "n" may be a, t, c, g, other or unknown
  misc_feature (537)..(537): "n" may be a, t, c, g, other or unknown
  misc_feature (544)..(544): "n" may be a, t, c, g, other or unknown
  misc_feature (547)..(547): "n" may be a, t, c, g, other or unknown
  misc_feature (576)..(576): "n" may be a, t, c, g, other or unknown
  misc_feature (579)..(579): "n" may be a, t, c, g, other or unknown
agtaaacaacctaatcttttatttgcccaaggccggctgttgcaancactgaggccccaanacttccanaaaggaaagggangangggcaaacactgtgcctaccangtgctgcctgccccgtcctgcttcctgcaggangtgggaaggganaaaaaacggacattcgcgccatcaagtatctccccagttttcanccactatattcagttgtggaggangaaactgaggcacacgcatccccccaggcttctacttgctagtccaaggtttaacttactccctcccctcatctctacccccagcaaaatgagctgtaagcagcctggggagggtctcaggagcccatctggtggcctgtggagcggggcaggccanccaaggtcaaaggctaagggtggggggancaagaagggtgtggctggaagaacactgctggcggtggggggantcgcactcaataagggacccanctggggttccatactgatacattggggacaggcaaaacctcnctttcaaanaggaaattaaggtnaaaaccnccntctttgttagaagggctcctccactatcngtn

SEQ ID NO: 9341 - DNA, 407 bp, Homo sapiens
  misc_feature (312)..(312): "n" may be a, t, c, g, other or unknown
  misc_feature (349)..(349): "n" may be a, t, c, g, other or unknown
  misc_feature (386)..(386): "n" may be a, t, c, g, other or unknown
gtaagccaaatcaagtcattttttaatggcacataagctagcaagtatttacattattaaatggttggagaaaacagtatttcatgacacatgaaaattacacaaaactcaagtttcagtttgcagaaataaagctctattgaaacacagccacctgcattccttcatctagtaattacctggctgctttcgtgctacaacagctgagttcagcagcagcaacagagactataaaagcccacaaagcttgaactatttactgcatgggcctttccagaaaaaaatttgatgacacctggtatagggacaganaatagcttgacggttgccacggtaaaaggtggggaangagctgaccacagggaatttactggagggtgatatanctgttaattgtggtggtggta

SEQ ID NO: 9342 - DNA, 492 bp, Homo sapiens
  misc_feature (1)..(492): "n" may be a, t, c, g, other or unknown
nnnnnnnnnnnnnnnnnnnnnnnnnnnnnnnnnnnnnnnnnnnnnnnnnnnnnnnnnnnnnnnnnnnnnnnnnnnnnnnnnnnnnnnnnnnnnnnnnnnnnnnnnnnnnnnnnnnnnnnnnnnnnnnnnnnnnnnnnnnnnnnnnnnnnnnnnnnnnnnnnnnnnnnnnnnnnnnnnnnnnnnnnnnnnnnnnnnnnnnnnnnnnnnnnnnnnnnnnnnnnnnnnnnnnnnnnnnnnnnnnnnnnnnnnnnnnnnnnnnnnnnnnnnnnnnnnnnnnnnnnnnnnnnnnnnnnnnnnnnnnnnnnnnnnnnnnnnnnnnnnnnnnnnnnnnnnnnnnnnnnnnnnnnnnnnnnnnnnnnnnnnnnnnnnnnnnnnnnnnnnnnnnnnnnnnnnnnnnnnnnnnnnnnnnnnnnnnnnnnnnnnnnnnnnnnnnnnnnnnnnnnnnnnnnnnnnnnnnnnnnnnnnnnnnnnnnnnnnnnnnnnnnnnnnnnn

SEQ ID NO: 9343 - DNA, 469 bp, Homo sapiens
  misc_feature (122)..(122): "n" may be a, t, c, g, other or unknown
  misc_feature (177)..(177): "n" may be a, t, c, g, other or unknown
  misc_feature (280)..(280): "n" may be a, t, c, g, other or unknown
  misc_feature (381)..(381): "n" may be a, t, c, g, other or unknown
  misc_feature (398)..(398): "n" may be a, t, c, g, other or unknown
  misc_feature (443)..(443): "n" may be a, t, c, g, other or unknown
ggttgtttcctctaactttgtattttcaaatactctatcttcaagctcactaattcctcttctgcttgatcaattctcctattaaaagactctgatgaattcttcagtatgccaaattccanaatttctgctttattcattttagttatttcaatctctactaaatttgtctgatanaattctgaattccttctttgtgttatcttgatttttctttgagtctcctcaaaacagctattttgaattctctgtctgaaaggtcacatatccgtttctccangattggtccctagtgccttatttagttcatttggtgaggtcatgctttcctggatggtcatgacacttgtaaatatttgtctgtgtttgggcattgaaaanttaggtattcattgtantcttctcagtctgggcttgtttgtacccatcctccttgggaaggnttccatatattcaaaaggacttggga

SEQ ID NO: 9344 - DNA, 449 bp, Homo sapiens
  misc_feature (362)..(362): "n" may be a, t, c, g, other or unknown
  misc_feature (412)..(412): "n" may be a, t, c, g, other or unknown
  misc_feature (443)..(443): "n" may be a, t, c, g, other or unknown
atataaagaaaatctatgtaagttgaggttcagaaatgcatatattttttacttacaaatattcatctgaccaaaattcaacataacctttatggaacacttaacaattgttttgtttttaaaataacatttcattcaaactgtatataattcagtaaagttttttatacagcaagcaatgcttaaaccctggaaaatctgtagaaaagagattttcacacaaaataagaaaagaaaaatctgaggtatccctcacacacacacatccattcattctggcccatgtacgtgcacatacacacgcatgcctgtgtgttcacacagacatattcattctcactcacaaagtggctgcagcatangcaaaaattgttaggtccaaaggaaaatgattgattgttctaataaagantccgagtagctcagaaaaaaaaaccaaaacnaaaccc

SEQ ID NO: 9345 - DNA, 367 bp, Homo sapiens
  misc_feature (23)..(23): "n" may be a, t, c, g, other or unknown
  misc_feature (30)..(30): "n" may be a, t, c, g, other or unknown
  misc_feature (164)..(164): "n" may be a, t, c, g, other or unknown
  misc_feature (332)..(332): "n" may be a, t, c, g, other or unknown
  misc_feature (334)..(334): "n" may be a, t, c, g, other or unknown
  misc_feature (352)..(352): "n" may be a, t, c, g, other or unknown
gacagtctcactctgttgcccanacaggantgcagtggtgcaatcttggcccactgcaacctccacctcctgggttcaggtgattctcctccatcagcctcccaagtagctgggattacaggtgcccgccatcactcctggctaatttttctattttagtaaanatgggtttttgtcatgttggccacgctggtttcaaacccttgacctcaggtgattctctggcctcagcctcccaaagtccagggattacaggtgtgagccaccacacctggcttcttttaactctgcaaagggccaggtctggcatacagtttgaaatttgctgccanantcccattttgcaatcccnaacttctggtggaaa

SEQ ID NO: 9346 - DNA, 422 bp, Homo sapiens
  misc_feature (52)..(52): "n" may be a, t, c, g, other or unknown
  misc_feature (59)..(59): "n" may be a, t, c, g, other or unknown
  misc_feature (62)..(62): "n" may be a, t, c, g, other or unknown
  misc_feature (64)..(64): "n" may be a, t, c, g, other or unknown
  misc_feature (68)..(68): "n" may be a, t, c, g, other or unknown
  misc_feature (112)..(112): "n" may be a, t, c, g, other or unknown
  misc_feature (162)..(162): "n" may be a, t, c, g, other or unknown
  misc_feature (324)..(324): "n" may be a, t, c, g, other or unknown
  misc_feature (385)..(386): "n" may be a, t, c, g, other or unknown
  misc_feature (396)..(396): "n" may be a, t, c, g, other or unknown
  misc_feature (409)..(409): "n" may be a, t, c, g, other or unknown
  misc_feature (419)..(420): "n" may be a, t, c, g, other or unknown
atttctatggtagaagcatttatttcagatatagaaaaataacactatttcnaaagtcngantnagtnaacagaagtatattttttccttgcatacccatcctcaaatgtcnacacacagtttccagccattcttacaaggaacaaatgcaaaattaaagtnataactgtcaacagaggagctgtattaaagctacgtatcaaccttgaaaatcagaaaacacaaagtgatctagtgcagtgattctcaactttagtgtgtatcagaatcacttggattgtggaaaaagcaccttcagagagctgaaggaaaatcatcaggtcnagcaagcccttggtctcagaataaatatccaagagactaaagatacgtgctttgttcctcnnggaagaaggnaggacaaaatatnctaccatatnnaa

SEQ ID NO: 9347 - DNA, 439 bp, Homo sapiens
  misc_feature (250)..(250): "n" may be a, t, c, g, other or unknown
  misc_feature (270)..(270): "n" may be a, t, c, g, other or unknown
  misc_feature (350)..(350): "n" may be a, t, c, g, other or unknown
  misc_feature (420)..(420): "n" may be a, t, c, g, other or unknown
  misc_feature (432)..(432): "n" may be a, t, c, g, other or unknown
atccttctatagtcctgtcaagtttaatggaagtgggtttaacctgattacaacactaacaccagtatcactgatctgatatttacaaaaatttgtatttttcaataaattaaagtcaatgcaacacccatgcaagctagagtgctagctgtttggtgaacaaggacgtgacatcagaacaagaagtctataagtcccaaactttacaagtgtgatcattttcaaactgcatccattcctcgcattgaanatgtgaaacccaaacccatncctctttgtgtgtgggtttgtgatcttgccatttcatactgagcatctaaatttcgaaatacttcttcctgctgcttcanaatcttgttactttcttcatcaactgaagctacatccagcttcatcttcactcttaatacccatcaattncctaaatttganattgggg

SEQ ID NO: 9348 - DNA, 283 bp, Homo sapiens
  misc_feature (147)..(147): "n" may be a, t, c, g, other or unknown
  misc_feature (195)..(195): "n" may be a, t, c, g, other or unknown
  misc_feature (268)..(268): "n" may be a, t, c, g, other or unknown
  misc_feature (282)..(282): "n" may be a, t, c, g, other or unknown
ccatttatatcacactttaagtgcacttggggtagtggatctaacatgtctatttaacattgctggagttcccttaataaaccctgttaaggtataaagtaaaacatgcaaagcatttttaattttacaaatccctataaaaacganctaaaagagagccaaaatgactggaggtaaaaatgtaacttaaacgantgatatgacattaactataatttctgaaatctggaaaaatccctcaaaattggggtaaaaacttccagtgcanaggtacattttgana

SEQ ID NO: 9349 - DNA, 366 bp, Homo sapiens
  misc_feature (22)..(22): "n" may be a, t, c, g, other or unknown
  misc_feature (33)..(33): "n" may be a, t, c, g, other or unknown
  misc_feature (41)..(41): "n" may be a, t, c, g, other or unknown
  misc_feature (66)..(66): "n" may be a, t, c, g, other or unknown
  misc_feature (95)..(95): "n" may be a, t, c, g, other or unknown
  misc_feature (130)..(130): "n" may be a, t, c, g, other or unknown
  misc_feature (138)..(138): "n" may be a, t, c, g, other or unknown
  misc_feature (155)..(155): "n" may be a, t, c, g, other or unknown
  misc_feature (160)..(160): "n" may be a, t, c, g, other or unknown
  misc_feature (175)..(175): "n" may be a, t, c, g, other or unknown
  misc_feature (200)..(200): "n" may be a, t, c, g, other or unknown
  misc_feature (220)..(220): "n" may be a, t, c, g, other or unknown
  misc_feature (252)..(252): "n" may be a, t, c, g, other or unknown
  misc_feature (282)..(282): "n" may be a, t, c, g, other or unknown
  misc_feature (298)..(298): "n" may be a, t, c, g, other or unknown
  misc_feature (318)..(318): "n" may be a, t, c, g, other or unknown
  misc_feature (322)..(322): "n" may be a, t, c, g, other or unknown
  misc_feature (337)..(337): "n" may be a, t, c, g, other or unknown
  misc_feature (343)..(343): "n" may be a, t, c, g, other or unknown
  misc_feature (362)..(362): "n" may be a, t, c, g, other or unknown
aagctgaaaagacgctcatganaccaagggganggcaggtnccaaaggcaagggctgggccctgancttctggcttcctggtgcctggtacatantaggtgttgactggattgaggacaaaggaaaatanaattttcnaagggattagggctaanactcnaaaaaaaactgcccnaggtggattcttgactgtgccaaanctgaccgaggtctgtccaanacctaaggatgctacaaggtgttcatattgancatggggtgcccagggtggtctgtcaatcnaaaaaaaaaggctgtnactgggaagaaaattataantttnggaaaataccaaatnggaacnggggaaagggactgccatntccc

SEQ ID NO: 9350 - DNA, 535 bp, Homo sapiens
  misc_feature (5)..(7): "n" may be a, t, c, g, other or unknown
  misc_feature (34)..(34): "n" may be a, t, c, g, other or unknown
  misc_feature (41)..(41): "n" may be a, t, c, g, other or unknown
  misc_feature (177)..(177): "n" may be a, t, c, g, other or unknown
  misc_feature (254)..(254): "n" may be a, t, c, g, other or unknown
  misc_feature (389)..(389): "n" may be a, t, c, g, other or unknown
  misc_feature (401)..(401): "n" may be a, t, c, g, other or unknown
  misc_feature (443)..(443): "n" may be a, t, c, g, other or unknown
  misc_feature (449)..(449): "n" may be a, t, c, g, other or unknown
  misc_feature (474)..(474): "n" may be a, t, c, g, other or unknown
  misc_feature (504)..(504): "n" may be a, t, c, g, other or unknown
  misc_feature (513)..(513): "n" may be a, t, c, g, other or unknown
  misc_feature (515)..(515): "n" may be a, t, c, g, other or unknown
  misc_feature (518)..(518): "n" may be a, t, c, g, other or unknown
atttnnngagatggagtctcactctgtcatccangctggantgcagtgatgcgatctcggctcactgcaacctctgcctcccgggttcaagcaattctcccgcctcaggctcccaagtagctgggattacaggcatgcgccaccacgtccgggtaatttttgaattttttagtatanacggggtttcaccatgttggccaggctggtctcaaactcctgacctcaagcgatctgcctgcctcggccccacagantgctgggactacaggcatgagccactgagcccggcttgcagtgtgcttttagacaacagaacaaacagatgatatgggaaaagggctcggattcacctggcttcaaatcctggtgctgacacccataactctgtngccttggtcacncctcttatcctctctgaaactcagtctcttcttccaaacatngaaganaaacctccctgaagggcttgctctnaagcttaaataataaataaaagtcttggcnctggggctnanttntacttggtgccccaaca

SEQ ID NO: 9351 - DNA, 356 bp, Homo sapiens
  misc_feature (276)..(276): "n" may be a, t, c, g, other or unknown
  misc_feature (301)..(301): "n" may be a, t, c, g, other or unknown
  misc_feature (312)..(312): "n" may be a, t, c, g, other or unknown
  misc_feature (341)..(341): "n" may be a, t, c, g, other or unknown
  misc_feature (344)..(344): "n" may be a, t, c, g, other or unknown
  misc_feature (354)..(355): "n" may be a, t, c, g, other or unknown
gacctggtgccaaaatgaaagctttaatgagtgttactcctagacagtcacgtctcagcttctgccagcctccactgtcccagctctcttagctggccgacaggggagctagttgctgaggggtagggatctggagtctaaagagcagagccaggcaaaaggaggtacaggaagcccccgatgggggctgggctcccggagtgtggtgctggggggtcatgggcttcaggccggcccctcttcaggcattcctagcaaagccaccaggggctccangggtgtgggggtcccatgggcacanggtgggtgctncatgcttgcgcaagtcgctggcactcaanaangccttggganna

SEQ ID NO: 9352 - DNA, 563 bp, Homo sapiens
  misc_feature (6)..(6): "n" may be a, t, c, g, other or unknown
  misc_feature (29)..(29): "n" may be a, t, c, g, other or unknown
  misc_feature (53)..(53): "n" may be a, t, c, g, other or unknown
  misc_feature (76)..(76): "n" may be a, t, c, g, other or unknown
  misc_feature (88)..(88): "n" may be a, t, c, g, other or unknown
  misc_feature (110)..(110): "n" may be a, t, c, g, other or unknown
  misc_feature (112)..(112): "n" may be a, t, c, g, other or unknown
  misc_feature (127)..(127): "n" may be a, t, c, g, other or unknown
  misc_feature (224)..(224): "n" may be a, t, c, g, other or unknown
  misc_feature (252)..(252): "n" may be a, t, c, g, other or unknown
  misc_feature (269)..(269): "n" may be a, t, c, g, other or unknown
  misc_feature (305)..(305): "n" may be a, t, c, g, other or unknown
  misc_feature (359)..(359): "n" may be a, t, c, g, other or unknown
  misc_feature (377)..(377): "n" may be a, t, c, g, other or unknown
  misc_feature (388)..(388): "n" may be a, t, c, g, other or unknown
  misc_feature (430)..(430): "n" may be a, t, c, g, other or unknown
  misc_feature (439)..(439): "n" may be a, t, c, g, other or unknown
  misc_feature (444)..(444): "n" may be a, t, c, g, other or unknown
  misc_feature (449)..(449): "n" may be a, t, c, g, other or unknown
  misc_feature (510)..(510): "n" may be a, t, c, g, other or unknown
  misc_feature (525)..(525): "n" may be a, t, c, g, other or unknown
  misc_feature (536)..(536): "n" may be a, t, c, g, other or unknown
  misc_feature (539)..(539): "n" may be a, t, c, g, other or unknown
  misc_feature (544)..(544): "n" may be a, t, c, g, other or unknown
  misc_feature (557)..(557): "n" may be a, t, c, g, other or unknown
  misc_feature (560)..(560): "n" may be a, t, c, g, other or unknown
gggggntgatacagaatttattgaattanatttttctatttacaactgaaatnacatctacatactattttgctantctacatgggtncattatttccaacaagcttaananttaccatgaatgggntcattcatacaaaaacacactcacactaattcttttaaaacagtagtgcatacattatactcctcctataaagccaactttgattaaaaaccactantttcaaagctcagtctctgattttgaanatgaaccaagatatacnccatatgatcctacaatctattttagtcattttgtncagctgctatcttattggactacagtaaatattttttaaaaggacaccaatgangggcaccatctggtgttnaccttaaccanaaagctggtttcctcctcctccccccaaaaactttgggcaanaattctccnctgtnaaaantgaaaggactggtgactttccgcatcatcctgtttcccttggaagttacaaaaacagggcntgttccccttaatcnaccccctactnaancccantggtcctaaattnaanttc

SEQ ID NO: 9353 - DNA, 372 bp, Homo sapiens
  misc_feature (194)..(194): "n" may be a, t, c, g, other or unknown
  misc_feature (241)..(241): "n" may be a, t, c, g, other or unknown
  misc_feature (353)..(353): "n" may be a, t, c, g, other or unknown
  misc_feature (355)..(355): "n" may be a, t, c, g, other or unknown
  misc_feature (360)..(360): "n" may be a, t, c, g, other or unknown
aagggaaaggatcttgctatgttgcccaggctggtctcaaactcctcagctcaagcaatctgcccaccccagcctctgaaagtgctgggattacaggcatgagccaccatgtccagcacactttaatattcactatgggccctcaaaaggaaatgtttgtggggccaccaaaagcaaatgtctcttgaacctantcacctggggggacaagtgtgggaaagtgcacctgtgttcccatganacccactcaagaggagcagaaatcctgttttgctatttccttaattgctactaaggctgggattttttcatgtttattggcccctctacatttttttctttaaaaaaattcncnaaacntgtttatatttg

SEQ ID NO: 9354 - DNA, 442 bp, Homo sapiens
  misc_feature (6)..(6): "n" may be a, t, c, g, other or unknown
  misc_feature (97)..(97): "n" may be a, t, c, g, other or unknown
  misc_feature (207)..(207): "n" may be a, t, c, g, other or unknown
  misc_feature (411)..(411): "n" may be a, t, c, g, other or unknown
  misc_feature (413)..(413): "n" may be a, t, c, g, other or unknown
  misc_feature (424)..(424): "n" may be a, t, c, g, other or unknown
gtaaanacagggttttgccatgttgcccaccctggtcttgaattcctggtttcaagcgatccacccacatgggcctcccaaagtgctggtattccanaagtgagccactgcacctgacctgggcctattcttgacctttctttttgtgtctcagtttctgtatctgtaaaatggaaataacaatacctacctcgtaaggttgtgaanaaaattaaaatgagaatacctataaagcacttaaataaaataaggcctagtacatagtatatactctataaatggcatctgctatgattataactattgttattaatatctaatgttctctattattctccaatacaaatcatttgatgttattttggcccgtttcctgcatgatctcttcttgcttattccccccctaccagnanttcattcttcnattttcacctcaactaca

SEQ ID NO: 9355 - DNA, 613 bp, Homo sapiens
  misc_feature (158)..(158): "n" may be a, t, c, g, other or unknown
  misc_feature (220)..(220): "n" may be a, t, c, g, other or unknown
  misc_feature (393)..(393): "n" may be a, t, c, g, other or unknown
  misc_feature (432)..(432): "n" may be a, t, c, g, other or unknown
  misc_feature (499)..(499): "n" may be a, t, c, g, other or unknown
  misc_feature (521)..(521): "n" may be a, t, c, g, other or unknown
  misc_feature (605)..(605): "n" may be a, t, c, g, other or unknown
  misc_feature (608)..(608): "n" may be a, t, c, g, other or unknown
acaatgcctagcagaatgtcttatatgtcaataaatatttgccttgttagaagtaatttgtgctttgttataagtaattaaaaacaagcttttatgcactctttttaaattcacttaagctacaccgtagtatcctcaaaaaaggctttgaaattaanattactgtccacatattggattagttattgatgaataagcaaatcagcccctttcaaaaganatcagttagtcctattctacgtggtttctagtgaaatagtccagcaaaatcatataatactgtgtcaaactttttctgctcttctttttttaaaaaccaaacaacagaccttcattctagggaacagcagttctacatcttttaccccctcggtgaggtaaaagtgtcaatanagaagttactactatattcccctcccaaatttttagaangagcagtaaaaataaggttttgatgaaattcccataaaatatttaactcattattgtctcatgtcanaaacaaaaataaggccatttcntgttataacatgaatataataacctccccttgttccaaataaccaaatggtaagttccctctttcccccttcttaagaagtttnccnttttt

SEQ ID NO: 9356 - DNA, 301 bp, Homo sapiens
  misc_feature (9)..(9): "n" may be a, t, c, g, other or unknown
  misc_feature (75)..(75): "n" may be a, t, c, g, other or unknown
  misc_feature (122)..(122): "n" may be a, t, c, g, other or unknown
  misc_feature (235)..(235): "n" may be a, t, c, g, other or unknown
  misc_feature (291)..(291): "n" may be a, t, c, g, other or unknown
  misc_feature (300)..(300): "n" may be a, t, c, g, other or unknown
gggaatganttgtttttatttttacagtgatcacctatcaaactgttctgctgtgttatagttcccaaactgganttcaacagtcttagaaattcagtggtctaagaactgcagttcttgantccaacctcctgggaaaagtgaagtataaaactctggctccagctgcttgttccggtacttgttgacaatgtcggtgattttctgtttccggcggacatgggggggactgtangaatcactttccagtctctttcttctacaaatgttaattacagtctgcctcaccanaaagccaana

SEQ ID NO: 9357 - DNA, 578 bp, Homo sapiens
  misc_feature (46)..(46): "n" may be a, t, c, g, other or unknown
  misc_feature (67)..(67): "n" may be a, t, c, g, other or unknown
  misc_feature (86)..(86): "n" may be a, t, c, g, other or unknown
  misc_feature (88)..(88): "n" may be a, t, c, g, other or unknown
  misc_feature (176)..(176): "n" may be a, t, c, g, other or unknown
  misc_feature (453)..(453): "n" may be a, t, c, g, other or unknown
  misc_feature (456)..(456): "n" may be a, t, c, g, other or unknown
  misc_feature (491)..(491): "n" may be a, t, c, g, other or unknown
  misc_feature (521)..(521): "n" may be a, t, c, g, other or unknown
  misc_feature (526)..(526): "n" may be a, t, c, g, other or unknown
  misc_feature (547)..(547): "n" may be a, t, c, g, other or unknown
  misc_feature (571)..(571): "n" may be a, t, c, g, other or unknown
  misc_feature (575)..(575): "n" may be a, t, c, g, other or unknown
  misc_feature (578)..(578): "n" may be a, t, c, g, other or unknown
gagatggggtctggcttcgtcacccagactgggaatgcaatgggancaatcatagctcactgcagantcaaactcctggtcttaananaccttccttctcatcctcctgagtatctgggactatgggtgcatgccaccatatctaagttttaaaaattaattttgtactaaagganggtcttgctatgttgctgaggccgatgttaatattttataaaagaaaaacatgacacaacagttcaaactggtgcttttttgcacctatcctgcactataaaaataaaaacttaaacatagcagttacatggcattccatttccttttgacatcacaatacattaaataggatcttttcaaaaagtaagacagtctattttcctatttcgtaaaaataccacaggctggaattctaaacagattttttttttttccttaagggatctttattccccnccncccctaaaaaagacctgaaaacaggtcctccttanccatcctactttaaaatttcttcccaattnttttnggggaaaccggaaaaaatccnaaaccttggtccatttttttaaantganggn

SEQ ID NO: 9358 - DNA, 504 bp, Homo sapiens
  misc_feature (14)..(14): "n" may be a, t, c, g, other or unknown
  misc_feature (16)..(16): "n" may be a, t, c, g, other or unknown
  misc_feature (21)..(21): "n" may be a, t, c, g, other or unknown
  misc_feature (38)..(38): "n" may be a, t, c, g, other or unknown
  misc_feature (65)..(65): "n" may be a, t, c, g, other or unknown
  misc_feature (121)..(121): "n" may be a, t, c, g, other or unknown
  misc_feature (157)..(157): "n" may be a, t, c, g, other or unknown
  misc_feature (205)..(205): "n" may be a, t, c, g, other or unknown
  misc_feature (268)..(268): "n" may be a, t, c, g, other or unknown
  misc_feature (287)..(287): "n" may be a, t, c, g, other or unknown
  misc_feature (337)..(337): "n" may be a, t, c, g, other or unknown
  misc_feature (403)..(403): "n" may be a, t, c, g, other or unknown
  misc_feature (409)..(409): "n" may be a, t, c, g, other or unknown
  misc_feature (426)..(426): "n" may be a, t, c, g, other or unknown
  misc_feature (456)..(456): "n" may be a, t, c, g, other or unknown
  misc_feature (477)..(477): "n" may be a, t, c, g, other or unknown
  misc_feature (479)..(479): "n" may be a, t, c, g, other or unknown
  misc_feature (498)..(498): "n" may be a, t, c, g, other or unknown
  misc_feature (503)..(503): "n" may be a, t, c, g, other or unknown
gcttttgttttgananaggantcttgttatgtccccangctggaatgcaatggtgcgatctcggntcactgcaagctccgcctcccgggttcatgccattctcctgcctcagcctcccgantaactgggattacaggcgcccgccaccacgcccggntaactttttgtatttttagtaaaaacggggtttcaccgtgttagccangatggtctccatctcctgacctcgtgatccgaattaggcactaaattttaagcataacatgancactctccagggtgagaanccatcaaaatcacgtttgcaaggttgtctgcgaacctccacgggaaaaancaaccaggccaagtacctgacattacatgggtgacacctggctccctgcagctgctgccaagcaangctgtnaaaaggtcctgcccccnctataaagctgttggttcctgcctgccacnccactcttgggttgtgggttntnaaattgggaaaaaaccccnaaatna

SEQ ID NO: 9359 - DNA, 312 bp, Homo sapiens
  misc_feature (5)..(5): "n" may be a, t, c, g, other or unknown
  misc_feature (34)..(34): "n" may be a, t, c, g, other or unknown
  misc_feature (125)..(125): "n" may be a, t, c, g, other or unknown
  misc_feature (152)..(152): "n" may be a, t, c, g, other or unknown
  misc_feature (163)..(163): "n" may be a, t, c, g, other or unknown
  misc_feature (230)..(230): "n" may be a, t, c, g, other or unknown
  misc_feature (292)..(293): "n" may be a, t, c, g, other or unknown
agtanagacggggtgtcactgtgttggccagganggtctcgatctcctgaccttgtgatctgcccacctcggcctcccaaagtgctgggattacaggcgtgaaccaccgcacccagccgaatgtncttaacactactgaaatgtgcacttanaaatgattcanatggtaaattttgttatacgtattttaccataagtttaaaaaaaggaaaaaaaagggagcagggaangccacatctttccacttgttgtccaactagtgcctatgtggggaggcactggtgtgggccannaaaatcctgagggccctca

SEQ ID NO: 9360 - DNA, 409 bp, Homo sapiens
  misc_feature (6)..(6): "n" may be a, t, c, g, other or unknown
  misc_feature (122)..(122): "n" may be a, t, c, g, other or unknown
  misc_feature (312)..(312): "n" may be a, t, c, g, other or unknown
  misc_feature (372)..(372): "n" may be a, t, c, g, other or unknown
  misc_feature (407)..(407): "n" may be a, t, c, g, other or unknown
aattcnatggtataacaaaatcagttccaggtttttttctgaacaaatgatcctttggtctttcccgtggcatgctcctaaaacaactaaaacaaccctctacgtctaatcagtcacctaanatatcgagtggcaagtctttcacatttgctgcttataattcctgaatggtccatattgagtattttcatttctgggtaagggaaaaagcattttggtccattaattcacccgctcgctcctggaggacgttaaccaattctgctatcacaaagacgtgagtggcatcaatgtcttgcatgatgaacttcncaggcttccatttttgttcactttgggatggttttcctgtcgaactgcgtggaaaagcangaagcacactgtccactgtaggggtcctggtccanca

SEQ ID NO: 9361 - DNA, 502 bp, Homo sapiens
  misc_feature (442)..(443): "n" may be a, t, c, g, other or unknown
  misc_feature (470)..(470): "n" may be a, t, c, g, other or unknown
  misc_feature (483)..(483): "n" may be a, t, c, g, other or unknown
  misc_feature (490)..(491): "n" may be a, t, c, g, other or unknown
  misc_feature (500)..(500): "n" may be a, t, c, g, other or unknown
gtaggccatcagaggtagaaggtggtaaaaacagagttgccactctcggtgtggccacgtgagcacgtcccacttaagtaacagggtgtccctcaggtcagcttgtgataaaacccaagtcaaacaaggctgaatcctgggtgttttatgtcctaaggatctgaaaagtgttcacggccagccctgaccctcaagacctcaaatggtcatctaagcagtaacgtaaattggtgtgtaaacttgctcctgggccattgctgtggaagtgggactggcgaaagtacagccttgccatgcaggaactaatgtctttctaggcatttaaaataagggggaatgtgttgattactccgacaggcaacccaactgcagtggctaaatgcccaaggctgacaaattctgcatcttatcactcccgtcaagtggcatgtgaatactgtcnncccaaaagaattgagaaacaacttgcnttccaaaactctncatctcnncaaaatctnga

SEQ ID NO: 9362 - DNA, 448 bp, Homo sapiens
  misc_feature (1)..(448): "n" may be a, t, c, g, other or unknown
nnnnnnnnnnnnnnnnnnnnnnnnnnnnnnnnnnnnnnnnnnnnnnnnnnnnnnnnnnnnnnnnnnnnnnnnnnnnnnnnnnnnnnnnnnnnnnnnnnnnnnnnnnnnnnnnnnnnnnnnnnnnnnnnnnnnnnnnnnnnnnnnnnnnnnnnnnnnnnnnnnnnnnnnnnnnnnnnnnnnnnnnnnnnnnnnnnnnnnnnnnnnnnnnnnnnnnnnnnnnnnnnnnnnnnnnnnnnnnnnnnnnnnnnnnnnnnnnnnnnnnnnnnnnnnnnnnnnnnnnnnnnnnnnnnnnnnnnnnnnnnnnnnnnnnnnnnnnnnnnnnnnnnnnnnnnnnnnnnnnnnnnnnnnnnnnnnnnnnnnnnnnnnnnnnnnnnnnnnnnnnnnnnnnnnnnnnnnnnnnnnnnnnnnnnnnnnnnnnnnnnnnnnnnnnnnnnnnnnnnnnnnnnnn

SEQ ID NO: 9363 - DNA, 583 bp, Homo sapiens
  misc_feature (3)..(3): "n" may be a, t, c, g, other or unknown
  misc_feature (6)..(6): "n" may be a, t, c, g, other or unknown
  misc_feature (35)..(35): "n" may be a, t, c, g, other or unknown
  misc_feature (47)..(47): "n" may be a, t, c, g, other or unknown
  misc_feature (86)..(86): "n" may be a, t, c, g, other or unknown
  misc_feature (169)..(169): "n" may be a, t, c, g, other or unknown
  misc_feature (171)..(171): "n" may be a, t, c, g, other or unknown
  misc_feature (229)..(229): "n" may be a, t, c, g, other or unknown
  misc_feature (367)..(367): "n" may be a, t, c, g, other or unknown
  misc_feature (441)..(441): "n" may be a, t, c, g, other or unknown
  misc_feature (451)..(451): "n" may be a, t, c, g, other or unknown
  misc_feature (516)..(516): "n" may be a, t, c, g, other or unknown
  misc_feature (521)..(521): "n" may be a, t, c, g, other or unknown
  misc_feature (526)..(526): "n" may be a, t, c, g, other or unknown
  misc_feature (552)..(552): "n" may be a, t, c, g, other or unknown
  misc_feature (561)..(561): "n" may be a, t, c, g, other or unknown
  misc_feature (573)..(573): "n" may be a, t, c, g, other or unknown
  misc_feature (580)..(580): "n" may be a, t, c, g, other or unknown
canaanagggtctcactctgtcacccaggctggantccagtggcacnatctcagctcacggtgactctgcctcctgggttcaagcnatcttccagcctcagtctcccaagtagctgggacacaggtgcatgccaccacacccagctaatttttgtatttttgtagggananggttttgccatgttgcccaagctggtctcgaattcctgagctcaaagcaatccactanccttggcctcccaaagtgctgggtgtgagccaccttgcccagccaacaaagggatttcccagttgcctcattgcggcagttgccgggagctcccccaaaaaaaacagggaactggggaactgtgggcatgggtaggantgaaaccagtctgaatcaccctttggaatctgcatcgtgttccctcactcaacaaatattcctgttttccggtnggcaaaaaanaggtcccccccggaaaaaaacaaaagaattttgcattttctgtcaatcaacaaaacctggggaantcccnccccnggaagcaggaaaagccttaaaaactnccggcgggnaattccgggttnaaacccnaag

SEQ ID NO: 9364 - DNA, 352 bp, Homo sapiens
  misc_feature (1)..(352): "n" may be a, t, c, g, other or unknown
nnnnnnnnnnnnnnnnnnnnnnnnnnnnnnnnnnnnnnnnnnnnnnnnnnnnnnnnnnnnnnnnnnnnnnnnnnnnnnnnnnnnnnnnnnnnnnnnnnnnnnnnnnnnnnnnnnnnnnnnnnnnnnnnnnnnnnnnnnnnnnnnnnnnnnnnnnnnnnnnnnnnnnnnnnnnnnnnnnnnnnnnnnnnnnnnnnnnnnnnnnnnnnnnnnnnnnnnnnnnnnnnnnnnnnnnnnnnnnnnnnnnnnnnnnnnnnnnnnnnnnnnnnnnnnnnnnnnnnnnnnnnnnnnnnnnnnnnnnnnnnnnnnnnnnnnnnnnnnnnnnnnnnnnnnnnnnnnnnnnnnnnnnnnnnnn

SEQ ID NO: 9365 - DNA, 410 bp, Homo sapiens
  misc_feature (53)..(53): "n" may be a, t, c, g, other or unknown
  misc_feature (94)..(94): "n" may be a, t, c, g, other or unknown
  misc_feature (239)..(239): "n" may be a, t, c, g, other or unknown
  misc_feature (336)..(336): "n" may be a, t, c, g, other or unknown
  misc_feature (340)..(340): "n" may be a, t, c, g, other or unknown
  misc_feature (346)..(346): "n" may be a, t, c, g, other or unknown
gacagaagtaaaaatatttattttatcttaaaaatctggtcccgcaaaaaggncaacacttttttcagttcacggtcttgacctttcaaagaanaaatctttcaactgagaggtgagttaataaaaggaatgtcagaggtgctttcagatttcttataaaccagtaaaccaagcaaccctggacttctagtttactgagctccttcttctagccattcacagttcctgaaggagaaaanaagttgtttgcagataaggcactttagaaaccaccaaagagaaaacccaagtctgccaggagctgcactgtgaacatgtgagccgagagggccaccnccanacagantgccaactcccacagctccatgacaacagcatccaccttcctgccccaacactgttccgtctgg

SEQ ID NO: 9366 - DNA, 274 bp, Homo sapiens
  misc_feature (183)..(183): "n" may be a, t, c, g, other or unknown
  misc_feature (251)..(251): "n" may be a, t, c, g, other or unknown
  misc_feature (263)..(263): "n" may be a, t, c, g, other or unknown
aacaatcacaagtcattgcttttattcagacgtaggggcaaaacaacagggattctacatctggctaattttttcaaagtccttttgtccaactatctattaaagaaaaaaagttgacttacttctgaggtgagggatccagtgcggcagctaaaacttcccctgccctctgccacctgtgtnatggccacatgcttggatgttgaaaacagcaaagattagcaccttccattccctgggggccagcaaanacttttcttccnaatcacatgca

SEQ ID NO: 9367 - DNA, 357 bp, Homo sapiens
  misc_feature (9)..(9): "n" may be a, t, c, g, other or unknown
  misc_feature (93)..(93): "n" may be a, t, c, g, other or unknown
  misc_feature (103)..(103): "n" may be a, t, c, g, other or unknown
  misc_feature (105)..(105): "n" may be a, t, c, g, other or unknown
  misc_feature (209)..(209): "n" may be a, t, c, g, other or unknown
  misc_feature (224)..(224): "n" may be a, t, c, g, other or unknown
  misc_feature (279)..(279): "n" may be a, t, c, g, other or unknown
  misc_feature (281)..(281): "n" may be a, t, c, g, other or unknown
  misc_feature (296)..(296): "n" may be a, t, c, g, other or unknown
  misc_feature (308)..(308): "n" may be a, t, c, g, other or unknown
  misc_feature (314)..(314): "n" may be a, t, c, g, other or unknown
  misc_feature (329)..(329): "n" may be a, t, c, g, other or unknown
  misc_feature (342)..(342): "n" may be a, t, c, g, other or unknown
gcatgaggncaatactgttattgttcacattttacagagcaagaaacagaggcagcgaggcattaaaacacctgtctagggtcacagggtgtncagctttcananccaggaatcataaccaggtctgtcttgttctaaagcttgccttttgtaactcctgcacattaaacaaataatcacaactaatttcttaaataattacaaaaaanccaagtgttttgaantataaatacaaagggctaccgaagcataaaatgggaattggaaaaatacctaccncncccaaaattattgtnaaaattaaaaancactcnttggtgcactttgtntatcaaaaaaaanctttaaaaatgttca

SEQ ID NO: 9368 - DNA, 369 bp, Homo sapiens
  misc_feature (108)..(108): "n" may be a, t, c, g, other or unknown
  misc_feature (225)..(225): "n" may be a, t, c, g, other or unknown
  misc_feature (347)..(347): "n" may be a, t, c, g, other or unknown
  misc_feature (349)..(349): "n" may be a, t, c, g, other or unknown
  misc_feature (368)..(368): "n" may be a, t, c, g, other or unknown
gaggttgttgggaaaaatttaatcagctacagatattttaagtaccaaaggctgcctctggagggaaaagaaaactacccctctggttctggttgacagaaatatgtnttatcagattccctgtgaggctttacatcccatgtttgctggagaacagagggattctctaagagtgtagtgatttcttcagatagttccttcatcttgccttcaattatttcagangcctcacaggcagtccccattattcccagtcatgtattcatttcagcttatttccaactcagctatccttggctctgaaaagctgtcatcactggcatcactgtatctatcactgggaaaanantttgcaaccctgttgcaant

SEQ ID NO: 9369 - DNA, 297 bp, Homo sapiens
  misc_feature (80)..(80): "n" may be a, t, c, g, other or unknown
  misc_feature (229)..(229): "n" may be a, t, c, g, other or unknown
  misc_feature (260)..(260): "n" may be a, t, c, g, other or unknown
  misc_feature (272)..(272): "n" may be a, t, c, g, other or unknown
gacattttaaaagccattttaatgggaaattacatcctacatacaggtgttattccaagaagtttcattccattggctangacagaacggacagctttgaaaagatgaagtctggccccagccacttcaggaggactatcttttatttgtagtgttttgtgtgccacagctgcaagatgacttaaagttagaaggtaactgacgatatgcctgggttgaaagtcctganatgatttataaagcacctcgtcgaacctganaagatgctgaanaattgaaacagactgtggctcttgt

SEQ ID NO: 9370 - DNA, 456 bp, Homo sapiens
  misc_feature (221)..(221): "n" may be a, t, c, g, other or unknown
  misc_feature (237)..(237): "n" may be a, t, c, g, other or unknown
  misc_feature (335)..(335): "n" may be a, t, c, g, other or unknown
  misc_feature (375)..(375): "n" may be a, t, c, g, other or unknown
  misc_feature (401)..(401): "n" may be a, t, c, g, other or unknown
  misc_feature (440)..(440): "n" may be a, t, c, g, other or unknown
ggagaaaaattcttctttatttaaaaataccagtaatactgacagacttcaaaagcaattcacgcttccagaatacaaagtacttaatacatattttcaaacctgtttgcatttcaaacaaagttagcgtttttgtaaatcaaatttgataacccgactaaaaatattttccagctttattatttaaggagctgcacagcctttaaagtggggaccaggangcaggcagaggcaganagactgaatgcacccaggactgcgcagcagtctacagcaacatgtcccacaactttggtgctggaaacacaagttatgcacaagacagctgccctccngtgtcaggatcctgtgaaacagcatatcaaaagatcgccngcttcttataatttacacactttccnttaagaatggctttttgaaaaaattctttaaaaatgccnttttaatttaatttcc

SEQ ID NO: 9371 - DNA, 395 bp, Homo sapiens
  misc_feature (52)..(52): "n" may be a, t, c, g, other or unknown
  misc_feature (71)..(71): "n" may be a, t, c, g, other or unknown
  misc_feature (81)..(81): "n" may be a, t, c, g, other or unknown
  misc_feature (370)..(370): "n" may be a, t, c, g, other or unknown
  misc_feature (372)..(372): "n" may be a, t, c, g, other or unknown
  misc_feature (391)..(391): "n" may be a, t, c, g, other or unknown
aagtttgcaaatcttttatatttccagctgttgagacagtatttttgagggntgatgttacctctagcggngaaaccaganccagctattaagcagccagaaagctacagtaattgaatacatgaccatttctcttttagcacgttctttgttctcctcttccagaagttgtagacgtctatttagtttgattatctgtcgtcttagtgaagctgcatctacaacagtcaggtcatctgacgttccttcaatggttgtatctatatttgaaatgccatacctgacgttgtcatgatgaggattagaagtggcggcagcagacccaccacgcaacacaggtctaaggcaggtttttgcgggagaaagcacnanacagaatcaggaaacaganaagt

SEQ ID NO: 9372 - DNA, 449 bp, Homo sapiens
  misc_feature (42)..(42): "n" may be a, t, c, g, other or unknown
  misc_feature (56)..(56): "n" may be a, t, c, g, other or unknown
  misc_feature (75)..(75): "n" may be a, t, c, g, other or unknown
  misc_feature (380)..(380): "n" may be a, t, c, g, other or unknown
  misc_feature (436)..(436): "n" may be a, t, c, g, other or unknown
  misc_feature (442)..(442): "n" may be a, t, c, g, other or unknown
aaaaaaaaaagtctcccatgttggctaaggggggtctcgaantcctggggtcaaantgatccacttggccttggnttccccgaaatggcggggattaaaaacgtgagccactgtacccatgattctttaagaccttcagcagcccatcatttcaagatgatatggtcttatcccctgaactaggtatctgacctcaatcatagctgagtcccagacttccaatgaaccttacaccccaccactcccccagtgatccttcatgttgatgcacaatcactcacacaccctcgcatgagcccagcacttcccaccctcaaccatgctttgatcaactgcagtctggttccactgtggccatggagcttgtttagttacatgtnttcccacaggggctgccctggcaccccaactcccaatttaatgggttctgggatancaactngtcctct

SEQ ID NO: 9373 - DNA, 450 bp, Homo sapiens
  misc_feature (383)..(383): "n" may be a, t, c, g, other or unknown
  misc_feature (398)..(398): "n" may be a, t, c, g, other or unknown
  misc_feature (450)..(450): "n" may be a, t, c, g, other or unknown
ggtagatagtaggatttattttaatttttcaatctgaaaaaaaaaaaaacccaaaacaaaaaaaaacaaactatcctcatatatatatatacagtgtcaacattttcagagcacttacattaggaaacattgtttctcttcaactgtatgacaatactgtatatgccacaataaaatttacaaaaacaatcgcatcagcagtcataacaaacatcatgattttacatttcaatacacaagaaaaaaaataggcatcttcccggcacttggctcccgcctgacggcaacgtctcctccacactttgagagacctcagcttttaaaacccagcagcggctatttcagaagtcatgtcctttccagatccaaacttaaataatganaaatttgccatttcnaaataactgaagaatttattcctggaatttgggaaatttaacccccccaaan

SEQ ID NO: 9374 - DNA, 410 bp, Homo sapiens
  misc_feature (263)..(263): "n" may be a, t, c, g, other or unknown
  misc_feature (352)..(352): "n" may be a, t, c, g, other or unknown
  misc_feature (355)..(355): "n" may be a, t, c, g, other or unknown
  misc_feature (372)..(372): "n" may be a, t, c, g, other or unknown
  misc_feature (381)..(381): "n" may be a, t, c, g, other or unknown
  misc_feature (398)..(398): "n" may be a, t, c, g, other or unknown
  misc_feature (404)..(404): "n" may be a, t, c, g, other or unknown
  misc_feature (408)..(408): "n" may be a, t, c, g, other or unknown
gtaatatgtattttaatggagaccataaatttttccaaaaacccgcttgaattagaaaacttaaggccatttatatgaaataagggttttaagcacagctgtacagtttaggacagtaagagctccaaaaatgtctacatagctttccaaatctcgtatcagtcagtctctccgtgtgtcgtgggagctgcctgcgcttccgtgaacgggacactgagaaatgcttcaatatgtgccacgccattccagaaaactccctgcanaagcagctcttcctgcagcactcaaccttgtgttattttcctggacttcttttatgtggcagatatttatgttttcatcatggttgaanaanctgcttggaaacaggtnagctgcaantgcatgctactcttgancttgtnccanga

SEQ ID NO: 9375 - DNA, 457 bp, Homo sapiens
  misc_feature (42)..(42): "n" may be a, t, c, g, other or unknown
  misc_feature (44)..(44): "n" may be a, t, c, g, other or unknown
  misc_feature (52)..(52): "n" may be a, t, c, g, other or unknown
  misc_feature (443)..(443): "n" may be a, t, c, g, other or unknown
  misc_feature (448)..(448): "n" may be a, t, c, g, other or unknown
  misc_feature (451)..(451): "n" may be a, t, c, g, other or unknown
caaacaactgttggattgtactttaaatgtgtaacaccccanancagctgtncaatgaatgacatagaactttcttctagacaaagattaggaaaaaattagtacattcacgctttcaacagaaatacattacatattttttcagttttgttttacagtcatagacacaatcatattgaaactacatatggataaattgtaagttattaagtaatgattttcatttgtattacatgatgagtttcacaacatgaggattacatatttcaatatggcatatactatttttgaaccacataaagcaatatagtacaaaataatgtaacagttactgtaaagtcagtaatgccacttggcaaatacatcaaatatgccaccgaaaaccagtccaagcatgagacatgacatctttcatttctaaactataagccctttgaaagganggacnttnggaccc

SEQ ID NO: 9376 - DNA, 560 bp, Homo sapiens
  misc_feature (7)..(7): "n" may be a, t, c, g, other or unknown
  misc_feature (91)..(91): "n" may be a, t, c, g, other or unknown
  misc_feature (93)..(93): "n" may be a, t, c, g, other or unknown
  misc_feature (95)..(95): "n" may be a, t, c, g, other or unknown
  misc_feature (138)..(138): "n" may be a, t, c, g, other or unknown
  misc_feature (212)..(212): "n" may be a, t, c, g, other or unknown
  misc_feature (253)..(253): "n" may be a, t, c, g, other or unknown
  misc_feature (426)..(426): "n" may be a, t, c, g, other or unknown
  misc_feature (442)..(442): "n" may be a, t, c, g, other or unknown
  misc_feature (467)..(467): "n" may be a, t, c, g, other or unknown
  misc_feature (478)..(478): "n" may be a, t, c, g, other or unknown
  misc_feature (492)..(492): "n" may be a, t, c, g, other or unknown
  misc_feature (497)..(497): "n" may be a, t, c, g, other or unknown
  misc_feature (513)..(513): "n" may be a, t, c, g, other or unknown
  misc_feature (533)..(533): "n" may be a, t, c, g, other or unknown
  misc_feature (549)..(549): "n" may be a, t, c, g, other or unknown
cccagancaggtgcgtttatttttatatgcaaatatatcacccttcaatgcatatacaatagttataaggtctgaaaactaagtctatcanananaattgcaatcccttgactcatatgtgttcatccttccatgganagcctcattatttcatacaataaacatgccagaaaaggattctggggaaaaaacctgtatcagctcaaaagganaggttttcttaaactgtctggggttactgaggtcaaacaanatgactgcatctgttttacaggaaaaatcaaatccaaagtactaatcgtaacaaggactaggctagttctgatgtttactttcctacctacagctactctgtaatgaaacaaataatattaacaaccccagagtgaactaagtttacacatgccaaatatcacatcttattcnttatctcccacaagcnatacaaaatgttaactgggtatctnaattaaaggcnccaattcttaattntccantttcccagaatatttnaaaaagaaaaaatccattcnccttaaccttattttnctactcctaaa

SEQ ID NO: 9377 - DNA, 469 bp, Homo sapiens
  misc_feature (95)..(95): "n" may be a, t, c, g, other or unknown
  misc_feature (235)..(235): "n" may be a, t, c, g, other or unknown
  misc_feature (326)..(326): "n" may be a, t, c, g, other or unknown
  misc_feature (354)..(354): "n" may be a, t, c, g, other or unknown
  misc_feature (404)..(404): "n" may be a, t, c, g, other or unknown
  misc_feature (435)..(435): "n" may be a, t, c, g, other or unknown
  misc_feature (454)..(454): "n" may be a, t, c, g, other or unknown
accacagaaaaactgtttaatatagctctctaactcctttaagaactgctttaggaatttttattttggctttaagtggaatcacttacatctanacatcctttgaagcaaaaccacttagaaaccagtattttgtgctaaggaagggaagaaatactacaaaatgttgcaaaacagaacaaaaagcttaaaggtttaagaaatttaaaggcacagatatttcacatcaattcanattttatagtatgcaaacatgaaataaaccaccgtgttacaacaaatatgtgctagcgattggttagatttcacacttctctccaaatgtnacactgtcacattgcatttcctctctanatgtatactgatagcactgggaaagatgttcagatgcagggacaatcccnatgtttaccaaacttctgaaagatgaatatncgctacaaacttagttccnaatatgaaatgaaaa

SEQ ID NO: 9378 - DNA, 584 bp, Homo sapiens
  misc_feature (5)..(5): "n" may be a, t, c, g, other or unknown
  misc_feature (7)..(7): "n" may be a, t, c, g, other or unknown
  misc_feature (146)..(146): "n" may be a, t, c, g, other or unknown
  misc_feature (500)..(500): "n" may be a, t, c, g, other or unknown
  misc_feature (556)..(556): "n" may be a, t, c, g, other or unknown
  misc_feature (581)..(581): "n" may be a, t, c, g, other or unknown
ggtananatcaggtctcactatgttgttcagcctgatcgcaaactcctaatctcaagtgatcctcccactttggcctcccaaagtgctgggattacaagtgtaagccatcatggcaggtgttgtttttaatgtgttaacttgctangctaccagctgccatttgtttaatcaaacactaatctaggtgttgctatgaaggtattttgtagatgtgattaaaatccataatctgttgactttaagtaatggagattatcctgaataatgtggatgggcctgattcaattaggtgaaaggtcttaaaagtagggctgaagcttccctgagagcaagaaattccacttatagataactgcttcagcccatgcctgaatttccctgcccttcctgacagcctgcccccaaaatttcagacttgcctagctagcccctacaattgcataaactctctctctatacttcgtactgggttctgcttctctaagttctgaaccttgantgatatgccagcttgttatttatttgccaaaacaatccttccaaaatctaattaanccctgtctattttttcccatccgtncct

SEQ ID NO: 9379 - DNA, 498 bp, Homo sapiens
  misc_feature (34)..(34): "n" may be a, t, c, g, other or unknown
  misc_feature (39)..(39): "n" may be a, t, c, g, other or unknown
  misc_feature (101)..(101): "n" may be a, t, c, g, other or unknown
  misc_feature (113)..(113): "n" may be a, t, c, g, other or unknown
  misc_feature (125)..(125): "n" may be a, t, c, g, other or unknown
  misc_feature (312)..(312): "n" may be a, t, c, g, other or unknown
  misc_feature (337)..(337): "n" may be a, t, c, g, other or unknown
  misc_feature (419)..(419): "n" may be a, t, c, g, other or unknown
  misc_feature (429)..(429): "n" may be a, t, c, g, other or unknown
  misc_feature (434)..(434): "n" may be a, t, c, g, other or unknown
  misc_feature (468)..(468): "n" may be a, t, c, g, other or unknown
  misc_feature (481)..(481): "n" may be a, t, c, g, other or unknown
  misc_feature (494)..(494): "n" may be a, t, c, g, other or unknown
  misc_feature (496)..(496): "n" may be a, t, c, g, other or unknown
gacacagggtctcactctgttgtccaaactggantggantggtgtgatcttggctcactgcaaccttcacctccaggatgcacataattctcgtgctctancttcctgagtanctggggctatangcacatgccaccacgcctggataatttttatttttatttttggtaaaaacggggtttcaccatgttggccaggctggtctcaaacgtctgacctcaagtgttttgcccgcctcagcctcccaaagtgctgggattacaggcgtgagccactgtgccaggcctttttttttttttttttttttttgangcagggtctggctctgttgcccaanatggaatacagtggcacaatctcagctcactgcaacctctacctccggggcccaaaccatcctcccacctcagcctcacaantatctgggantacangcgcacaacatcacacctggctaatttttttganttttggtaaaaanagaattttcatcntntt

SEQ ID NO: 9380 - DNA, 357 bp, Homo sapiens
  misc_feature (29)..(29): "n" may be a, t, c, g, other or unknown
  misc_feature (32)..(32): "n" may be a, t, c, g, other or unknown
  misc_feature (70)..(70): "n" may be a, t, c, g, other or unknown
  misc_feature (104)..(104): "n" may be a, t, c, g, other or unknown
  misc_feature (178)..(178): "n" may be a, t, c, g, other or unknown
  misc_feature (197)..(197): "n" may be a, t, c, g, other or unknown
  misc_feature (214)..(214): "n" may be a, t, c, g, other or unknown
  misc_feature (217)..(217): "n" may be a, t, c, g, other or unknown
  misc_feature (261)..(261): "n" may be a, t, c, g, other or unknown
  misc_feature (277)..(277): "n" may be a, t, c, g, other or unknown
  misc_feature (280)..(280): "n" may be a, t, c, g, other or unknown
  misc_feature (295)..(295): "n" may be a, t, c, g, other or unknown
  misc_feature (333)..(333): "n" may be a, t, c, g, other or unknown
  misc_feature (345)..(345): "n" may be a, t, c, g, other or unknown
  misc_feature (347)..(347): "n" may be a, t, c, g, other or unknown
ctctctgtctctcttttcatttcaacggngangatcctttcccgagaagtatcttcagtgtcttagggangtcacagcaacaaggcgaaacaataattaaagtncaacagaaagtagtgcagttctcgctgtggaaagaacggtccgcaagcagctggcccgggatgcctgcacccangtctaagctgaaagacaangggtctcggtgttcccncanctctaaaactgtggctgggggctggctcaagaaatcatcttcanggtgatgtgggggatncangtggaatgcggtgangaaaaaaagaaggcgctgggctcccggcccctgtccanaattgactcccnanaagaatccca

SEQ ID NO: 9381 - DNA, 436 bp, Homo sapiens
  misc_feature (94)..(94): "n" may be a, t, c, g, other or unknown
  misc_feature (104)..(104): "n" may be a, t, c, g, other or unknown
  misc_feature (121)..(121): "n" may be a, t, c, g, other or unknown
  misc_feature (148)..(148): "n" may be a, t, c, g, other or unknown
  misc_feature (151)..(151): "n" may be a, t, c, g, other or unknown
  misc_feature (156)..(156): "n" may be a, t, c, g, other or unknown
  misc_feature (233)..(233): "n" may be a, t, c, g, other or unknown
  misc_feature (349)..(349): "n" may be a, t, c, g, other or unknown
  misc_feature (360)..(360): "n" may be a, t, c, g, other or unknown
  misc_feature (384)..(384): "n" may be a, t, c, g, other or unknown
  misc_feature (404)..(404): "n" may be a, t, c, g, other or unknown
  misc_feature (409)..(409): "n" may be a, t, c, g, other or unknown
  misc_feature (423)..(423): "n" may be a, t, c, g, other or unknown
  misc_feature (436)..(436): "n" may be a, t, c, g, other or unknown
aatagtgatttatttgtcatcaaatgtacaacttattctaaatattttcattttctgtgttctaaatagaaatattaagttgcagtaaaaaganaaaaaaaggntatttagcattacaaanaatcatatttaaaggctgcccaatgtngantctantgacctgttcaggacacctgaaatataattaaatgacaattatcaaggttttaacaatttataattctaaaccagangattataaagaagtgcaaattgacttttacattcaactttagttaaatgaaggcactcagtattcttcctgaataatacattccagtttctcacattttatgctttcatctattcngaattatttcntagttaaataatctactcttatcnccactgttttaacgaattcntaatntttggaaaggcctntaaaccttaaccn

SEQ ID NO: 9382 - DNA, 371 bp, Homo sapiens
  misc_feature (147)..(147): "n" may be a, t, c, g, other or unknown
  misc_feature (198)..(198): "n" may be a, t, c, g, other or unknown
  misc_feature (301)..(301): "n" may be a, t, c, g, other or unknown
  misc_feature (364)..(364): "n" may be a, t, c, g, other or unknown
  misc_feature (369)..(369): "n" may be a, t, c, g, other or unknown
acaaatactccatgttttactagatgtgagcaaatcattaagcagcaagtttagtttggcgacaaaattgtaacatctactacaatatatcttcaaaagaaatcattcacaaccacactcacatgacaagaagacctcacagactcnaaataaataggaaaaactcatacataaatactgtcccgttccaacactganactctcagtcatgcagaaaacaaattgaggcattgagtggaggcaaagggcacttctgcaggaactgaccctcaaattagggattctcaacccgtcttcctangatgagcaatggatgatttgcttggaggctccttgttcagaaatatcctttctccctgtccangggtnca

SEQ ID NO: 9383 - DNA, 505 bp, Homo sapiens
  misc_feature (451)..(451): "n" may be a, t, c, g, other or unknown
  misc_feature (480)..(480): "n" may be a, t, c, g, other or unknown
  misc_feature (493)..(493): "n" may be a, t, c, g, other or unknown
  misc_feature (499)..(499): "n" may be a, t, c, g, other or unknown
  misc_feature (501)..(502): "n" may be a, t, c, g, other or unknown
  misc_feature (505)..(505): "n" may be a, t, c, g, other or unknown
agagctttttccgtccttccgtccggaaagcaaacatccttcaataaacatgcaaggcggctgtcctgtgggacccaggaccagagagggagctgcagaggacagggctggacagagggtagccctgggtcttcaggaacaccagccacccagccatgagagagggaggggaaggaggcaatgtgggtaccaagagtccagaaggactcaggcctcagccccagggtcgagatggagtcccagctctcctatccaaacccactccccgacccatgggctcttgggctgggagcatcgctgcatttagtcaagtttgaggagtctgaaaaatattttccagaagataaagtcttgggtcatcgatgccccagcttcacagtccgtgccctcattctcagcccctcaccatccgtgcgccacctggggcccagcagccgcctgcggctggacntctccaggcctggcatcctccactgggtnattctgtccctgnaagaantnngcn

SEQ ID NO: 9384 - DNA, 580 bp, Homo sapiens
  misc_feature (81)..(81): "n" may be a, t, c, g, other or unknown
  misc_feature (265)..(265): "n" may be a, t, c, g, other or unknown
  misc_feature (345)..(345): "n" may be a, t, c, g, other or unknown
  misc_feature (431)..(431): "n" may be a, t, c, g, other or unknown
  misc_feature (466)..(466): "n" may be a, t, c, g, other or unknown
  misc_feature (506)..(506): "n" may be a, t, c, g, other or unknown
  misc_feature (523)..(523): "n" may be a, t, c, g, other or unknown
  misc_feature (527)..(527): "n" may be a, t, c, g, other or unknown
  misc_feature (534)..(534): "n" may be a, t, c, g, other or unknown
  misc_feature (574)..(574): "n" may be a, t, c, g, other or unknown
  misc_feature (580)..(580): "n" may be a, t, c, g, other or unknown
ccacatgcacacgtatgtttattgcaggactatttacaatagcaaaaacttgggaacaacccaaatgccaagcaatgatanactgggtaaagaaaatgtggcacatacacaccatggaatactatgcagccataaaaaagaatgagttcatgtcctttgcagggacatggatgaagctggaaaccatcattctcagcaaactaacacaggaacacaaaaccaagcaccacatgttctcactcataagtgggagttgaacaatganatcacatggacacagggaggggaacatcacacactgggacctgtcagggggttgggaacaaggggagggaaaacgttaanacaaatacctaatgcatgtgggacttaaaacctaaatgacaggttgataaggtgtggcaaaccaccatggcacatatatacctaantaccaaacctgcatgttctggacatattcccaaancttaaattaaattatttaaaaaaaaaaaaactggtttatnctatccaaatttccccnttcnttggacncaaaatcccccggtccttttttaaaagggaattggttttnaaaaan

SEQ ID NO: 9385 - DNA, 576 bp, Homo sapiens
  misc_feature (33)..(33): "n" may be a, t, c, g, other or unknown
  misc_feature (156)..(156): "n" may be a, t, c, g, other or unknown
  misc_feature (228)..(228): "n" may be a, t, c, g, other or unknown
  misc_feature (276)..(276): "n" may be a, t, c, g, other or unknown
  misc_feature (488)..(488): "n" may be a, t, c, g, other or unknown
  misc_feature (523)..(523): "n" may be a, t, c, g, other or unknown
  misc_feature (539)..(539): "n" may be a, t, c, g, other or unknown
  misc_feature (554)..(554): "n" may be a, t, c, g, other or unknown
  misc_feature (560)..(560): "n" may be a, t, c, g, other or unknown
  misc_feature (567)..(567): "n" may be a, t, c, g, other or unknown
cctgaaatagctttttattaaacggcaaagcanaactgcaacacaatttaaatgtctgtaaattaggtcacaaaagggatgcaaaatgtttgcagtttgactattatatattcacacagctaaagtcattcatcaactcttacaccaatacataanattattccatgattaaaagcccaaatctaataaccttaagctacattagtggatctcttttcatattataanattttagcaatacttccaatattgatttccttaccaaatggaatctanaagctaaatttttaaaaattgttaaaggatgactaaaactcttcaaacccagtagcagggtttacagaaaattctagaacaagtgagataaaatactgagcaagataataagtatacatgtataactttcccattttattcactattctaatactaatacaccattacggaattttgcagaagttgacccactgggtacaaatcacttaaanaccaaactctttgttactgttctctccaaatttgntaacataagggtgtcnacttaatccccttcntatatntttcccnaaaatttcc

SEQ ID NO: 9386 - DNA, 597 bp, Homo sapiens
  misc_feature (459)..(459): "n" may be a, t, c, g, other or unknown
  misc_feature (483)..(483): "n" may be a, t, c, g, other or unknown
  misc_feature (487)..(487): "n" may be a, t, c, g, other or unknown
  misc_feature (490)..(490): "n" may be a, t, c, g, other or unknown
  misc_feature (565)..(565): "n" may be a, t, c, g, other or unknown
  misc_feature (597)..(597): "n" may be a, t, c, g, other or unknown
gtatctatgtaaatattttattctgcttccagatagaacattgaagtttacatgttattttaaagacaataaacagctaagctactgacataaaatatacaataaatttatgagatataaggtacagatgagaaaaatctgaaataagtttttaacttcatttagcctattaggaacatgaagatgtctggaattgatgctggccttggtctcaagtactttttcccatatgtattcgttttatccttccagaaagcatatcatattagagtgtctaagaaatcagtgaatcactaagttttccatcttaccgaagtacaaaacattatttcaaatctaggccttctgacagaatccaatatctatttttatacttacttttctttctactaagttctttaataaaattatgaatcagaaagcaagtacaagacatgcttatttcccacagaaatatcnttgaagacttaagaagaataaatngccngtncttctaaaaaatcccaaatttggacatttgggaacaatataattgccatactaattatatcttttattaaaaaanaacttttccagcttggtttccaaactcttttn

SEQ ID NO: 9387 - DNA, 499 bp, Homo sapiens
  misc_feature (208)..(208): "n" may be a, t, c, g, other or unknown
  misc_feature (252)..(252): "n" may be a, t, c, g, other or unknown
  misc_feature (306)..(306): "n" may be a, t, c, g, other or unknown
  misc_feature (347)..(347): "n" may be a, t, c, g, other or unknown
  misc_feature (405)..(405): "n" may be a, t, c, g, other or unknown
  misc_feature (407)..(407): "n" may be a, t, c, g, other or unknown
  misc_feature (441)..(441): "n" may be a, t, c, g, other or unknown
  misc_feature (456)..(456): "n" may be a, t, c, g, other or unknown
  misc_feature (462)..(462): "n" may be a, t, c, g, other or unknown
  misc_feature (488)..(488): "n" may be a, t, c, g, other or unknown
  misc_feature (493)..(493): "n" may be a, t, c, g, other or unknown
agttagtgaaaatatatatttgccaccagaattcactgggaccccagagccagcagatgtggttggaaagatcctctgctctgtcctctggcctcctgctgcatctgggccatcagttggactggaggagctggacgggcacatagttttcctcagaggcaccatcctcatcctccttgggaggggaagccaggacagggttctcganagttcgagggacacctgcccctgacgggtcctcacacagcgtangcagcgtctgctcccatgaagcccagttcacctcctccaccctgaaaacaccancgctcatcggggctgccatctggcttaatgccaacggtcancatcacacctgcccgctgcttcttcctgcaccaccaatagccattctccatctccagnanaaaaatgctttctgcacttccaaatgctccactntcattggcgaaactnttgacngtctccctcatgaagggcaataaacnttttnaacacc

SEQ ID NO: 9388 - DNA, 530 bp, Homo sapiens
  misc_feature (170)..(170): "n" may be a, t, c, g, other or unknown
  misc_feature (228)..(228): "n" may be a, t, c, g, other or unknown
  misc_feature (310)..(310): "n" may be a, t, c, g, other or unknown
  misc_feature (328)..(328): "n" may be a, t, c, g, other or unknown
  misc_feature (350)..(350): "n" may be a, t, c, g, other or unknown
  misc_feature (436)..(436): "n" may be a, t, c, g, other or unknown
  misc_feature (480)..(480): "n" may be a, t, c, g, other or unknown
  misc_feature (482)..(482): "n" may be a, t, c, g, other or unknown
  misc_feature (484)..(484): "n" may be a, t, c, g, other or unknown
  misc_feature (501)..(501): "n" may be a, t, c, g, other or unknown
  misc_feature (508)..(508): "n" may be a, t, c, g, other or unknown
  misc_feature (522)..(522): "n" may be a, t, c, g, other or unknown
actggtcgtcttggtgtattttatttctatttgcaactgtactatagggctggccatatagtatttgataagtgaacaaatgagtgaatggatgaatgatgagtgaatgaatgaatgaatgaatgaatgaagtcttctttgacgtcccctgtccacagtgatcttctganaacctctgcagcatttcctttgtgtagcctcctttggtccttagcaacaacgttgtancaattagttgtttgaatgtgtactcagcttaagttctcgactgcagggtaagcaatttgccagtctaaaaccaggtgggganacattgcttgggaatcanatcgacctggttccaatcccanagctaccacctattacttgtggcctcaggtaattatctctctgtaaagctccatttcctcatatgtcaaatgaaagttaataatantgcctgctccacagggttggttgtgaaaaataaatgaaatcatntntntgaaatgcctaccatanctttggnccccaggtgctcanttaatacc

SEQ ID NO: 9389 - DNA, 545 bp, Homo sapiens
  misc_feature (136)..(136): "n" may be a, t, c, g, other or unknown
  misc_feature (219)..(219): "n" may be a, t, c, g, other or unknown
  misc_feature (307)..(307): "n" may be a, t, c, g, other or unknown
  misc_feature (309)..(309): "n" may be a, t, c, g, other or unknown
  misc_feature (316)..(316): "n" may be a, t, c, g, other or unknown
  misc_feature (357)..(358): "n" may be a, t, c, g, other or unknown
  misc_feature (364)..(364): "n" may be a, t, c, g, other or unknown
  misc_feature (409)..(409): "n" may be a, t, c, g, other or unknown
  misc_feature (430)..(430): "n" may be a, t, c, g, other or unknown
  misc_feature (447)..(447): "n" may be a, t, c, g, other or unknown
  misc_feature (450)..(450): "n" may be a, t, c, g, other or unknown
  misc_feature (493)..(493): "n" may be a, t, c, g, other or unknown
  misc_feature (505)..(505): "n" may be a, t, c, g, other or unknown
  misc_feature (530)..(530): "n" may be a, t, c, g, other or unknown
  misc_feature (532)..(532): "n" may be a, t, c, g, other or unknown
  misc_feature (539)..(539): "n" may be a, t, c, g, other or unknown
cttgcaaagcactttatatacgtcagcgcatttgactcccaaaacagctctaggaggtaggtgctaaatgaggaaacgaaggcaccaaaaggtgaaggctcacctaaagccacacagctggaagtggcagaagcanaatgggaacccgggcagcctggttcctggccctgccattcacccccctgccatctaaaaaatgctactggtggcccacccgantccactggggggtgatgcctgctgctgagggttcacatctgtgctctctggaggcttcccttggctactggaaggcaccctgccctgnangtaagtntctgggaaagttattcactcctctctggccccctcatccannaaccantaaccggtggtgtgggcacactgtggtactgtgggctctgcctgnaactctccgtggggccacctnaagctggacttcctctnaanccacttccttgcccactgctccctcccctcccctgcttccctnaatccctccctnaaaccccattccaaaacctgctctnanaaacctnaactaa

SEQ ID NO: 9390 - DNA, 574 bp, Homo sapiens
  misc_feature (143)..(143): "n" may be a, t, c, g, other or unknown
  misc_feature (244)..(244): "n" may be a, t, c, g, other or unknown
  misc_feature (271)..(271): "n" may be a, t, c, g, other or unknown
  misc_feature (274)..(274): "n" may be a, t, c, g, other or unknown
  misc_feature (282)..(282): "n" may be a, t, c, g, other or unknown
  misc_feature (293)..(293): "n" may be a, t, c, g, other or unknown
  misc_feature (295)..(295): "n" may be a, t, c, g, other or unknown
  misc_feature (302)..(302): "n" may be a, t, c, g, other or unknown
  misc_feature (384)..(384): "n" may be a, t, c, g, other or unknown
  misc_feature (465)..(465): "n" may be a, t, c, g, other or unknown
  misc_feature (470)..(470): "n" may be a, t, c, g, other or unknown
  misc_feature (475)..(475): "n" may be a, t, c, g, other or unknown
  misc_feature (550)..(551): "n" may be a, t, c, g, other or unknown
  misc_feature (554)..(554): "n" may be a, t, c, g, other or unknown
gcctgtccacctcatgttttattgtaaaaatgttaaaataaattacatttgacatcgttgccagtatgtacatacagtgtgcgcgatgccaggacaaccagcaacaacatggttcattaaaacatttcacagaaaaatacgangctgctccttttcaggcccctgctgggtggcggcctctgcaaacggctaaaaaagtgggggtgtgggcacgtgcccatcactgtcttcacatgttggggangtgggctctggccccactgccccacantantggggcanaaagcaaaaantnaacgganctgaacggctctgatgacttgcttcctgcccggcctccagtcacccgcagtggatgccccttcctgcttttgctcacctcantgtccccttctccacctctgcttggggacatggcccttgacatcatggccttggataaagtccccaaaaagccccattaantttcngggcnggaaggcaaaactaaattcccaatccttgggaacctgctctttaaccactggctctgaacccacaacaaatcccnnttnttaaaaaccccattttttta

SEQ ID NO: 9391 - DNA, 536 bp, Homo sapiens
  misc_feature (203)..(203): "n" may be a, t, c, g, other or unknown
  misc_feature (248)..(248): "n" may be a, t, c, g, other or unknown
  misc_feature (280)..(280): "n" may be a, t, c, g, other or unknown
  misc_feature (330)..(330): "n" may be a, t, c, g, other or unknown
  misc_feature (468)..(468): "n" may be a, t, c, g, other or unknown
  misc_feature (488)..(488): "n" may be a, t, c, g, other or unknown
  misc_feature (505)..(505): "n" may be a, t, c, g, other or unknown
  misc_feature (508)..(508): "n" may be a, t, c, g, other or unknown
  misc_feature (514)..(514): "n" may be a, t, c, g, other or unknown
  misc_feature (532)..(532): "n" may be a, t, c, g, other or unknown
  misc_feature (535)..(535): "n" may be a, t, c, g, other or unknown
attctatttgggtcaaattaattttattatgctccatgatgaattgccaccagtgcaacatcctattcactatacatttcaaaaaaagaattcacatactaaacaaaatttcagttgtctgaaaatgaaatgattgaaagtctttatgaatctcatacatacaatatgtggctagctgaaattgtctatcacgtagcatttanatataaaaagcctcatgctagtttgttaaatgcaaaggctaccanacgaccatttagctggagaatatacggaaggntttcagacaacgcacaggtatagtgctgctcacagtgcaggatggtagangactgaaacatgcaaccttacaccttacttggtaaagcagatttagtcttcatgcctggactgaactccacagctgctgtgtttcaccaacagtaatttaaacttttggtacaacaaccaatgtcttttctccttaanaaaaaaagaataatttattnccttggcaattatatanccntttacntttttaaattgtgctttnacnc

SEQ ID NO: 9392 - DNA, 516 bp, Homo sapiens
  misc_feature (41)..(41): "n" may be a, t, c, g, other or unknown
  misc_feature (139)..(139): "n" may be a, t, c, g, other or unknown
  misc_feature (267)..(267): "n" may be a, t, c, g, other or unknown
  misc_feature (426)..(426): "n" may be a, t, c, g, other or unknown
  misc_feature (459)..(459): "n" may be a, t, c, g, other or unknown
  misc_feature (463)..(463): "n" may be a, t, c, g, other or unknown
  misc_feature (474)..(474): "n" may be a, t, c, g, other or unknown
  misc_feature (485)..(485): "n" may be a, t, c, g, other or unknown
  misc_feature (511)..(511): "n" may be a, t, c, g, other or unknown
  misc_feature (515)..(515): "n" may be a, t, c, g, other or unknown
aattttagagaaacgatcttgctctgtcgcccaagctggantgcagtggcttgatcgtacctcactgcagccctgaactcctgggctcaagcagtcctcctgcctcagcctcttgagtagctggaaccgcaggtatgtncaggtatgtaccgccacatttggtcattaaaaaaaaattgtagagatgggggtctcactatgttgcccaggttggtcttgaactctcagcttcaagcgacccttagcctgagcctcccaaagtgcgangattacagtcgtgagcccccatgcctggctgccatttagtttctgatgatcattttcctgcctttttttttgggtgcaaaaaaaatggttttagtcctcagcatcttacctgcatcaggttcaccaaggggccccacccgatggctccctgcctcaaancagtggaacatccatctctcccaagaatggtcngtancacctgaaacncatgcaaatancctgggaatttgaaaaaaaccttaancccna

SEQ ID NO: 9393 - DNA, 569 bp, Homo sapiens
  misc_feature (139)..(139): "n" may be a, t, c, g, other or unknown
  misc_feature (143)..(143): "n" may be a, t, c, g, other or unknown
  misc_feature (168)..(168): "n" may be a, t, c, g, other or unknown
  misc_feature (189)..(189): "n" may be a, t, c, g, other or unknown
  misc_feature (191)..(191): "n" may be a, t, c, g, other or unknown
  misc_feature (229)..(229): "n" may be a, t, c, g, other or unknown
  misc_feature (233)..(233): "n" may be a, t, c, g, other or unknown
  misc_feature (255)..(255): "n" may be a, t, c, g, other or unknown
  misc_feature (257)..(257): "n" may be a, t, c, g, other or unknown
  misc_feature (498)..(498): "n" may be a, t, c, g, other or unknown
  misc_feature (509)..(509): "n" may be a, t, c, g, other or unknown
  misc_feature (532)..(532): "n" may be a, t, c, g, other or unknown
  misc_feature (548)..(551): "n" may be a, t, c, g, other or unknown
gcaattaatctagtcccagcacttttatttgtaaagttctcaaatcaaaagtaacaaataattatacatcaggattgttaggaataccaattattttacaactgccactacgtgtttcttcttctctgacacaagtggnacanatccaggcttgctgtgtttaatacnattcacttcctttcgtcgacnancttctttcatgatgcgctgttcctgaatctggctatanatanattttggtagatgtcgatgacnanctatacgttttatatgaggataatgctgaaatttctccttcaatttctggttataatccttggctgctttttctcgtgatgtaagcacacccaatttttcagaagcattagctttccacaggcgaatgttcatttcatcagatccacacataatatacttgctgtcagaagtccattttacacagataacatgttgcattctctttgtatgatataccccctgcttccacttttgtctacnggaaaaaatcnaataaaattttcgaaacttgccnaaacaaacccctcccnnnngggaaattatcccctcca

SEQ ID NO: 9394 - DNA, 586 bp, Homo sapiens
  misc_feature (81)..(81): "n" may be a, t, c, g, other or unknown
  misc_feature (176)..(176): "n" may be a, t, c, g, other or unknown
  misc_feature (367)..(367): "n" may be a, t, c, g, other or unknown
  misc_feature (407)..(407): "n" may be a, t, c, g, other or unknown
  misc_feature (435)..(435): "n" may be a, t, c, g, other or unknown
  misc_feature (457)..(457): "n" may be a, t, c, g, other or unknown
  misc_feature (529)..(529): "n" may be a, t, c, g, other or unknown
  misc_feature (543)..(543): "n" may be a, t, c, g, other or unknown
  misc_feature (566)..(566): "n" may be a, t, c, g, other or unknown
  misc_feature (573)..(573): "n" may be a, t, c, g, other or unknown
  misc_feature (586)..(586): "n" may be a, t, c, g, other or unknown
aaatgacaaaacatatttagaggctttatttaaaaatctctcactgttcattatcaaagttacaagattgcataccaatanacagactgtaaacataggaaattttcgttaaggaaagatgggtttactgtaattcaatcttttacaaaaaattacttgcaagttattgataacanaatttctcttttactttcttaattctcttgaaaattaaaccaatgtttccactttcatgagctaaagttcaaccatggtcaccttaggaaatacccctgtttatttgttaatcagaaatacaaatcgagtggcacatacttccattttcttcttaggccaaaggtttcagcttcattatattttacagaanaccttcagtggtccggtaagtctttcatgtcacagctgangtttaatgatggcagtggaggaaagcanaagtgatgcaaagtaagaccancccagttgccttatctgacatggaatcttttcctgtctgctgcaccaacaaattttcctggtcaggttgccnccccaaaccgattnaaccaaagggtgacttccctganaaacccntttaaggaaaatn

SEQ ID NO: 9395 - DNA, 585 bp, Homo sapiens
  misc_feature (38)..(38): "n" may be a, t, c, g, other or unknown
  misc_feature (111)..(111): "n" may be a, t, c, g, other or unknown
  misc_feature (313)..(313): "n" may be a, t, c, g, other or unknown
  misc_feature (333)..(333): "n" may be a, t, c, g, other or unknown
  misc_feature (342)..(342): "n" may be a, t, c, g, other or unknown
  misc_feature (345)..(345): "n" may be a, t, c, g, other or unknown
  misc_feature (418)..(418): "n" may be a, t, c, g, other or unknown
  misc_feature (425)..(425): "n" may be a, t, c, g, other or unknown
  misc_feature (463)..(463): "n" may be a, t, c, g, other or unknown
  misc_feature (478)..(478): "n" may be a, t, c, g, other or unknown
  misc_feature (495)..(495): "n" may be a, t, c, g, other or unknown
  misc_feature (554)..(554): "n" may be a, t, c, g, other or unknown
  misc_feature (566)..(566): "n" may be a, t, c, g, other or unknown
  misc_feature (569)..(569): "n" may be a, t, c, g, other or unknown
  misc_feature (572)..(572): "n" may be a, t, c, g, other or unknown
atttgagacagaatcttgctctgttacccaggctggancacagttgtgtgatctcagctcactgcaacctctgcctcccggattcaagcaattctgcctcagcctcccgantagctgggactacaggcgcatgccaccatgcccggctaacttttgtatttttttagtaaaaatggggttttgccatgttagccaggctggtttcaaagtcctgacctcaggtgatccatccacctcagcttcccaaagtgctgggattacaggtgtgagccaccatgccgggccaactttttttttttttttatggaaacanaatctggctctgttgcccangctggaatncantggcacaatcttggctcattgcaacctccgccttccaggttaaagcaattatcctacctcagcctcccaagtnctgggantacaggtgcacaccaccacatccggctaattttttgtnttttaataaaaacgnatttccccgtgttgccnggctggtctccaactcctaaactcacccatccacccccctggggcccctcaaatttttngattacaggctnaanccncccccccccccta

SEQ ID NO: 9396 - DNA, 379 bp, Homo sapiens
  misc_feature (5)..(5): "n" may be a, t, c, g, other or unknown
  misc_feature (44)..(44): "n" may be a, t, c, g, other or unknown
  misc_feature (91)..(91): "n" may be a, t, c, g, other or unknown
  misc_feature (130)..(130): "n" may be a, t, c, g, other or unknown
  misc_feature (188)..(188): "n" may be a, t, c, g, other or unknown
  misc_feature (190)..(190): "n" may be a, t, c, g, other or unknown
  misc_feature (244)..(244): "n" may be a, t, c, g, other or unknown
  misc_feature (290)..(290): "n" may be a, t, c, g, other or unknown
  misc_feature (320)..(320): "n" may be a, t, c, g, other or unknown
  misc_feature (332)..(332): "n" may be a, t, c, g, other or unknown
  misc_feature (338)..(338): "n" may be a, t, c, g, other or unknown
  misc_feature (345)..(345): "n" may be a, t, c, g, other or unknown
  misc_feature (348)..(348): "n" may be a, t, c, g, other or unknown
  misc_feature (355)..(355): "n" may be a, t, c, g, other or unknown
cttanaaaaattgactttatttggttggaaagtaccctcatgtnaaataaagaacacctgtacagacctggtttgggggagaactgccaangaaactggaggggcagggctgtggccccaaaagttggangatttggggggagagtttcttctttggcaagggagaaggtggcacaaagcccaggcanangggtcagctcggggtgagaccatgactagcagtactacttcccaccctgaacanaatccagggatgctctgtcctggacacgtcaaaaactggggttgangtggccctcgggtcaaaggtcaggaactanaatgctggccanggtcanaagtcangangtccgangctgctctctgaagtcagggggca

SEQ ID NO: 9397 - DNA, 501 bp, Homo sapiens
  misc_feature (239)..(239): "n" may be a, t, c, g, other or unknown
  misc_feature (410)..(410): "n" may be a, t, c, g, other or unknown
  misc_feature (435)..(435): "n" may be a, t, c, g, other or unknown
  misc_feature (466)..(466): "n" may be a, t, c, g, other or unknown
  misc_feature (474)..(474): "n" may be a, t, c, g, other or unknown
  misc_feature (477)..(477): "n" may be a, t, c, g, other or unknown
  misc_feature (491)..(491): "n" may be a, t, c, g, other or unknown
  misc_feature (499)..(499): "n" may be a, t, c, g, other or unknown
atgatggtctttatttacaactttattggcaaaaaagaaaagggaaacttttaaacaatttaacacagggcattgtagctgatcctgtcagataaaagaagttccattttaaatgtccatctaattgtccaaagatacacaatactgaatctgcatacgcagtttcctttatgaagtacagtgctcatgttttaggcagtcttctaaacatacaaatacagaggaaattaaattactcnttaaaaactgtgtcaaatgaagggtattttaaatataagtttgttgtttctggtaatagcacatgcccaaatgaaaaccaaaagatggaaaggcagatacacttcttacttgggtggacagttacaacatcaatcattttctgcaatgaccattatattttccatttatcntgaactactctgaacttactatganatgttcccaagtccaaaaaaaaaaaattttngggacaanatncctttttggccggnaggttacncc

SEQ ID NO: 9398 - DNA, 594 bp, Homo sapiens
  misc_feature (26)..(26): "n" may be a, t, c, g, other or unknown
  misc_feature (62)..(62): "n" may be a, t, c, g, other or unknown
  misc_feature (545)..(545): "n" may be a, t, c, g, other or unknown
  misc_feature (548)..(548): "n" may be a, t, c, g, other or unknown
  misc_feature (586)..(586): "n" may be a, t, c, g, other or unknown
cagcaaaccttcagagggcaaaaganaattttcccttggcccttacagaagctttttgcggncagtctttaacttgccaattttctatcactatttaataatatgagagataacccaaacctctcatccggcatttgtctgttgccatcatcactaactctagtggaggaatctttacaataatggcaaggaaggagatgatggcacatgaaactctatcctaccaaaaaccacagatcttcccttactttcacccagacatataagaacaggaccaattgtgaaaatcaaaagggagattagagatagaaaataggaggcgtggcaaccccacagacctgtgacctttgttgcagctcccttccttcttacaatcctcaaagctcacagtttctcatctctcccattttagctccatgtgtctcacaacagcagccactactcctgggctgccaagccctcattgcattttgggtcccagtcattggttcttgtctaaaatctttgcttctcatttcccagttatataaggtcttttccttctnccnctctaaaaaggcctggtccttcctggttaagaatgccngaattgag

SEQ ID NO: 9399 - DNA, 571 bp, Homo sapiens
  misc_feature (71)..(71): "n" may be a, t, c, g, other or unknown
  misc_feature (87)..(87): "n" may be a, t, c, g, other or unknown
  misc_feature (142)..(142): "n" may be a, t, c, g, other or unknown
  misc_feature (350)..(350): "n" may be a, t, c, g, other or unknown
  misc_feature (433)..(433): "n" may be a, t, c, g, other or unknown
  misc_feature (436)..(436): "n" may be a, t, c, g, other or unknown
  misc_feature (478)..(478): "n" may be a, t, c, g, other or unknown
  misc_feature (480)..(480): "n" may be a, t, c, g, other or unknown
  misc_feature (483)..(483): "n" may be a, t, c, g, other or unknown
  misc_feature (488)..(488): "n" may be a, t, c, g, other or unknown
  misc_feature (502)..(502): "n" may be a, t, c, g, other or unknown
  misc_feature (537)..(537): "n" may be a, t, c, g, other or unknown
  misc_feature (560)..(560): "n" may be a, t, c, g, other or unknown
cacagtacacagcagttatttatttaaatacttgaaaaggctgatgatggaaaaaataggtttatcatganagtttatattcattanatttattttatcatttaaaaaattactgcctctaggttatcctagcctgatatanaacacttggtgacacatgcagttactgtaatatactataacagacacagccattatagaatgatttacacttgggatgaaattcaacagtagtaagggtgactctttatttaaactaaaaacattggtaatatacaaattttttttttatttcattgaaagggctataaaattcaacatactgacaaggaagcaacataatcacatanataacgcctctgctaattgcttttacctaacttccccttaaaggtgagctgcacactcagctaccaattttctaaactgtgcnatngcttcaaggctggcctaccacaactgactgaaaaaaatttcntnttngtaanctgacactgacttntttttttttaaaaatggaaaaacaatggccaattnttccttatttcctataaaacccnaaggatcttcc

SEQ ID NO: 9400 - DNA, 515 bp, Homo sapiens
  misc_feature (134)..(134): "n" may be a, t, c, g, other or unknown
  misc_feature (371)..(371): "n" may be a, t, c, g, other or unknown
  misc_feature (403)..(403): "n" may be a, t, c, g, other or unknown
  misc_feature (456)..(456): "n" may be a, t, c, g, other or unknown
  misc_feature (465)..(465): "n" may be a, t, c, g, other or unknown
  misc_feature (472)..(472): "n" may be a, t, c, g, other or unknown
  misc_feature (486)..(486): "n" may be a, t, c, g, other or unknown
  misc_feature (497)..(497): "n" may be a, t, c, g, other or unknown
  misc_feature (502)..(502): "n" may be a, t, c, g, other or unknown
  misc_feature (505)..(505): "n" may be a, t, c, g, other or unknown
acatcccaaacaggtctttttatttaacataaggccaaagaagctatcaggcgttgctgaatactgtccactaactgtacaaaatattgactgcatgcctcgcaaacaccaaaatatccgctggaatgccatanaaataaataacttctgctataaacacatgaaaacatatcaaactgttatctctttaaacatattgtaaataaaaaaattaccagtacttctacacaataaatattaagaaaccattgacatagttgaaatgcactcatataaattaacaactttaattacattagccaaacagacattggttaaagaactgcatgttagtatgcaaaacaaaacaaaacaaaacaaaaaacaaagtnaaaaaccacaaaatagaaacaaacaaacaacnacatcaccacagaacataaaaattttaaaataaaacaggctccaaataacctnggcttccanaattatnttttccttttaaanaaaaatttccnccccntgntcaatgcccg

SEQ ID NO: 9401 - DNA, 566 bp, Homo sapiens
  misc_feature (34)..(34): "n" may be a, t, c, g, other or unknown
  misc_feature (112)..(112): "n" may be a, t, c, g, other or unknown
  misc_feature (351)..(351): "n" may be a, t, c, g, other or unknown
  misc_feature (362)..(362): "n" may be a, t, c, g, other or unknown
  misc_feature (427)..(427): "n" may be a, t, c, g, other or unknown
  misc_feature (452)..(452): "n" may be a, t, c, g, other or unknown
  misc_feature (455)..(455): "n" may be a, t, c, g, other or unknown
  misc_feature (458)..(458): "n" may be a, t, c, g, other or unknown
  misc_feature (510)..(511): "n" may be a, t, c, g, other or unknown
  misc_feature (542)..(542): "n" may be a, t, c, g, other or unknown
  misc_feature (566)..(566): "n" may be a, t, c, g, other or unknown
gctttattaggtcacacaaaacagaatgaattancagaaaaatgtatgttataaaacagcatttactacttcaatttaattttttttactaacaattgtggacctttttgangacacttatgtatgtttttaataaattatgtacttattagtacttaatgagcccttcctgcctcaatataaaattactaaacttggagaattacagattttattgtaggccctgatgttagtcactttggagaagctaaaaatttggccaaaatgaatgatccaatgatcctttaagttatctttatatttaatatagtgtgatcctggactacactgatttaaaacatgctttttganaaatgtcttantaatagggcagtaatcttcagtgtgtttcaaacactacttgcaccaaaatccccttaggttgttnggtattggtccccaactaggataanaanacnccgcaaatttgcttaacacaatgctagccctgcccggccctgccccaaaatnncgaattattaatctgatccgaaataagcccnaaaaaggcctttccaaaatttccn

SEQ ID NO: 9402 - DNA, 576 bp, Homo sapiens
  misc_feature (162)..(162): "n" may be a, t, c, g, other or unknown
  misc_feature (339)..(339): "n" may be a, t, c, g, other or unknown
  misc_feature (442)..(442): "n" may be a, t, c, g, other or unknown
  misc_feature (455)..(457): "n" may be a, t, c, g, other or unknown
  misc_feature (486)..(486): "n" may be a, t, c, g, other or unknown
  misc_feature (522)..(522): "n" may be a, t, c, g, other or unknown
  misc_feature (554)..(554): "n" may be a, t, c, g, other or unknown
  misc_feature (569)..(570): "n" may be a, t, c, g, other or unknown
aagtggtggttgttttaagtcgtaagtttggagtcatttgttatacagaaatacattactgtagcatcattacatatacttttctctgtaacctccgttttcctgaaaaggaaaaatgttcttcaaggttctccagggtccactgtagtctggttcctgacnacttctccaggttttccattaaacaggtaaagtctttattgtttattaatatgtctaagtactccatgtctatgatcgtcctcactttatcaaccctgtctgaagtttcaactgcattttcccctctcaattgggccaccatctcttaattttctactcttcaaggtctagcataanaatggcatttattcctaaaacgtctgttctgtcaactctgaatttattcttatggccaagttcgttcgaaaacctccatgccccgtgagaatatttgtgtttngttttgttgtttnnngctgttgttgttttgtttggttttgaaanggaatctcactccgtatccaaactggaatacatggngcaatctctgctcatggcaaccccaactccangggcaaacaaacccnngcctca

SEQ ID NO: 9403 - DNA, 514 bp, Homo sapiens
  misc_feature (65)..(65): "n" may be a, t, c, g, other or unknown
  misc_feature (70)..(70): "n" may be a, t, c, g, other or unknown
  misc_feature (85)..(85): "n" may be a, t, c, g, other or unknown
  misc_feature (103)..(103): "n" may be a, t, c, g, other or unknown
  misc_feature (118)..(118): "n" may be a, t, c, g, other or unknown
  misc_feature (214)..(214): "n" may be a, t, c, g, other or unknown
  misc_feature (245)..(245): "n" may be a, t, c, g, other or unknown
  misc_feature (273)..(273): "n" may be a, t, c, g, other or unknown
  misc_feature (308)..(308): "n" may be a, t, c, g, other or unknown
  misc_feature (389)..(389): "n" may be a, t, c, g, other or unknown
  misc_feature (438)..(438): "n" may be a, t, c, g, other or unknown
  misc_feature (441)..(441): "n" may be a, t, c, g, other or unknown
  misc_feature (446)..(446): "n" may be a, t, c, g, other or unknown
  misc_feature (467)..(467): "n" may be a, t, c, g, other or unknown
  misc_feature (469)..(469): "n" may be a, t, c, g, other or unknown
  misc_feature (477)..(477): "n" may be a, t, c, g, other or unknown
  misc_feature (499)..(499): "n" may be a, t, c, g, other or unknown
ggttcatgttctttattgaacaccttacatgggtatggacagggcctatgggtggggcaaggcancaatnacagcctcagtgaantcatggcaagtaacatanccacccatgtcaaangttcgaacctgtgggggaaaatcatcatcatccatgtggcctgggctccatcctaacaatccccatcaccacccaacagtctgtcccctaaggaanccggcccaaggacaacctaggctctacccancaaggtgaccatggtccactgcttaaangcacaaggtctcttccctggtacactgcactgaanggtatggggaatgtggtccttgcaaggttggaaaaaataaagggctctaactccctttaatctgcaggtgaccgatgacanacttgatgaaatcggttgtggtgctgttaccccccatgtttccaattcnccncctgncaactttgattacctcctccncncatcttcnaaaattcttgaattaaaccccnaaataaaaacccccc

SEQ ID NO: 9404 - DNA, 364 bp, Homo sapiens
  misc_feature (46)..(46): "n" may be a, t, c, g, other or unknown
  misc_feature (123)..(123): "n" may be a, t, c, g, other or unknown
  misc_feature (194)..(194): "n" may be a, t, c, g, other or unknown
  misc_feature (210)..(210): "n" may be a, t, c, g, other or unknown
  misc_feature (212)..(212): "n" may be a, t, c, g, other or unknown
  misc_feature (310)..(310): "n" may be a, t, c, g, other or unknown
  misc_feature (335)..(335): "n" may be a, t, c, g, other or unknown
  misc_feature (337)..(337): "n" may be a, t, c, g, other or unknown
  misc_feature (346)..(346): "n" may be a, t, c, g, other or unknown
  misc_feature (350)..(350): "n" may be a, t, c, g, other or unknown
  misc_feature (359)..(359): "n" may be a, t, c, g, other or unknown
  misc_feature (361)..(361): "n" may be a, t, c, g, other or unknown
atcatatcataatgtctggtgccattccttgcaaccatttaatgtngtttttaaataaataaatgaacattgctcacaaagataagtaactgaaatgccagcagggaccttactgcatctcanaaagtgaagtaaacttcatttccagctccccaattctatcaactgtgagaagctaataaactcctcatganttctggccatccctananacttacatcctcactgactctctgccttcagcttttgtgcatgtgcaagcaggttcttttttttgtgctttattaacccatgttaggaattgtggccnctccactggtttccacacacacacncncaaaatctntgcncagtacccntnggt

SEQ ID NO: 9405 - DNA, 378 bp, Homo sapiens
  misc_feature (165)..(165): "n" may be a, t, c, g, other or unknown
  misc_feature (302)..(302): "n" may be a, t, c, g, other or unknown
  misc_feature (309)..(309): "n" may be a, t, c, g, other or unknown
  misc_feature (312)..(312): "n" may be a, t, c, g, other or unknown
  misc_feature (332)..(332): "n" may be a, t, c, g, other or unknown
  misc_feature (335)..(335): "n" may be a, t, c, g, other or unknown
  misc_feature (338)..(338): "n" may be a, t, c, g, other or unknown
  misc_feature (371)..(371): "n" may be a, t, c, g, other or unknown
ggaagcgaacatttatttactttttttccccacacaattcctaacagttcaattaaaaatgagaggtaaagcactagggctgaacaagttaggaaaattaagcctgaaatagtctaaagataagacatagtctaaacataacagaattcttctaggcttctatanatgctctcactgtatacacttaggcacttattcatctttatctgcaagccccatttctaccaacggcatatgaactggatgctgttcatcgtcatataatgtcactatctgttctggtgctggagccatggacacancataaanttnttttccttgaaaacagtctntcntancccacagtgcctccatgctccatttgggacaanatggtat

SEQ ID NO: 9406 - DNA, 462 bp, Homo sapiens
  misc_feature (144)..(144): "n" may be a, t, c, g, other or unknown
  misc_feature (173)..(173): "n" may be a, t, c, g, other or unknown
  misc_feature (205)..(206): "n" may be a, t, c, g, other or unknown
  misc_feature (249)..(249): "n" may be a, t, c, g, other or unknown
  misc_feature (279)..(279): "n" may be a, t, c, g, other or unknown
  misc_feature (289)..(289): "n" may be a, t, c, g, other or unknown
  misc_feature (297)..(297): "n" may be a, t, c, g, other or unknown
  misc_feature (328)..(328): "n" may be a, t, c, g, other or unknown
  misc_feature (365)..(365): "n" may be a, t, c, g, other or unknown
  misc_feature (382)..(382): "n" may be a, t, c, g, other or unknown
  misc_feature (384)..(384): "n" may be a, t, c, g, other or unknown
  misc_feature (424)..(424): "n" may be a, t, c, g, other or unknown
  misc_feature (427)..(427): "n" may be a, t, c, g, other or unknown
  misc_feature (432)..(432): "n" may be a, t, c, g, other or unknown
  misc_feature (450)..(450): "n" may be a, t, c, g, other or unknown
aaaagaaaaaatgtttattataggcaacaacaccaatgggaactggtatttgtctacaccaagggagtgcaatttttcatcttccaatggcggcctcaaccttgaggcgaatccactggcgaaagatgcctttctaggaagcanagctccctgactgggctaagatagttcanattgatcttaggtcaatggtaagacctatgtnnttcatgaagtcttggcttttcggcgctgggtcgcccaaagcanaatggagacggatagagtggtggctcccanaatcccgaanaacataancatgagaacgaaccctggcgcataccttgtntccatggaaaaccatcacacaaacacactgccaaaanacctggaccatccggtncncaaaatccattctcaggacacatttcctgggtccccattnttnttgcnaaggtccttttgcccttnaaaaatttggtt

SEQ ID NO: 9407 - DNA, 578 bp, Homo sapiens
  misc_feature (35)..(35): "n" may be a, t, c, g, other or unknown
  misc_feature (398)..(398): "n" may be a, t, c, g, other or unknown
  misc_feature (453)..(453): "n" may be a, t, c, g, other or unknown
  misc_feature (482)..(482): "n" may be a, t, c, g, other or unknown
  misc_feature (491)..(491): "n" may be a, t, c, g, other or unknown
  misc_feature (512)..(512): "n" may be a, t, c, g, other or unknown
  misc_feature (544)..(544): "n" may be a, t, c, g, other or unknown
  misc_feature (571)..(572): "n" may be a, t, c, g, other or unknown
  misc_feature (575)..(575): "n" may be a, t, c, g, other or unknown
cagaaagaaagaagtcaaattttatttgtttgtanatgacatgaccttctgtaaagaaaatcacaaagagtcagccaaaatgcaactggaactaacaaacacattcagtttatttgcagaatagaataacagcaccaaaaattagttgaatttccatacattaacaataaataattttaaaagaaaattaaaaaccaattccatttgctaaagaacttaaagtaagaaatatttaggaataaacataaaaagtgaggtttgtaccttgaaatctataaacattgatcaaaatgattaaaaacatgtataaatagatataaatcccatactgattggaaaaatgaatatcgctcaatgattatatactcaattgtgatttagattcggtacaatactcntagaagtctctatacttttggttaaagaaacaaaaaacaggccaggcccagtggntccctcccgttatccccaccctttggganggggaatcnggtggatcttaattccaaaanaaaaaccttcctggctaacccggtgaaacccntcccttctaaaaacccaaaatttcccnngtntgg

SEQ ID NO: 9408 - DNA, 552 bp, Homo sapiens
  misc_feature (292)..(292): "n" may be a, t, c, g, other or unknown
  misc_feature (294)..(294): "n" may be a, t, c, g, other or unknown
  misc_feature (331)..(331): "n" may be a, t, c, g, other or unknown
  misc_feature (357)..(357): "n" may be a, t, c, g, other or unknown
  misc_feature (375)..(375): "n" may be a, t, c, g, other or unknown
  misc_feature (415)..(415): "n" may be a, t, c, g, other or unknown
  misc_feature (418)..(418): "n" may be a, t, c, g, other or unknown
  misc_feature (437)..(437): "n" may be a, t, c, g, other or unknown
  misc_feature (464)..(464): "n" may be a, t, c, g, other or unknown
  misc_feature (479)..(479): "n" may be a, t, c, g, other or unknown
  misc_feature (514)..(514): "n" may be a, t, c, g, other or unknown
  misc_feature (524)..(524): "n" may be a, t, c, g, other or unknown
  misc_feature (530)..(530): "n" may be a, t, c, g, other or unknown
  misc_feature (542)..(542): "n" may be a, t, c, g, other or unknown
  misc_feature (549)..(549): "n" may be a, t, c, g, other or unknown
atattaactttccaaagcatccaaaactttcatgatctgctgttttatggctttagttgcatcccctgcatttggaatcaaatacctttcgattgccaagatttctattcctgaagcactgctatttccatacttgaaggtaatgagttcaggatgtttttttttggatgtaattttaactacagaattcagcgcttgtcgagactgtatataagccaatcctttccgtgaaacaatctcccttaaacagtacatatgtgttgcagtaaccaacagatgactgggaaacatntntccactttcttttacttctttacaagggaaaatgatntttgacatctggtttgtttatccaantctgaatgtttacaaccncttttctatcatcatctgacattgaaagaactgtcaattncanctgtgtcgtatcctcctcnaccccaatgctgaaaacaggctttacnccacggtaagggtgnccactctgtcatggctgctcccatgccgatccacnggaattgaanttttcnctataaactganacttttnccc

SEQ ID NO: 9409 - DNA, 513 bp, Homo sapiens
  misc_feature (441)..(441): "n" may be a, t, c, g, other or unknown
  misc_feature (451)..(451): "n" may be a, t, c, g, other or unknown
  misc_feature (466)..(466): "n" may be a, t, c, g, other or unknown
  misc_feature (473)..(473): "n" may be a, t, c, g, other or unknown
  misc_feature (485)..(485): "n" may be a, t, c, g, other or unknown
  misc_feature (487)..(487): "n" may be a, t, c, g, other or unknown
  misc_feature (489)..(489): "n" may be a, t, c, g, other or unknown
cagtgtttgtcaaatttaataaattatatacaattttagtaatttagagctatcctactatatagtcggtaacattttaatgggatagttatttttatcaaagactattccatgggtttgaatactataaaatttactcaaatacacaattgctcagccatagtttactacttatttacataaatagatattacacatttccatactcagctgaataaaaccttaaggtctaggtataaaggtaaattggatggaatgtaaacattctattacattaaatagattcattaaaatctgttcccagaagttttcaaaactgacaagaaagtaaagagagtgccttatgtcctcaatagcataatcctggagtcacacttctagagctataggatataataatgaatggaaaaaaccctaatattttaggaaaaaaaaataatnggctatttanaacctaataaaaacnttatgtnaataagggaacncnanggtgatggttataaaacccccctc

SEQ ID NO: 9410 - DNA, 572 bp, Homo sapiens
  misc_feature (162)..(162): "n" may be a, t, c, g, other or unknown
  misc_feature (186)..(186): "n" may be a, t, c, g, other or unknown
  misc_feature (252)..(252): "n" may be a, t, c, g, other or unknown
  misc_feature (272)..(272): "n" may be a, t, c, g, other or unknown
  misc_feature (294)..(294): "n" may be a, t, c, g, other or unknown
  misc_feature (338)..(338): "n" may be a, t, c, g, other or unknown
  misc_feature (355)..(355): "n" may be a, t, c, g, other or unknown
  misc_feature (394)..(394): "n" may be a, t, c, g, other or unknown
  misc_feature (424)..(424): "n" may be a, t, c, g, other or unknown
  misc_feature (474)..(474): "n" may be a, t, c, g, other or unknown
  misc_feature (490)..(490): "n" may be a, t, c, g, other or unknown
  misc_feature (499)..(499): "n" may be a, t, c, g, other or unknown
  misc_feature (533)..(533): "n" may be a, t, c, g, other or unknown
  misc_feature (538)..(538): "n" may be a, t, c, g, other or unknown
  misc_feature (558)..(558): "n" may be a, t, c, g, other or unknown
  misc_feature (569)..(569): "n" may be a, t, c, g, other or unknown
attttgtccatattcatatatttatagagctagtatgtcaaaaactttacacagtgacaccattagcccctggcccacccctctccttcccacttctgtgttcgaacctacttagacctcgcacacaaaggttgatcaaaggcagtggccacctcagactantgcaatgccagtcctgcagggganaagcctggcaaggtgagggtgagtctcccacagtccaagacaggtcccagaccttggcccacccancgaggacaaaggggcctcangtctccaaacttaactcatgtnagaacaactgcccaccattgtccctgccatgccaacttatatangcatgaccctggcccancaatgaagcaggctgaagggcatggcgggctcaagcccnaaaactgaaggtggcaagtgcggaataacnctggcgggcatgcttctcacaatacaactcgtcaccaccaaaaattgccncccatctccagttcanccacaatcngcacagtttttcaacccgggtggcgtaccggccncctgnattccccaacctgttcccanactggtattcnctc

SEQ ID NO: 9411 - DNA, 553 bp, Homo sapiens
  misc_feature (368)..(368): "n" may be a, t, c, g, other or unknown
  misc_feature (397)..(397): "n" may be a, t, c, g, other or unknown
  misc_feature (430)..(430): "n" may be a, t, c, g, other or unknown
  misc_feature (480)..(480): "n" may be a, t, c, g, other or unknown
  misc_feature (494)..(494): "n" may be a, t, c, g, other or unknown
  misc_feature (497)..(497): "n" may be a, t, c, g, other or unknown
  misc_feature (513)..(513): "n" may be a, t, c, g, other or unknown
  misc_feature (517)..(517): "n" may be a, t, c, g, other or unknown
  misc_feature (523)..(523): "n" may be a, t, c, g, other or unknown
  misc_feature (552)..(552): "n" may be a, t, c, g, other or unknown
aacttaaaaagttatttattaaacaagttaaacacaactaaaagtatatttagaggtccaagattcaagtatttttgtcaaactttctaatgataaggggaatgataaaaattgaacagatataaaaaatattcttaaacaaatattaaagcacatggaaaattcagaaataaaaacacaccaccatataaagaaatcaaaatatttcatatgtttttaaatgcttatggtatgagagccaaattgtctatttccaggttaataaacaatatataagctcacctttttaaaggtatcatactttgtgtcatatagaaataattttggaaacagtatgtgttgggtgtgtaaattgtccacattaagcnaaacatattttacatatgaatattttcanttatacttactggaaaacaaaccaaaaaacttntaatttaacatcctgaattgaaaataatttggattgaaaatccgccaaantccacatcttaccnccnaatttttttcaaaaanattntccaantttttaaaaaaaattgctcccccatcccnt

SEQ ID NO: 9412 - DNA, 486 bp, Homo sapiens
  misc_feature (108)..(108): "n" may be a, t, c, g, other or unknown
  misc_feature (123)..(123): "n" may be a, t, c, g, other or unknown
  misc_feature (211)..(211): "n" may be a, t, c, g, other or unknown
  misc_feature (292)..(292): "n" may be a, t, c, g, other or unknown
  misc_feature (391)..(391): "n" may be a, t, c, g, other or unknown
  misc_feature (412)..(412): "n" may be a, t, c, g, other or unknown
  misc_feature (423)..(423): "n" may be a, t, c, g, other or unknown
  misc_feature (432)..(432): "n" may be a, t, c, g, other or unknown
  misc_feature (448)..(448): "n" may be a, t, c, g, other or unknown
  misc_feature (463)..(464): "n" may be a, t, c, g, other or unknown
aaaagtttcaaacaagttttatttaaaagtgtaatgacttacatttatttttcatttatatagctttgttaatttagagtaacacattttaaaatttctagtttttanttcctctggttgaanatgggaagcgttgactgaaacaagaaattaagtcttttcggacaacttgaatttccaacttgggcataattattaaaatgcttagtanataacttcaggattgtggctgtggccattaccaaatttgaaagaaaaaagtgacttgaaatgaaagtgcattgcagttccngtaacaaatagatgataaactttatttaagtttaatttatcagaaacttacagaaaagctggagttactataaaaatattttttttcctgaatcaatangttactgcttcactccttgangtatatttctnacaacccanaatattttctacatanatacaccagccctcnnaagttgaagaaaattaacaagg

SEQ ID NO: 9413 - DNA, 588 bp, Homo sapiens
  misc_feature (53)..(53): "n" may be a, t, c, g, other or unknown
  misc_feature (69)..(69): "n" may be a, t, c, g, other or unknown
  misc_feature (222)..(222): "n" may be a, t, c, g, other or unknown
  misc_feature (303)..(303): "n" may be a, t, c, g, other or unknown
  misc_feature (305)..(305): "n" may be a, t, c, g, other or unknown
  misc_feature (308)..(308): "n" may be a, t, c, g, other or unknown
  misc_feature (315)..(315): "n" may be a, t, c, g, other or unknown
  misc_feature (318)..(318): "n" may be a, t, c, g, other or unknown
  misc_feature (407)..(407): "n" may be a, t, c, g, other or unknown
  misc_feature (416)..(416): "n" may be a, t, c, g, other or unknown
  misc_feature (457)..(457): "n" may be a, t, c, g, other or unknown
  misc_feature (467)..(467): "n" may be a, t, c, g, other or unknown
  misc_feature (492)..(492): "n" may be a, t, c, g, other or unknown
  misc_feature (501)..(501): "n" may be a, t, c, g, other or unknown
  misc_feature (506)..(506): "n" may be a, t, c, g, other or unknown
  misc_feature (513)..(513): "n" may be a, t, c, g, other or unknown
  misc_feature (561)..(561): "n" may be a, t, c, g, other or unknown
aggatcaaaaatttattaaaaaccaattatatcaacaggcatcaagtctacanattcaggttacaccanaccatgaagtaaattctgtccccatccacaccatacttgccaggtcttctagactcctgagccatctccctatatcctcatccaaattcccaaattacaggcttaggtttttggtttggttttcaatccaatggaggtgggggcagctatgtnttgatttttggcaccaccctgtggtcatacctaaatattgcaccttctactcaatcccacaaagggaaagaaacatgtttntntanggcccanccnacttcaaatctcagctctacttcccagtaaaactgtgggcaagcccattaactggaagggccgtgaattataaccatgttaaaaatgtnttttcccanaacccaaaaatgggaatgactttttaaaaataaaaaccttnaaaaaagtcntttttcccccttaatattgttgtcntaccttttnccatnaaaattngggaacccccccaaatttcttaaaaggtggcaaaggaacctccaaccnttccaaagaaaccactccaattccctt

SEQ ID NO: 9414 - DNA, 549 bp, Homo sapiens
  misc_feature (35)..(35): "n" may be a, t, c, g, other or unknown
  misc_feature (157)..(157): "n" may be a, t, c, g, other or unknown
  misc_feature (467)..(467): "n" may be a, t, c, g, other or unknown
  misc_feature (495)..(495): "n" may be a, t, c, g, other or unknown
  misc_feature (509)..(509): "n" may be a, t, c, g, other or unknown
  misc_feature (517)..(517): "n" may be a, t, c, g, other or unknown
  misc_feature (525)..(525): "n" may be a, t, c, g, other or unknown
  misc_feature (542)..(542): "n" may be a, t, c, g, other or unknown
  misc_feature (544)..(544): "n" may be a, t, c, g, other or unknown
gagatggagtttgactcttgttgcccaagctggantgcaatggtgtgatctcagctcactgcaacctccacctctaccacctgcctcagcctcccaagtagctgggattacaggtactcgccaccacgcctggataatttttgtatttttagtaaanatggggtttcactatgttggccaggctggtcttgaactcctgacctcaggtgatccacctgccttggcctcccaaagtgctgggacagtgtgagccactgctcctggccaactttttaaagtcttctgtaagtttctgattatactttagaagctttacagttttgcctttcacatttaaatcttcaatccacttggaactgaattttatttaatacttaccatatggatacccaattgtctcaaacatcatttattgaaaaatctccatcttttacaccgatccacatatgttttgttccaaaaatggntaagttcatgttctggccttcccctaanttccctcccatccnaaaattanaacccccnttccttaaaaaacaatntnagttc

SEQ ID NO: 9415 - DNA, 464 bp, Homo sapiens
  misc_feature (146)..(146): "n" may be a, t, c, g, other or unknown
  misc_feature (258)..(258): "n" may be a, t, c, g, other or unknown
  misc_feature (301)..(301): "n" may be a, t, c, g, other or unknown
  misc_feature (303)..(303): "n" may be a, t, c, g, other or unknown
  misc_feature (313)..(313): "n" may be a, t, c, g, other or unknown
  misc_feature (372)..(372): "n" may be a, t, c, g, other or unknown
  misc_feature (377)..(377): "n" may be a, t, c, g, other or unknown
  misc_feature (380)..(380): "n" may be a, t, c, g, other or unknown
  misc_feature (422)..(422): "n" may be a, t, c, g, other or unknown
  misc_feature (428)..(428): "n" may be a, t, c, g, other or unknown
  misc_feature (448)..(448): "n" may be a, t, c, g, other or unknown
  misc_feature (458)..(458): "n" may be a, t, c, g, other or unknown
ccggtagaaagggtttatttatgcgcaacggttcacacaagccttcctgaaattccactttacagtaaataaagctgtgcgtttccccttcccatgcacaactgcgtatcaatctacaactgtcatttaactgtgaaaaaatagancgtctccccttttgtcatcgttctggtaacatttggagtagcatctgacagaacggagctgctcactcctggaccggttatttggttaaaacccaaaatgttaggtcgaaanaatcaatcgtcacccaatacaaataaatattgcgttatgaaananacgggcagantcccacggtatccctttttaaagcggcatttccagcacagcagcgtggcgctcacaganaccancanggcgcagctctgggatgccacatgggacacggctgcaagtanccgtangcaccgtcccgccgcaagcntcctccaccnaacctt

SEQ ID NO: 9416 - DNA, 540 bp, Homo sapiens
  misc_feature (66)..(66): "n" may be a, t, c, g, other or unknown
  misc_feature (134)..(134): "n" may be a, t, c, g, other or unknown
  misc_feature (147)..(147): "n" may be a, t, c, g, other or unknown
  misc_feature (337)..(337): "n" may be a, t, c, g, other or unknown
  misc_feature (404)..(404): "n" may be a, t, c, g, other or unknown
  misc_feature (424)..(424): "n" may be a, t, c, g, other or unknown
  misc_feature (459)..(459): "n" may be a, t, c, g, other or unknown
  misc_feature (461)..(461): "n" may be a, t, c, g, other or unknown
  misc_feature (472)..(472): "n" may be a, t, c, g, other or unknown
  misc_feature (506)..(506): "n" may be a, t, c, g, other or unknown
  misc_feature (518)..(518): "n" may be a, t, c, g, other or unknown
  misc_feature (539)..(540): "n" may be a, t, c, g, other or unknown
gagcatttgcaaaatgttctctatttatatttttaaaaatctgatacatgtaagtttttctggcanattctttttgtatgttacaaaacaaaacatcaaaagctcagagtaagataagaatccctttttcttanaaaggtcaagcanatacttcttgacatcatgtcctttatacaatggcatattgttcatataaaaggtctcttatcctataaaaatcttgacaaaggcagccctctaatccaatgcgtccagtttccgttctgcggactgctacttgattgttgcaaacaagtacacctcctacaaattcagcttgaatcccctcccgtaaganaacttgcttgaagtctgacagccttggttcattcataaaaactgactgatgtccaggaactcatgangtggcaagggtccaaagtangaatgatctcactttctccacctgtttccttttcntncacctccaaanaaactttccatggcctttggttgttgctataacnctaaaatctganggaacttccccttggtccccnn

SEQ ID NO: 9417 - DNA, 587 bp, Homo sapiens
  misc_feature (46)..(46): "n" may be a, t, c, g, other or unknown
  misc_feature (60)..(60): "n" may be a, t, c, g, other or unknown
  misc_feature (98)..(98): "n" may be a, t, c, g, other or unknown
  misc_feature (102)..(102): "n" may be a, t, c, g, other or unknown
  misc_feature (257)..(257): "n" may be a, t, c, g, other or unknown
  misc_feature (436)..(436): "n" may be a, t, c, g, other or unknown
  misc_feature (521)..(521): "n" may be a, t, c, g, other or unknown
  misc_feature (534)..(534): "n" may be a, t, c, g, other or unknown
  misc_feature (536)..(536): "n" may be a, t, c, g, other or unknown
  misc_feature (546)..(546): "n" may be a, t, c, g, other or unknown
  misc_feature (553)..(553): "n" may be a, t, c, g, other or unknown
  misc_feature (561)..(561): "n" may be a, t, c, g, other or unknown
  misc_feature (564)..(564): "n" may be a, t, c, g, other or unknown
gcctcagaagtttatcaataacctcttatatacacatatgttttcncaaaagtggttganaatcattttataccatcctttaaaagaagtccaatggntganaactctataatgagacacagtgggacagaaattatcatgactttcaatgatcttttctttcccctaactttaatatcctttagttggggagagaaagaagtccattttcatctgctgtatctaagattttacagatcactggagattcaaccccnagaatatattgacaggagtgaggctctagcatatatacagtaacagcatgaggtgaatctgattctttgcactttagttttacagtcacctgtcttggtttgtcagttatatcacaaatatctccatttccataaaaatgtgacaccatcctgactgtctgggtaccatcgtcttgaanatgataagctctagcagtattctccttaacccattccatatgctcttcttggttccctgtcccgacaaccacagaaggtttcccnctatccctgtccncntggtattgangttcatntttgcccnacnaaattccttttccccccaccgac

SEQ ID NO: 9418 - DNA, 433 bp, Homo sapiens
  misc_feature (84)..(84): "n" may be a, t, c, g, other or unknown
  misc_feature (128)..(128): "n" may be a, t, c, g, other or unknown
  misc_feature (179)..(179): "n" may be a, t, c, g, other or unknown
  misc_feature (183)..(183): "n" may be a, t, c, g, other or unknown
  misc_feature (212)..(212): "n" may be a, t, c, g, other or unknown
  misc_feature (278)..(278): "n" may be a, t, c, g, other or unknown
  misc_feature (281)..(281): "n" may be a, t, c, g, other or unknown
  misc_feature (287)..(287): "n" may be a, t, c, g, other or unknown
  misc_feature (346)..(346): "n" may be a, t, c, g, other or unknown
  misc_feature (362)..(362): "n" may be a, t, c, g, other or unknown
  misc_feature (374)..(375): "n" may be a, t, c, g, other or unknown
  misc_feature (391)..(391): "n" may be a, t, c, g, other or unknown
  misc_feature (423)..(423): "n" may be a, t, c, g, other or unknown
  misc_feature (426)..(426): "n" may be a, t, c, g, other or unknown
aagaactcgggttttatacaatagaatgttttctagcagatgcctcttgttttaatatattaaaattttgcaaagccctttganctactgccttagtctacccactgtccttttgttatgaggtaaangatctcatgacaccatacacacaaacccatcattgcctgtgaatgcacgtngggncagaattccccagttcccgctcctctganggttgatactgctgggaatgccaaccactccacaagcagagggaagccccctcaggcctgcagganganccgcancagtgtgtccaattcaaaccagcagcaaagaacctgacattttcccatccatctatgangaaagccatctcacanaacatggacatnngcaacttgctctcccncaccaagggatgggaatctctcctacctatantcntccctgc

SEQ ID NO: 9419 - DNA, 591 bp, Homo sapiens
  misc_feature (12)..(12): "n" may be a, t, c, g, other or unknown
  misc_feature (179)..(179): "n" may be a, t, c, g, other or unknown
  misc_feature (244)..(244): "n" may be a, t, c, g, other or unknown
  misc_feature (265)..(265): "n" may be a, t, c, g, other or unknown
  misc_feature (277)..(277): "n" may be a, t, c, g, other or unknown
  misc_feature (311)..(311): "n" may be a, t, c, g, other or unknown
  misc_feature (337)..(337): "n" may be a, t, c, g, other or unknown
  misc_feature (360)..(360): "n" may be a, t, c, g, other or unknown
  misc_feature (453)..(453): "n" may be a, t, c, g, other or unknown
  misc_feature (465)..(465): "n" may be a, t, c, g, other or unknown
  misc_feature (494)..(494): "n" may be a, t, c, g, other or unknown
  misc_feature (501)..(501): "n" may be a, t, c, g, other or unknown
  misc_feature (533)..(533): "n" may be a, t, c, g, other or unknown
  misc_feature (551)..(551): "n" may be a, t, c, g, other or unknown
  misc_feature (557)..(557): "n" may be a, t, c, g, other or unknown
  misc_feature (573)..(573): "n" may be a, t, c, g, other or unknown
  misc_feature (575)..(575): "n" may be a, t, c, g, other or unknown
gtttttcttttnatttttattttaaattctggggtacatgtgcaggcttgttacatgaatatattgtgtgctgctgaagtttggacttctaacgaacccatcacccaaatagggaacatagtattcaataggtagctttttaacccctgcccctcttcctccttgccccccttttggantcctcagtgtttatttctccagtctttatgtccaagtgcacacttattttaaacctagtttccanaccttgtggttgtcccatcanatgggtatgaangtaccatggaacccataaggcatctgcacaggtncctctgctcggcccagctcttcaaanttcttggcatccaaaactaaganaaaattgctttcattctggttgggagtgatcaccacacaaaagaataacccaccatcttcttcattggttcctgggtgctggaacaaaaacangttctgaagganaaaaccacttctctccaaaccacatcaancttgatnaaaaaatcccccctaaatgcccaaaaccccanccctaaaaaaaataaacnttttgnccctgaatccatcctntnaattgaagaaatccat

SEQ ID NO: 9420 - DNA, 444 bp, Homo sapiens
  misc_feature (164)..(164): "n" may be a, t, c, g, other or unknown
  misc_feature (357)..(357): "n" may be a, t, c, g, other or unknown
  misc_feature (366)..(366): "n" may be a, t, c, g, other or unknown
  misc_feature (380)..(380): "n" may be a, t, c, g, other or unknown
  misc_feature (391)..(391): "n" may be a, t, c, g, other or unknown
  misc_feature (396)..(396): "n" may be a, t, c, g, other or unknown
  misc_feature (417)..(417): "n" may be a, t, c, g, other or unknown
  misc_feature (438)..(438): "n" may be a, t, c, g, other or unknown
gagatggagtctcgctctgtctcgcaggctggagtgcagtggcgcgatctcagctcattgcaacctccacgtgccaggttcagtgattctcctctttattttcttgaaggtgccaagctcgctcctgtctcgggcattttgttcgtgctgttctctcattccanaacctccttcccttgctcctcttacagccggtctctcatcttcccactttcaacggaggtagcacatcctcgcaagagtttcctccgatgccccaggccaaggtattctccatcacctcatcctgctcttggcctgggtcaccgttggtcataaaaattatgcaaaaatgttcatttgttcatgaactgcgtntttcttaantcctttgtgggganaatccagggtnaatcnctccccaccatgttggaacanaattaaataaaaaaatattcnctggaa

SEQ ID NO: 9421 - DNA, 433 bp, Homo sapiens
  misc_feature (1)..(433): "n" may be a, t, c, g, other or unknown
nnnnnnnnnnnnnnnnnnnnnnnnnnnnnnnnnnnnnnnnnnnnnnnnnnnnnnnnnnnnnnnnnnnnnnnnnnnnnnnnnnnnnnnnnnnnnnnnnnnnnnnnnnnnnnnnnnnnnnnnnnnnnnnnnnnnnnnnnnnnnnnnnnnnnnnnnnnnnnnnnnnnnnnnnnnnnnnnnnnnnnnnnnnnnnnnnnnnnnnnnnnnnnnnnnnnnnnnnnnnnnnnnnnnnnnnnnnnnnnnnnnnnnnnnnnnnnnnnnnnnnnnnnnnnnnnnnnnnnnnnnnnnnnnnnnnnnnnnnnnnnnnnnnnnnnnnnnnnnnnnnnnnnnnnnnnnnnnnnnnnnnnnnnnnnnnnnnnnnnnnnnnnnnnnnnnnnnnnnnnnnnnnnnnnnnnnnnnnnnnnnnnnnnnnnnnnnnnnnnnnnnnnnnnnnnnn

SEQ ID NO: 9422 - DNA, 459 bp, Homo sapiens
  misc_feature (112)..(112): "n" may be a, t, c, g, other or unknown
  misc_feature (199)..(199): "n" may be a, t, c, g, other or unknown
  misc_feature (246)..(246): "n" may be a, t, c, g, other or unknown
  misc_feature (295)..(295): "n" may be a, t, c, g, other or unknown
  misc_feature (302)..(302): "n" may be a, t, c, g, other or unknown
  misc_feature (345)..(345): "n" may be a, t, c, g, other or unknown
  misc_feature (373)..(373): "n" may be a, t, c, g, other or unknown
  misc_feature (380)..(380): "n" may be a, t, c, g, other or unknown
  misc_feature (387)..(387): "n" may be a, t, c, g, other or unknown
  misc_feature (434)..(434): "n" may be a, t, c, g, other or unknown
  misc_feature (437)..(437): "n" may be a, t, c, g, other or unknown
  misc_feature (441)..(441): "n" may be a, t, c, g, other or unknown
  misc_feature (451)..(451): "n" may be a, t, c, g, other or unknown
ccatttttctttgcttattttcttcatgtttatctgagtacatggaccagaacattcactgtattatcatgaataattcagcatcttacaagtcactctccaagcaggacanattaaggcagcccggtgtggacataatcacatctatggctacaaggaacacgcaacagaaaatcagattccaaccaagcaaaaggcngcttgtttttttttttctttgaaacacagtctcgctctgtcacccangctggagtgtggtacgcgatttcagctcactgcaacctccgcctcccangttcaantgattctccccctcacctcccaaatactgggaacacaggtgcncaccaccacacctggctaattttttgtntttttantaaaaanagggtttccccttgttggccaagctggtctccaaatattgaaccccnggntatntgcccccctnggcccccc

SEQ ID NO: 9423 - DNA, 599 bp, Homo sapiens
  misc_feature (76)..(76): "n" may be a, t, c, g, other or unknown
  misc_feature (88)..(88): "n" may be a, t, c, g, other or unknown
  misc_feature (128)..(128): "n" may be a, t, c, g, other or unknown
  misc_feature (460)..(460): "n" may be a, t, c, g, other or unknown
  misc_feature (462)..(462): "n" may be a, t, c, g, other or unknown
  misc_feature (493)..(493): "n" may be a, t, c, g, other or unknown
  misc_feature (510)..(511): "n" may be a, t, c, g, other or unknown
  misc_feature (545)..(545): "n" may be a, t, c, g, other or unknown
  misc_feature (552)..(552): "n" may be a, t, c, g, other or unknown
  misc_feature (562)..(562): "n" may be a, t, c, g, other or unknown
ccgtctaacattccctttattgcttacgtccatattccaatgaatacaataaactcctttttaaaaaagtaagggncatgaaaagccntttgtgttagttccatgttattttaaaattcctattgggntaataaaagcatttgcactatagaaccagagacatctagaaaagcacatgatagatttttttgcaagcagaatgcctgaaacattacatttacctcatggcacaatgagacagtcaccaaatccaatgtctgcattagaacgatacagctactattacagttgcaaaaccattaatcagcttatccacatatgtacagctgggtccccacgtgacaaaatctaaaggaagaacagcatctaactgcacctgtgctccattccctcacagataagaactgtgacattttggctctttccatgttgtgctgctcttcccaaaaagccagggtcntncaatactgaaaaacatggacaggtctgttcnttcaaaacctgaatccnnccgcccgatccgtgtctaacgttcgaaaatttcntccaccnctgcccggangaaacccccctgaataaattctccaaagggaactgcc

SEQ ID NO: 9424 - DNA, 495 bp, Homo sapiens
  misc_feature (36)..(36): "n" may be a, t, c, g, other or unknown
  misc_feature (101)..(101): "n" may be a, t, c, g, other or unknown
  misc_feature (125)..(125): "n" may be a, t, c, g, other or unknown
  misc_feature (358)..(358): "n" may be a, t, c, g, other or unknown
  misc_feature (398)..(398): "n" may be a, t, c, g, other or unknown
  misc_feature (443)..(443): "n" may be a, t, c, g, other or unknown
  misc_feature (456)..(456): "n" may be a, t, c, g, other or unknown
  misc_feature (465)..(467): "n" may be a, t, c, g, other or unknown
  misc_feature (473)..(473): "n" may be a, t, c, g, other or unknown
gtagagacagagtctatgttgaccaggctggtctanaactcctgggcctcaagcaatcctcctgccttggtctccaaatggagagtatattattaaacccnaaagagtgaaatggagagtcaggntaaacacagtgtaattacaagccacactactataccacaggcatcattactctgcttttcctaagccctactttcgtaaaattgtgtatactaaatatctttgtttatctgacaaagaacaggaagaaagaattcatacattggcactaccattaattgcctacagtttctttcactattttacctaccagatattaggatgtatgacacaaatgtaggatgtctaacagaanaacaatgcaatattgcaacatacagttaagtactcactcnacgttatcaataagttcttggaaattgcactttaagcccaagatngataacgaaaccntttttaccnnnggctanttgataaaacaagaatttaatt

SEQ ID NO: 9425 - DNA, 581 bp, Homo sapiens
  misc_feature (104)..(104): "n" may be a, t, c, g, other or unknown
  misc_feature (106)..(106): "n" may be a, t, c, g, other or unknown
  misc_feature (118)..(118): "n" may be a, t, c, g, other or unknown
  misc_feature (356)..(356): "n" may be a, t, c, g, other or unknown
  misc_feature (372)..(372): "n" may be a, t, c, g, other or unknown
  misc_feature (492)..(492): "n" may be a, t, c, g, other or unknown
  misc_feature (527)..(527): "n" may be a, t, c, g, other or unknown
  misc_feature (539)..(539): "n" may be a, t, c, g, other or unknown
  misc_feature (570)..(570): "n" may be a, t, c, g, other or unknown
aatggctagaactgtcttaatttctggaataagttttttgtagtaaccaaaagtggcggcaaagttacatcggaacaagggattcttaaaggactgcactgcanangaaagtacagangttaggagtgttttacactgtatgactggagacccagtaaggaaaaaataaaaccatttcacgtttatacccagatttaagattcctcagtaaaccagttgtactacttttccattcttatctctcaacacattcctgaaatcctggcactccatcatactttactagcccaaccagtctaactcaaagattcccccaacttgcgtattaacatttcaatggctttgttctcaactanaatgttcttcccttangtctatctgaagtctatgtttaaaggaacaattctaatgtccatcttcctccaaattttctctcatcacaagtacaaaaatagtctctcagggtaaatttaaaaacctgcatttacctcntcaagcacataaaaccttcttgtgaccttttgaanaagcgcatttancctttaaatgatcttgtcttgcccaaaaagnaccccccctaa

SEQ ID NO: 9426 - DNA, 530 bp, Homo sapiens
  misc_feature (15)..(15): "n" may be a, t, c, g, other or unknown
  misc_feature (39)..(39): "n" may be a, t, c, g, other or unknown
  misc_feature (46)..(46): "n" may be a, t, c, g, other or unknown
  misc_feature (51)..(51): "n" may be a, t, c, g, other or unknown
  misc_feature (66)..(66): "n" may be a, t, c, g, other or unknown
  misc_feature (81)..(81): "n" may be a, t, c, g, other or unknown
  misc_feature (120)..(120): "n" may be a, t, c, g, other or unknown
  misc_feature (185)..(185): "n" may be a, t, c, g, other or unknown
  misc_feature (339)..(339): "n" may be a, t, c, g, other or unknown
  misc_feature (348)..(348): "n" may be a, t, c, g, other or unknown
  misc_feature (363)..(363): "n" may be a, t, c, g, other or unknown
  misc_feature (365)..(365): "n" may be a, t, c, g, other or unknown
  misc_feature (439)..(439): "n" may be a, t, c, g, other or unknown
  misc_feature (446)..(446): "n" may be a, t, c, g, other or unknown
  misc_feature (448)..(448): "n" may be a, t, c, g, other or unknown
  misc_feature (487)..(487): "n" may be a, t, c, g, other or unknown
  misc_feature (490)..(490): "n" may be a, t, c, g, other or unknown
  misc_feature (503)..(503): "n" may be a, t, c, g, other or unknown
  misc_feature (514)..(514): "n" may be a, t, c, g, other or unknown
gaaatggaatctggntctgtctcttgctctgtctcccangctggantacantggcgcgaactgggntcactgcaagctccncctcccggggtcatgccattctcctgcctcaacctcccnaataactgggaatacaggtgcctgccaccatgcctgggctaatttcttgtatttttttagtaaanactgggtttcaccgtgttagccaggatgctctcgatctcctgacctcgtgatccacctgcctcagcctcccaaaatgctgggattacaggcatgagccactgcacctggcccactccactttttcttaatggggacacttcctctgaacaacanggacaaatntgggaatggcacaananaatccccatactcctattagttcttatttgaatgggcctggtgaaatggaaaaataatgggctctgttactaancactgtntnactttggacaagtccttaacctctctaagcccgttttcnccnctgttaaatggantcatccctgtncccctctcataaccct

SEQ ID NO: 9427 - DNA, 547 bp, Homo sapiens
  misc_feature (51)..(51): "n" may be a, t, c, g, other or unknown
  misc_feature (53)..(53): "n" may be a, t, c, g, other or unknown
  misc_feature (60)..(60): "n" may be a, t, c, g, other or unknown
  misc_feature (83)..(83): "n" may be a, t, c, g, other or unknown
  misc_feature (94)..(94): "n" may be a, t, c, g, other or unknown
  misc_feature (118)..(118): "n" may be a, t, c, g, other or unknown
  misc_feature (121)..(121): "n" may be a, t, c, g, other or unknown
  misc_feature (274)..(274): "n" may be a, t, c, g, other or unknown
  misc_feature (332)..(332): "n" may be a, t, c, g, other or unknown
  misc_feature (391)..(391): "n" may be a, t, c, g, other or unknown
  misc_feature (397)..(397): "n" may be a, t, c, g, other or unknown
  misc_feature (406)..(406): "n" may be a, t, c, g, other or unknown
  misc_feature (425)..(425): "n" may be a, t, c, g, other or unknown
  misc_feature (457)..(457): "n" may be a, t, c, g, other or unknown
  misc_feature (460)..(460): "n" may be a, t, c, g, other or unknown
  misc_feature (476)..(476): "n" may be a, t, c, g, other or unknown
  misc_feature (492)..(492): "n" may be a, t, c, g, other or unknown
  misc_feature (514)..(514): "n" may be a, t, c, g, other or unknown
  misc_feature (522)..(522): "n" may be a, t, c, g, other or unknown
  misc_feature (538)..(538): "n" may be a, t, c, g, other or unknown
gaaaaaataaaatttactgtttatttctttgttacacaaagggggtccaananatcttantccatctcctatgtccttttggncataattacancacaataatggcaagctagattangantctagctcagggtcaagtttttccactttaatgactatctctgggagctaaagcggcagcaccagcttgttggttctctgcctctgactccgacaacacttcttccctttatttttacaggcttattactggcctcctcctcttcatctgaanactcatcgagctcccattcatcatctatgtccatttcaaatactctcacatgacgaanatttgagcttaactaaaaaagaaaagccataaaagcatttttaaattaatggcttatcntatatnaagaattanaaatcagaagtctgaatcnaagaatggttttataggaaagttatattcccntcnatttacaacaaaatcnataaattcccccctcnttttgttttaaaaaattccccnttaccacngttggcatttcctganaattaaatc

SEQ ID NO: 9428 - DNA, 416 bp, Homo sapiens
  misc_feature (59)..(59): "n" may be a, t, c, g, other or unknown
  misc_feature (61)..(61): "n" may be a, t, c, g, other or unknown
  misc_feature (81)..(81): "n" may be a, t, c, g, other or unknown
  misc_feature (107)..(107): "n" may be a, t, c, g, other or unknown
  misc_feature (170)..(170): "n" may be a, t, c, g, other or unknown
  misc_feature (175)..(175): "n" may be a, t, c, g, other or unknown
  misc_feature (205)..(205): "n" may be a, t, c, g, other or unknown
  misc_feature (212)..(212): "n" may be a, t, c, g, other or unknown
  misc_feature (215)..(215): "n" may be a, t, c, g, other or unknown
  misc_feature (223)..(223): "n" may be a, t, c, g, other or unknown
  misc_feature (237)..(237): "n" may be a, t, c, g, other or unknown
  misc_feature (283)..(283): "n" may be a, t, c, g, other or unknown
  misc_feature (311)..(311): "n" may be a, t, c, g, other or unknown
  misc_feature (353)..(353): "n" may be a, t, c, g, other or unknown
  misc_feature (392)..(393): "n" may be a, t, c, g, other or unknown
  misc_feature (395)..(395): "n" may be a, t, c, g, other or unknown
  misc_feature (401)..(401): "n" may be a, t, c, g, other or unknown
  misc_feature (406)..(406): "n" may be a, t, c, g, other or unknown
  misc_feature (416)..(416): "n" may be a, t, c, g, other or unknown
acaattgtaaaaaaattttttataacaaggatggactgattttcatatttccaaatcanantcaactgtacatttacacanaattgtctttgcatgaagcccaaganggaacagcataaaaatgagtgtttctgtagcccctttatttttgctgatcaacagtttgttanaaaancagctgcaggtatgttacctaaggtctganacagtanaanaatcagangtgtcatgaattcncctgtaaacaaccttatgcctgaacatcagctaattctggaggaantggagtcttaggatgcttgctctcaaantgctgcttgaaagtcttaaggtctggcatttgtgtcctacanacagtgcaggtatatattaaggcagctttggcagcaccnntnggtcangtccntgtttccccn

SEQ ID NO: 9429 - DNA, 587 bp, Homo sapiens
  misc_feature (85)..(85): "n" may be a, t, c, g, other or unknown
  misc_feature (100)..(100): "n" may be a, t, c, g, other or unknown
  misc_feature (322)..(322): "n" may be a, t, c, g, other or unknown
  misc_feature (348)..(348): "n" may be a, t, c, g, other or unknown
  misc_feature (391)..(391): "n" may be a, t, c, g, other or unknown
  misc_feature (447)..(447): "n" may be a, t, c, g, other or unknown
  misc_feature (481)..(481): "n" may be a, t, c, g, other or unknown
  misc_feature (483)..(483): "n" may be a, t, c, g, other or unknown
  misc_feature (506)..(506): "n" may be a, t, c, g, other or unknown
  misc_feature (562)..(563): "n" may be a, t, c, g, other or unknown
  misc_feature (586)..(586): "n" may be a, t, c, g, other or unknown
gattgcactgttatatctgttttattggtagtctgaagtctgtgaggctttccatttgaaacccctattttcaggggcttatgancaggcagttgaaaanaacttaaccagcaaaaacttggcattcatgatcttggttcagtataaggtacttgctttaacaaattttaagtagtcaggtcttttttaaagttgtaaggagcacaaagaggaataaaggaatttctttggttaaacagatagggaatatttttccagccaacttatcccaattggatttatatagcaaactttcttcttccagaaattttttaagtatgtncattcctatgttccagttgccacaanatcttgcctcaagattttccttttcctttgctgtagtttatancaaataccctctgcctctgctctttttcttcctatttatgctttttaaattcttcntaatgtaatatatttacactaaaaatgggtgttngntttcctttggcttttttcccccncctacagtaccatttgaaatttacctattggtgaaaaacatattactttgaaaaanntttttaattaccttgattgcttna

SEQ ID NO: 9430 - DNA, 384 bp, Homo sapiens
  misc_feature (112)..(113): "n" may be a, t, c, g, other or unknown
  misc_feature (129)..(129): "n" may be a, t, c, g, other or unknown
  misc_feature (172)..(172): "n" may be a, t, c, g, other or unknown
  misc_feature (302)..(302): "n" may be a, t, c, g, other or unknown
  misc_feature (325)..(325): "n" may be a, t, c, g, other or unknown
  misc_feature (327)..(327): "n" may be a, t, c, g, other or unknown
  misc_feature (333)..(333): "n" may be a, t, c, g, other or unknown
  misc_feature (352)..(352): "n" may be a, t, c, g, other or unknown
  misc_feature (381)..(381): "n" may be a, t, c, g, other or unknown
  misc_feature (383)..(383): "n" may be a, t, c, g, other or unknown
gtctagaaacaaagaacaggctttatttttgttattttgaatacaggtattgtattgtagacatctgttagtctcataattcagtatggccaacacacagaaattaaaagtnnaaacaaaatgagggcncacttgctcctgtccttggcttggcccctccaacctccaaaanaactgtcctccccattgtcatatcctttccctgctacgaaagacaaaacaaaatgatgcccccaagaaaagtcccagaggctctctcccagcagtcagtgggatgaagcaagacactgttaccttgggtnggatggagaaaccaccaggtccntnccacanaagccacagtgggatgganaacccctggtccataccaccgaaggcacntnt

SEQ ID NO: 9431 - DNA, 470 bp, Homo sapiens
  misc_feature (250)..(250): "n" may be a, t, c, g, other or unknown
  misc_feature (391)..(391): "n" may be a, t, c, g, other or unknown
  misc_feature (405)..(405): "n" may be a, t, c, g, other or unknown
  misc_feature (411)..(411): "n" may be a, t, c, g, other or unknown
  misc_feature (430)..(430): "n" may be a, t, c, g, other or unknown
  misc_feature (446)..(446): "n" may be a, t, c, g, other or unknown
  misc_feature (449)..(449): "n" may be a, t, c, g, other or unknown
  misc_feature (461)..(461): "n" may be a, t, c, g, other or unknown
atgttcaaaatagtttttaatcataagctttatatacaaattgctgtacagtcatcttaataaagtgaaatagtgagtgaaaagtacaaaacacaaagcccccacgttccccttggtgaagtatcaaaggatcactcacagcccagaagccccaaattagtgacaaggtaagtggacaagtctgtgaaacaggctaaggcaagtgctgtaaactggctattaaaggcgaacaggctccactgcagaccanaagcctgagttcctactgcccaaactggttctgtggaagaattaaatgaaatgaatattgatgggccagaaccttctagtagacctgcgaactcataaaaatggtatatattatgctaaaaatagtttagcagtagtgtanctcagtctctcccncccccnattaagttttgacaatacnccaattcctaaacatnaanctgttttaaacnttaattaac

SEQ ID NO: 9432 - DNA, 576 bp, Homo sapiens; identical to SEQ ID NO: 7622
  misc_feature (1)..(576): "n" may be a, t, c, g, other or unknown

SEQ ID NO: 9433 - DNA, 592 bp, Homo sapiens
  misc_feature (51)..(51): "n" may be a, t, c, g, other or unknown
  misc_feature (416)..(416): "n" may be a, t, c, g, other or unknown
  misc_feature (451)..(451): "n" may be a, t, c, g, other or unknown
  misc_feature (569)..(569): "n" may be a, t, c, g, other or unknown
aaaaaaataatttcaacttttattttagattctaagggtacatgtgcagantgcaggttgttacatgggtatattgtgtgatactgaggtttgtggtatgaatgatcccatcatccaggttgtgagcatagtacccaatacatagtctttcagcccttgccctccccgctcccctcgctccccccgccgcagtcctcagtgtctatcgttcccatctttatgtccttgtgtacccacagcaccattctttttgaagcctgatttactttatatcaattgaacttcagcagccacactgcagcctatggctgtgtggtatgaggggaaaatcacactgattgattacatgcgattccagttctggtaccttccttttgcacctcaaaaagttataagaagaatcaaaactgtgggantctgccaacatatgctggtattcatgtctaatctnggttagatcaactactactgtctccctttattccgctttataaattaccgcatccgttctgaaccaaatctaatgttttcacccttatacaccccttaaaaaagcaaggttggtgtcntaaaccaaccctggtttcccatt

SEQ ID NO: 9434 - DNA, 438 bp, Homo sapiens
  misc_feature (109)..(109): "n" may be a, t, c, g, other or unknown
  misc_feature (111)..(111): "n" may be a, t, c, g, other or unknown
  misc_feature (359)..(359): "n" may be a, t, c, g, other or unknown
  misc_feature (383)..(383): "n" may be a, t, c, g, other or unknown
  misc_feature (390)..(390): "n" may be a, t, c, g, other or unknown
  misc_feature (402)..(402): "n" may be a, t, c, g, other or unknown
  misc_feature (404)..(404): "n" may be a, t, c, g, other or unknown
  misc_feature (413)..(413): "n" may be a, t, c, g, other or unknown
  misc_feature (436)..(436): "n" may be a, t, c, g, other or unknown
ggctgagtagctgattgcaggttataagaaaagttctttgatcttccactgttctcaaggagatgtatacactgtaggttgctcactgagttgagacgcagcacagaanangcttttacagatcttgtaggatgatgtattttcccttcgtgagaacaaccatagatttgcttaagcactgagtgcttggtggactttgtgcctgaggtgcccttggatggactcttgggggccttgcttactgcagtggtttgggggaattttagttccagttccttcctccaaacctggaggagcaatgctgtaaactcttgcctccatctgtccacatctccagctccaagctgcttcatatgccnaaggtgggacaggtgcttcctganctggtancttccccaggcncnctgggaatnactgctgctgccttgttcctttngg

SEQ ID NO: 9435 - DNA, 350 bp, Homo sapiens
  misc_feature (17)..(17): "n" may be a, t, c, g, other or unknown
  misc_feature (169)..(169): "n" may be a, t, c, g, other or unknown
  misc_feature (204)..(204): "n" may be a, t, c, g, other or unknown
  misc_feature (213)..(213): "n" may be a, t, c, g, other or unknown
  misc_feature (275)..(275): "n" may be a, t, c, g, other or unknown
  misc_feature (277)..(277): "n" may be a, t, c, g, other or unknown
  misc_feature (304)..(305): "n" may be a, t, c, g, other or unknown
  misc_feature (311)..(311): "n" may be a, t, c, g, other or unknown
  misc_feature (325)..(325): "n" may be a, t, c, g, other or unknown
  misc_feature (336)..(336): "n" may be a, t, c, g, other or unknown
gtttttgctttccccanaatataacatggagtgtttttccagaaatcttaaaatagagggattaggctttttgtttgtaagtaagtttttggaaaaaaattatattctaccctagctcctaactatcccaaaataaacccaaaggcttttgctttcacggttaaaaaanatttatacgttttcttcaaatgtcaaaaatgaaanggtccctcnggacagcaatatcccccctagttcaacacccacctttgggaagggaaaaaaaggtggggganangcaactacaactgacccaaatccccannccctangtggctttgtatantaaaaatctcnattcaaatacaaca

SEQ ID NO: 9436 - DNA, 485 bp, Homo sapiens
  misc_feature (55)..(55): "n" may be a, t, c, g, other or unknown
  misc_feature (89)..(89): "n" may be a, t, c, g, other or unknown
  misc_feature (95)..(95): "n" may be a, t, c, g, other or unknown
  misc_feature (136)..(136): "n" may be a, t, c, g, other or unknown
  misc_feature (141)..(141): "n" may be a, t, c, g, other or unknown
  misc_feature (150)..(150): "n" may be a, t, c, g, other or unknown
  misc_feature (163)..(163): "n" may be a, t, c, g, other or unknown
  misc_feature (201)..(201): "n" may be a, t, c, g, other or unknown
  misc_feature (204)..(204): "n" may be a, t, c, g, other or unknown
  misc_feature (231)..(231): "n" may be a, t, c, g, other or unknown
  misc_feature (256)..(256): "n" may be a, t, c, g, other or unknown
  misc_feature (311)..(311): "n" may be a, t, c, g, other or unknown
  misc_feature (330)..(330): "n" may be a, t, c, g, other or unknown
  misc_feature (396)..(396): "n" may be a, t, c, g, other or unknown
  misc_feature (404)..(404): "n" may be a, t, c, g, other or unknown
  misc_feature (406)..(406): "n" may be a, t, c, g, other or unknown
  misc_feature (421)..(421): "n" may be a, t, c, g, other or unknown
  misc_feature (456)..(456): "n" may be a, t, c, g, other or unknown
  misc_feature (459)..(459): "n" may be a, t, c, g, other or unknown
  misc_feature (470)..(470): "n" may be a, t, c, g, other or unknown
atgtttggaaaaaaggtcaggggacaccttgcctctagtggacaagggccctganctttacacagccctccatatttattaggcaaaanaaatantgagaaggggtgtggaaaaaaaagtcagctgctcggtccanaatangcttgcaanactgcattcctcnaacaataggctctaaatgtcccagtaaataacctcaanganccggggccagggaacgatggccctcancaaaccttctgggcaggcacagaancgagtttgcccacattctgtattcatgataaacagtttgctgtttgatcatgtancctccactggaatgctganttggtcaccatccctttggcctttttggctcccaacatttcccccttcttgtttatgtattaaatnaaaaaatntnaggccaagctgggtnctttcattctcccattggcagtccatccgattttnccnactatgaacgnaaaaacgaaaactaa

SEQ ID NO: 9437 - DNA, 597 bp, Homo sapiens
  misc_feature (1)..(597): "n" may be a, t, c, g, other or unknown
nnnnnnnnnnnnnnnnnnnnnnnnnnnnnnnnnnnnnnnnnnnnnnnnnnnnnnnnnnnnnnnnnnnnnnnnnnnnnnnnnnnnnnnnnnnnnnnnnnnnnnnnnnnnnnnnnnnnnnnnnnnnnnnnnnnnnnnnnnnnnnnnnnnnnnnnnnnnnnnnnnnnnnnnnnnnnnnnnnnnnnnnnnnnnnnnnnnnnnnnnnnnnnnnnnnnnnnnnnnnnnnnnnnnnnnnnnnnnnnnnnnnnnnnnnnnnnnnnnnnnnnnnnnnnnnnnnnnnnnnnnnnnnnnnnnnnnnnnnnnnnnnnnnnnnnnnnnnnnnnnnnnnnnnnnnnnnnnnnnnnnnnnnnnnnnnnnnnnnnnnnnnnnnnnnnnnnnnnnnnnnnnnnnnnnnnnnnnnnnnnnnnnnnnnnnnnnnnnnnnnnnnnnnnnnnnnnnnnnnnnnnnnnnnnnnnnnnnnnnnnnnnnnnnnnnnnnnnnnnnnnnnnnnnnnnnnnnnnnnnnnnnnnnnnnnnnnnnnnnnnnnnnnnnnnnnnnnnnnnnnnnnnnnnnnnnnnnnnnnnnnnnnnnnnnnnnnnnnnnnnnnnnnnnnnnnnnnnn

SEQ ID NO: 9438 - DNA, 431 bp, Homo sapiens
  misc_feature (312)..(312): "n" may be a, t, c, g, other or unknown
  misc_feature (373)..(373): "n" may be a, t, c, g, other or unknown
  misc_feature (380)..(380): "n" may be a, t, c, g, other or unknown
  misc_feature (389)..(389): "n" may be a, t, c, g, other or unknown
  misc_feature (392)..(392): "n" may be a, t, c, g, other or unknown
  misc_feature (394)..(394): "n" may be a, t, c, g, other or unknown
  misc_feature (405)..(405): "n" may be a, t, c, g, other or unknown
  misc_feature (412)..(412): "n" may be a, t, c, g, other or unknown
aattaagtagacttttattgctcaatcaacttcagtaacatctccaaaaaaatagttttcatctaacaattatgaaacaaatttgaaaggcaggatgattcacaatatagacccagtagaggcttatacttcatataaatgaaaaatatcagttctacaatttaaatgtttactttggattttattatagaagaaaatatcattgtaattataaaagccataaaaattggaactgtattgtgaaattacatcaaggtatcagattttatataaatgaacaataaaattcaatttttatttatttaaacgtanttaaacattggaagacaatctcccccatggggaagaaaaaaaaaaaaaaccttgaataatnaagcccnaaagccccnacncnaaaactaatcngtgtgcnaaaatctgattaaaaaaac

SEQ ID NO: 9439 - DNA, 586 bp, Homo sapiens
  misc_feature (465)..(465): "n" may be a, t, c, g, other or unknown
  misc_feature (534)..(534): "n" may be a, t, c, g, other or unknown
  misc_feature (549)..(549): "n" may be a, t, c, g, other or unknown
  misc_feature (569)..(569): "n" may be a, t, c, g, other or unknown
  misc_feature (571)..(571): "n" may be a, t, c, g, other or unknown
ctgattcacacgaatactaacgtttaatcctgttttcaaagtccaagattgaaaacttgcaattaaacactgagcaagccacatgtttaagtaatatttcttaaaaagtcttaaagaaaaaagtatgatacaggacctaagttttcagtggcatatatactattaacacatttctgaaatctggtaggtcacatcagtcctgaattaacttttaataataataataataaaaaaactaactgagctttatactttttctatgccactatagctttctttcacctcattttttaaatgtcgatcttcactttatgccgttctcagtattcttccaaaaatcttcgaacagtagtcctctgtctgatctgaggtcttatcagatcagttttaattggactgagtgtcccttcagatttaatgtctcactggtcccattgaactcattcttagtatcactttccttcnattcaatgtttgtgtctccctctgctttcccgactaccggactcacctacttttttatcacaaatcccnctttcctcccccggnattccacctggtcccgtccnanttggcccgtgctaaa

SEQ ID NO: 9440 - DNA, 423 bp, Homo sapiens
  misc_feature (109)..(109): "n" may be a, t, c, g, other or unknown
  misc_feature (252)..(252): "n" may be a, t, c, g, other or unknown
  misc_feature (255)..(255): "n" may be a, t, c, g, other or unknown
  misc_feature (339)..(339): "n" may be a, t, c, g, other or unknown
  misc_feature (374)..(374): "n" may be a, t, c, g, other or unknown
  misc_feature (385)..(385): "n" may be a, t, c, g, other or unknown
  misc_feature (391)..(391): "n" may be a, t, c, g, other or unknown
  misc_feature (396)..(396): "n" may be a, t, c, g, other or unknown
  misc_feature (411)..(411): "n" may be a, t, c, g, other or unknown
  misc_feature (414)..(414): "n" may be a, t, c, g, other or unknown
ctctaaacttctcttctcacttcatttcattcatttgatcttcaatcactgataccctttcttccatttaatcaaatcagctactgaagcttgtgcatgcatcacgtanttcttgtgccatggttttcagctccatcaggtcatttatggacttatctatgctgtttattctcgttagccatttgtctactcttttctaaaggtttttaagcttctttgtgatgggttcaaacatcctcctttagctggganaantttgttattaccgattgtctgaagccgccttctctcgactcgtcaaagtcattctccatacagctttgttccgctgctggcaangaactcatgttgctgcctaatccttcctctggaancttcatctcanaagggnacccnccctattaaatttcnatncccccccct

SEQ ID NO: 9441 - DNA, 567 bp, Homo sapiens
  misc_feature (162)..(162): "n" may be a, t, c, g, other or unknown
  misc_feature (375)..(375): "n" may be a, t, c, g, other or unknown
  misc_feature (452)..(452): "n" may be a, t, c, g, other or unknown
  misc_feature (485)..(485): "n" may be a, t, c, g, other or unknown
  misc_feature (491)..(491): "n" may be a, t, c, g, other or unknown
  misc_feature (506)..(506): "n" may be a, t, c, g, other or unknown
  misc_feature (537)..(537): "n" may be a, t, c, g, other or unknown
  misc_feature (550)..(550): "n" may be a, t, c, g, other or unknown
  misc_feature (554)..(554): "n" may be a, t, c, g, other or unknown
  misc_feature (560)..(560): "n" may be a, t, c, g, other or unknown
aggttttcaaatttattagcagaaatatacagtctttacatttcttccacatttatttatttatttattttttgagacagagtttcgctcttgttgcccaggctggactgcaataacacgatctcggctcactgcaacctctgcctcctgggttcaagcgantctcctgcctcagcctcccgttgggattacaggcacccaccacctcacccagctaattttttgtatttttagtaaaaacagggtttcaccacgttggccaggctggtctcgaactcctgacctcaggtaatccacccatcttggcctcccaaagtgctgggattacaggtgtgagccaccgcgcctggccttcttccacattttgtgtctaantttaacccctttcttttcccattattaaataattggcagtttatctaattggacttgtccaataattaactcctaanattactttaaaaaaatttttgtttttttgaaanaaaaanccctctgtttcccancctggattaaaatggggttggtctcactcantgcaccccccccncccngttcancccatcc

SEQ ID NO: 9442 - DNA, 573 bp, Homo sapiens
  misc_feature (6)..(6): "n" may be a, t, c, g, other or unknown
  misc_feature (30)..(30): "n" may be a, t, c, g, other or unknown
  misc_feature (91)..(91): "n" may be a, t, c, g, other or unknown
  misc_feature (314)..(314): "n" may be a, t, c, g, other or unknown
  misc_feature (330)..(330): "n" may be a, t, c, g, other or unknown
  misc_feature (383)..(383): "n" may be a, t, c, g, other or unknown
  misc_feature (493)..(493): "n" may be a, t, c, g, other or unknown
  misc_feature (511)..(511): "n" may be a, t, c, g, other or unknown
  misc_feature (522)..(522): "n" may be a, t, c, g, other or unknown
  misc_feature (542)..(542): "n" may be a, t, c, g, other or unknown
  misc_feature (544)..(544): "n" may be a, t, c, g, other or unknown
  misc_feature (549)..(549): "n" may be a, t, c, g, other or unknown
  misc_feature (559)..(559): "n" may be a, t, c, g, other or unknown
aaatanacagattctcactctgtcacccangctggactgcagtggcacaatcttggctcactgcaacactcttgccttccaggttcaaganatcttgtgcctcagcctcccgagcagctgggagtacagacccctgcccccatacccggctaatttttgtagcaaattactcatttgtctgtctactttttattataaagattgtggcaactctgcttaggactctggatttttctgcccaattaaggtaaaaaaagaaaaaaaaaagcaaccaccaccataatattacccaggaaaccagctgtgttctgtanaaggccggcctatcanattcaagttgcaagccttatacacagtaagtgtctcatgcacatatccatgangattcacataagctgccatcggcccacataaggataaactgaatatttcatttttggttgttatttctgtttcttgaaattgtttacagccaaaggaaattaatttatcntaatgtctaattcccacnaaatccctganaccctgccattttaaggaantnaatcnccatactccncattaggaaaaaaa

SEQ ID NO: 9443 - DNA, 491 bp, Homo sapiens
  misc_feature (109)..(109): "n" may be a, t, c, g, other or unknown
  misc_feature (122)..(122): "n" may be a, t, c, g, other or unknown
  misc_feature (189)..(189): "n" may be a, t, c, g, other or unknown
  misc_feature (212)..(212): "n" may be a, t, c, g, other or unknown
  misc_feature (249)..(249): "n" may be a, t, c, g, other or unknown
  misc_feature (260)..(260): "n" may be a, t, c, g, other or unknown
  misc_feature (271)..(271): "n" may be a, t, c, g, other or unknown
  misc_feature (316)..(317): "n" may be a, t, c, g, other or unknown
  misc_feature (409)..(409): "n" may be a, t, c, g, other or unknown
  misc_feature (425)..(425): "n" may be a, t, c, g, other or unknown
  misc_feature (434)..(434): "n" may be a, t, c, g, other or unknown
  misc_feature (436)..(436): "n" may be a, t, c, g, other or unknown
  misc_feature (443)..(443): "n" may be a, t, c, g, other or unknown
  misc_feature (489)..(490): "n" may be a, t, c, g, other or unknown
gctggagcagcaatttcccaatttattgaaagtgatcgctttgcaaggatgtctaagctaatcccgtcacagaaaggaaacgcacaggcgcctaggcagaaacttgganactcaccgcagangccacgtgaacccacggccacagaaaggcaggacggcagaaccatgatttcccaccgagcgattacnaaaacctcttcccccaatagtanacacatctccaatacaaacacaggtttataataagtnataggaagtcnatataatatanattatccccagaaaaaaatcaacaatcttcaaacactgccctttnnttgtgtgttttgtttttgttgacaggttgaaagcatgttgaaaaaaataaatatttaagaaaagcacacacagcaccctcactacaagttanttctaaaagggctgcntaccaaacncnatattanatctaaaaaaaacccccccattaatttggctttcctaaaattcccnnt

SEQ ID NO: 9444 - DNA, 543 bp, Homo sapiens
  misc_feature (102)..(102): "n" may be a, t, c, g, other or unknown
  misc_feature (119)..(119): "n" may be a, t, c, g, other or unknown
  misc_feature (244)..(244): "n" may be a, t, c, g, other or unknown
  misc_feature (253)..(253): "n" may be a, t, c, g, other or unknown
  misc_feature (323)..(323): "n" may be a, t, c, g, other or unknown
  misc_feature (362)..(362): "n" may be a, t, c, g, other or unknown
  misc_feature (364)..(364): "n" may be a, t, c, g, other or unknown
  misc_feature (377)..(377): "n" may be a, t, c, g, other or unknown
  misc_feature (392)..(392): "n" may be a, t, c, g, other or unknown
  misc_feature (435)..(435): "n" may be a, t, c, g, other or unknown
  misc_feature (456)..(456): "n" may be a, t, c, g, other or unknown
  misc_feature (463)..(463): "n" may be a, t, c, g, other or unknown
  misc_feature (481)..(481): "n" may be a, t, c, g, other or unknown
  misc_feature (503)..(503): "n" may be a, t, c, g, other or unknown
  misc_feature (512)..(512): "n" may be a, t, c, g, other or unknown
  misc_feature (520)..(520): "n" may be a, t, c, g, other or unknown
  misc_feature (540)..(540): "n" may be a, t, c, g, other or unknown
gaacttcctatgataaaaccatctacacttttctaagtaggaaaaataagggaatgagtgtcatgtttttaaaaatttggggaaagatcaagagtacagaanagcatggggcaaaaaanaagtttaggtgcatttaggtgacatcaataaagcccagttcttttttttttttgacaaatgggatcatcctataaacattgttaggcaaattacaaaatctatctgcgctgtccctagttgggcncaacatgcnccatggcaatctgtcttgctgctgtgcagtccttccctgggtggctgcaggggcaaacacagggtttgtnggtcctgggtcttataaaaatcaggtacaaattgacacntntatttaaaagganaaattgccaaatganacaaaatgttttccttatgcaaatttcataatataaattatanacactgccagtgcactgttangaccccncgggcttggaagggctcnatattattgggtttacaataanattgggccnagttaatntccaaaaattactccccccnttc

SEQ ID NO: 9445 - DNA, 375 bp, Homo sapiens
  misc_feature (325)..(325): "n" may be a, t, c, g, other or unknown
  misc_feature (332)..(332): "n" may be a, t, c, g, other or unknown
  misc_feature (335)..(335): "n" may be a, t, c, g, other or unknown
  misc_feature (343)..(343): "n" may be a, t, c, g, other or unknown
  misc_feature (345)..(345): "n" may be a, t, c, g, other or unknown
  misc_feature (349)..(349): "n" may be a, t, c, g, other or unknown
  misc_feature (352)..(352): "n" may be a, t, c, g, other or unknown
accttttccacaacattttattttaaataaaacttcaagtactcttacgtaggtacaaaaaaaatctgatctatttgcctccaacaggccaccacaacacacagtagataaaacacagtggttacaaacgtcttttaaatttatttctgaggcaaggcaaatgggagggaaatgtttctatgaaaaaatactgtgtgcgtaggaaattgtcacaattttattccacatggatacaaatgattatactttaatttaggccctggtggcttaaaattatataacaaaatagaaaaatggaaaactaatatcccctacccctgtttcnaaggcangcnctacccanantaanganaaccccccctttttggtaaaaga

SEQ ID NO: 9446 - DNA, 493 bp, Homo sapiens
  misc_feature (9)..(9): "n" may be a, t, c, g, other or unknown
  misc_feature (168)..(168): "n" may be a, t, c, g, other or unknown
  misc_feature (224)..(224): "n" may be a, t, c, g, other or unknown
  misc_feature (280)..(280): "n" may be a, t, c, g, other or unknown
  misc_feature (373)..(373): "n" may be a, t, c, g, other or unknown
  misc_feature (375)..(375): "n" may be a, t, c, g, other or unknown
  misc_feature (458)..(458): "n" may be a, t, c, g, other or unknown
  misc_feature (467)..(467): "n" may be a, t, c, g, other or unknown
  misc_feature (473)..(473): "n" may be a, t, c, g, other or unknown
  misc_feature (478)..(478): "n" may be a, t, c, g, other or unknown
  misc_feature (481)..(481): "n" may be a, t, c, g, other or unknown
  misc_feature (485)..(485): "n" may be a, t, c, g, other or unknown
  misc_feature (491)..(491): "n" may be a, t, c, g, other or unknown
gggtaccanaatggttccaaggttagtactgcttgagctcatttcagcttctgccatgcatctttccatatttactgagtttaaatgaatcatctcagagagaaaagaaaaactaaatatagaaaagtgggagtactttcacgtttaatacgcaagggcataaaatanaatgttaggaaacaatttggatttttttccctaaaatataggtgactatgggctantttacaactttccttctctcactgaaataaaaatacatagttaaggaatagggacnaatacataacaggtgacatttgacagtttgggcatattccttgttactttctaatcttgagaatcacagtttgctgttttagaagtatctganangttccagataaaaagcgatggctaaatgctcttaaactttgagcgtgctggatgctctaaagttggagaagaatttataacanaaccttacnatgaanaaccnacntccnaacccnct

SEQ ID NO: 9447 - DNA, 496 bp, Homo sapiens
  misc_feature (3)..(3): "n" may be a, t, c, g, other or unknown
  misc_feature (155)..(155): "n" may be a, t, c, g, other or unknown
  misc_feature (157)..(157): "n" may be a, t, c, g, other or unknown
  misc_feature (241)..(241): "n" may be a, t, c, g, other or unknown
  misc_feature (253)..(253): "n" may be a, t, c, g, other or unknown
  misc_feature (302)..(302): "n" may be a, t, c, g, other or unknown
  misc_feature (304)..(304): "n" may be a, t, c, g, other or unknown
  misc_feature (315)..(315): "n" may be a, t, c, g, other or unknown
  misc_feature (373)..(373): "n" may be a, t, c, g, other or unknown
  misc_feature (398)..(398): "n" may be a, t, c, g, other or unknown
  misc_feature (402)..(402): "n" may be a, t, c, g, other or unknown
  misc_feature (467)..(467): "n" may be a, t, c, g, other or unknown
  misc_feature (473)..(473): "n" may be a, t, c, g, other or unknown
  misc_feature (482)..(482): "n" may be a, t, c, g, other or unknown
  misc_feature (484)..(484): "n" may be a, t, c, g, other or unknown
  misc_feature (492)..(492): "n" may be a, t, c, g, other or unknown
ganaacaagttttgctctttttgcctagcctggaatgcaatggtgccatctcagctcacgcaacctctgcctccagttctcctgcctcagcctcccgagtagctgggattacaggcacacgccaccacacctggctaattttgtatttttagtananccagggtttcactatattggccaggctagtctcgaactcctgacctcaggtgatccacccaccttggcctcctaaagtgctaanattacaggcgtnagccactgcacccagccttgtatactcttttgtcctcatttcagtgaananaattaatgttngagaaaaatggggcaacgagagagagattactgaaaacacttattgtgaggaatgaanacctgactctcaattccactatgancacnttacaggcagctctggacacctgaagctaacagtccaatatttgaataaggctgttacactttcncttacnggttttggncncccccttnttta

SEQ ID NO: 9448 - DNA, 586 bp, Homo sapiens
  misc_feature (126)..(126): "n" may be a, t, c, g, other or unknown
  misc_feature (169)..(169): "n" may be a, t, c, g, other or unknown
  misc_feature (265)..(265): "n" may be a, t, c, g, other or unknown
  misc_feature (300)..(300): "n" may be a, t, c, g, other or unknown
  misc_feature (392)..(392): "n" may be a, t, c, g, other or unknown
  misc_feature (509)..(509): "n" may be a, t, c, g, other or unknown
  misc_feature (518)..(518): "n" may be a, t, c, g, other or unknown
  misc_feature (547)..(547): "n" may be a, t, c, g, other or unknown
  misc_feature (554)..(554): "n" may be a, t, c, g, other or unknown
  misc_feature (562)..(562): "n" may be a, t, c, g, other or unknown
  misc_feature (583)..(583): "n" may be a, t, c, g, other or unknown
gagacggagacttctctgtcgcccatgctggagtgcagtggcactatctcagctcactgcaagctccgcctcccgggttcacaccattctcctgcctcagcctcccgagtagctgggactaaaggnacccgccaccacgctcagctaaatttttgtatttttagtaaanacagggtttcaccgtgttagccaggatggtcttgatctcctgatctcgtgatccacctgcctcagcctcccaaagtgctgggattacaggcatganccactgcacccaggcgttgtatgtgtgtattatanaatgattaaatcaagctacttaacatatccataacctcacttacttatgttgtttacatgtgctatgaaacatttaaaatccactctcatancaattttgaaatatacattacattattattaactattgtcccatgctgtgcaatcgattttaaaaacttattcccctatttaaccaaaactttgttaatatttaatgagttcctccnaataacccnaacccgtttgaagcctatgaccccaattnaaattcntttgaacnccctcctagggcgtttaattnttg

SEQ ID NO: 9449 - DNA, 368 bp, Homo sapiens
  misc_feature (39)..(39): "n" may be a, t, c, g, other or unknown
  misc_feature (75)..(75): "n" may be a, t, c, g, other or unknown
  misc_feature (149)..(149): "n" may be a, t, c, g, other or unknown
  misc_feature (295)..(295): "n" may be a, t, c, g, other or unknown
  misc_feature (299)..(299): "n" may be a, t, c, g, other or unknown
  misc_feature (317)..(317): "n" may be a, t, c, g, other or unknown
  misc_feature (325)..(325): "n" may be a, t, c, g, other or unknown
  misc_feature (329)..(329): "n" may be a, t, c, g, other or unknown
  misc_feature (358)..(358): "n" may be a, t, c, g, other or unknown
  misc_feature (364)..(364): "n" may be a, t, c, g, other or unknown
ccatttagtgacaggaatttaagcaaggacctgaagtanaatcaactgattcacacagtagtaaatacaaagtanaacaatgatcttggcttcgctgtctggttcagtggtctgctggaatgcaatacacaagttaagtcacactgcanactgttttctagctgtggccgctggatgccacttctagcatagtaaaactatgttaggaggaatgggaaaagtgagcaccacttctcaccatgttcccccctcctgctgccagtctctgctcccatgttggatgcagcagaaatcncccnccacttggcccaggacanaccaatangaangggtccaatcctctactacggcgaaatcntctccncaac

SEQ ID NO: 9450 - DNA, 381 bp, Homo sapiens
  misc_feature (1)..(381): "n" may be a, t, c, g, other or unknown
nnnnnnnnnnnnnnnnnnnnnnnnnnnnnnnnnnnnnnnnnnnnnnnnnnnnnnnnnnnnnnnnnnnnnnnnnnnnnnnnnnnnnnnnnnnnnnnnnnnnnnnnnnnnnnnnnnnnnnnnnnnnnnnnnnnnnnnnnnnnnnnnnnnnnnnnnnnnnnnnnnnnnnnnnnnnnnnnnnnnnnnnnnnnnnnnnnnnnnnnnnnnnnnnnnnnnnnnnnnnnnnnnnnnnnnnnnnnnnnnnnnnnnnnnnnnnnnnnnnnnnnnnnnnnnnnnnnnnnnnnnnnnnnnnnnnnnnnnnnnnnnnnnnnnnnnnnnnnnnnnnnnnnnnnnnnnnnnnnnnnnnnnnnnnnnnnnnnnnnnnnnnnnnnnnnnnnnnnnnnn

SEQ ID NO: 9451 - DNA, 584 bp, Homo sapiens
  misc_feature (74)..(74): "n" may be a, t, c, g, other or unknown
  misc_feature (113)..(113): "n" may be a, t, c, g, other or unknown
  misc_feature (200)..(200): "n" may be a, t, c, g, other or unknown
  misc_feature (387)..(387): "n" may be a, t, c, g, other or unknown
  misc_feature (406)..(406): "n" may be a, t, c, g, other or unknown
  misc_feature (419)..(419): "n" may be a, t, c, g, other or unknown
  misc_feature (423)..(423): "n" may be a, t, c, g, other or unknown
  misc_feature (451)..(451): "n" may be a, t, c, g, other or unknown
  misc_feature (487)..(487): "n" may be a, t, c, g, other or unknown
  misc_feature (509)..(509): "n" may be a, t, c, g, other or unknown
  misc_feature (512)..(512): "n" may be a, t, c, g, other or unknown
  misc_feature (541)..(541): "n" may be a, t, c, g, other or unknown
  misc_feature (543)..(543): "n" may be a, t, c, g, other or unknown
  misc_feature (561)..(561): "n" may be a, t, c, g, other or unknown
  misc_feature (577)..(577): "n" may be a, t, c, g, other or unknown
ggaaattaaagtaaacttttaatgcatatattttaaaaattcactttccattttactattttaaagtgcatgtnaaattcttttccattttttggtaggtaattaatttgaanaagggaaatacaatgctttactattactaccaacaggattttacacaagaaacattagtaacttaagctgtggatcctgtgaatgtncaactgacacagattttgtaaatccatactgggcctggaacttatgttgattataaaagtcaaagggtaattttcttttaaagatatattacttataaaatattcccgaagtatgaattgtgcttttagtttaggatatatgatttaaattgatgcacactgcagatgaatgtttacccctgctgtngatttaaagaacagcatanatatctcaagaancccnaataaaattaatttttcccccccctgtntaactccttaaggatttcatccccaaagctatccanaaaaccccctactttaaccaanccnttgttaaatttattaccggatacaaaatncnccaacccatttttgggtnaaattaaatgaacttncccctta

SEQ ID NO: 9452 - DNA, 532 bp, Homo sapiens
  misc_feature (49)..(49): "n" may be a, t, c, g, other or unknown
  misc_feature (135)..(135): "n" may be a, t, c, g, other or unknown
  misc_feature (359)..(359): "n" may be a, t, c, g, other or unknown
  misc_feature (470)..(470): "n" may be a, t, c, g, other or unknown
  misc_feature (491)..(491): "n" may be a, t, c, g, other or unknown
  misc_feature (501)..(501): "n" may be a, t, c, g, other or unknown
  misc_feature (503)..(505): "n" may be a, t, c, g, other or unknown
  misc_feature (532)..(532): "n" may be a, t, c, g, other or unknown
gacaatggaaatgtttattgctggtggttgggtctgtcatttcctaaangacatagctggccagcagattttcatttcttttttacaaaataaacaaatgcctactttattatttatacacagaaaattatatanaaacaccacacaaactgcttgaaatacaaatattctttggtttacttatcaaagtaaaaaataacaaaaatcttatcagttaaataaaaaagtgacattctttatcaagccttcttaaacactgaaacgcacgcatttttatgctcatgttctttagcagtatttctccccttttgcccctcattcccctaaattgtttcaatgagttcatctgtagaatgaanattgttacctttcttaatgctacttactttttattatctcaatatcaagaccaatctagacttttttgtctcttacatgtgaaatggaagtttaaaaaggaaaaatccccnccccttttttagaaaaccttnaaaaaacccntnnncaccttttcagggggtgaaaccccttn

SEQ ID NO: 9453 - DNA, 479 bp, Homo sapiens
  misc_feature (397)..(397): "n" may be a, t, c, g, other or unknown
  misc_feature (407)..(407): "n" may be a, t, c, g, other or unknown
  misc_feature (422)..(422): "n" may be a, t, c, g, other or unknown
  misc_feature (442)..(442): "n" may be a, t, c, g, other or unknown
  misc_feature (448)..(449): "n" may be a, t, c, g, other or unknown
  misc_feature (469)..(469): "n" may be a, t, c, g, other or unknown
gtcttcagtgaagtttactgtatattataaacagtcatagaattcaaagacaatcatataaccaactcttttggatggcttaagatgtgccaggtactgtgctaaggacaagagatataaccagatacaaaccagtccccatcctcaatcattacttattcactcaacaaatatttttgagtacttaccctgcaccaggcactagggatataacagataaaaattaagtctctcgcttcatgaagctttcattctgatagagggagacggcaataagcaaataaatggtttattccaccaccccttcaagtcttcactcaaatgttcctttttcaatgagactatataaccaacgtatttaaaatttcaaccaccatcctgcattcactgcttttcntcttgctaanggtgattaatatgtntttatttgactgaacacaangggccnnatacttggtccaacattatnctgggtgtgt

SEQ ID NO: 9454 - DNA, 467 bp, Homo sapiens
  misc_feature (386)..(386): "n" may be a, t, c, g, other or unknown
  misc_feature (426)..(426): "n" may be a, t, c, g, other or unknown
  misc_feature (428)..(428): "n" may be a, t, c, g, other or unknown
  misc_feature (433)..(433): "n" may be a, t, c, g, other or unknown
  misc_feature (440)..(440): "n" may be a, t, c, g, other or unknown
  misc_feature (453)..(453): "n" may be a, t, c, g, other or unknown
  misc_feature (463)..(463): "n" may be a, t, c, g, other or unknown
gcagggggaaaggcaaggaatatatcgtctacacaattgggacaaattcatcttttctgctcttcacttcatgtccacatcaaagtccagcaccagcagcttggtttcttcagtcccattccgactcccaactgcacacaccagctttgtgtttgaggctctgatccgccacacaactcccccactccccccactctccaatgtgactaggtttcgaataaattcacccgttttcaagtcccatagttttacagttccatcatctgagctggtaattacaaagttcttgttgaactgtaaacaggtcacagcactctgatgcttgttgggaccttgcaatgtttgtaaacactgtcctgttttgatatcccagattttaactgtanaatctgcattcccacaaacaaaaatattgtctttgaattncnttccncttgttnacaaaatgggtgncccgtttacntttt

SEQ ID NO: 9455 - DNA, 483 bp, Homo sapiens
  misc_feature (437)..(437): "n" may be a, t, c, g, other or unknown
  misc_feature (448)..(448): "n" may be a, t, c, g, other or unknown
  misc_feature (458)..(458): "n" may be a, t, c, g, other or unknown
  misc_feature (463)..(463): "n" may be a, t, c, g, other or unknown
  misc_feature (472)..(472): "n" may be a, t, c, g, other or unknown
  misc_feature (476)..(476): "n" may be a, t, c, g, other or unknown
  misc_feature (478)..(478): "n" may be a, t, c, g, other or unknown
gtcttttgtcaagtttattatggttggtttgctcagctcttaggaaagagggtttggagacagacccgttaggccaggaaaatttaggcccacaagtcccggtggagctgttctgatggagttgttctaatggtgcttcctctcctgcagaacttgagcaatcagtccgatgacccaggagatgaccccggcagagcagcttgccacttattagaactgggcttcatgagaggctcttaggacactggaaatttcaagttaatatcctgaataggctttcttcctgtgaaaattttgcaggcattgtccacgatggatggaggaaaagagggaaggcaagagaccaagctaggattgactccaatattctctgccaccctgtcccaacaccaactcccataacctaaaaaggggtggaggtgggaatcaaatttgcntttggtgatangtgcaatttnctccnactaaatcntccnanctcct

SEQ ID NO: 9456 - DNA, 577 bp, Homo sapiens
  misc_feature (10)..(10): "n" may be a, t, c, g, other or unknown
  misc_feature (40)..(40): "n" may be a, t, c, g, other or unknown
  misc_feature (44)..(44): "n" may be a, t, c, g, other or unknown
  misc_feature (104)..(104): "n" may be a, t, c, g, other or unknown
  misc_feature (243)..(243): "n" may be a, t, c, g, other or unknown
  misc_feature (262)..(262): "n" may be a, t, c, g, other or unknown
  misc_feature (277)..(277): "n" may be a, t, c, g, other or unknown
  misc_feature (283)..(283): "n" may be a, t, c, g, other or unknown
  misc_feature (312)..(312): "n" may be a, t, c, g, other or unknown
  misc_feature (475)..(475): "n" may be a, t, c, g, other or unknown
  misc_feature (498)..(498): "n" may be a, t, c, g, other or unknown
  misc_feature (511)..(511): "n" may be a, t, c, g, other or unknown
  misc_feature (543)..(543): "n" may be a, t, c, g, other or unknown
  misc_feature (545)..(545): "n" may be a, t, c, g, other or unknown
  misc_feature (550)..(550): "n" may be a, t, c, g, other or unknown
  misc_feature (563)..(563): "n" may be a, t, c, g, other or unknown
  misc_feature (577)..(577): "n" may be a, t, c, g, other or unknown
ctttgccaanaaaagtttttattgcaagcacagtgagcanaaanagatgtcttctcacacaaagtggccacaaggtctgccattaactaaatctctttgacaanccttcattggtttaaagcatatgaattagcttcttgctatcaggtgtacatcatttctgccatgtgggacattttcttgggaatatacaagtaatactccatgtagcctgacaggtcctcaatggtcacatcatccacnaaaactcgagcttgctcanaacaggatcgggganagccanacagagttctggcgtgcagcgactgaaantagtcctcaagtgtggatcttcgttctggagccaagggagggacactctgcaggcctgaaaaggaatatacttccatatcatgccatctcttacactggcattccttgcctatgcatgtgcatggcttgccctggtttaacttggaaactgattgaaaattcnaaaaaaatcctgggctttgaaanttgcttggggganttgggttacctcaaaagaatctccctcctacncnccgangggaacctggaanaaaattctcaaagn

SEQ ID NO: 9457 - DNA, 549 bp, Homo sapiens
  misc_feature (6)..(6): "n" may be a, t, c, g, other or unknown
  misc_feature (138)..(138): "n" may be a, t, c, g, other or unknown
  misc_feature (292)..(292): "n" may be a, t, c, g, other or unknown
  misc_feature (339)..(339): "n" may be a, t, c, g, other or unknown
  misc_feature (341)..(341): "n" may be a, t, c, g, other or unknown
  misc_feature (382)..(382): "n" may be a, t, c, g, other or unknown
  misc_feature (430)..(430): "n" may be a, t, c, g, other or unknown
  misc_feature (465)..(465): "n" may be a, t, c, g, other or unknown
  misc_feature (480)..(480): "n" may be a, t, c, g, other or unknown
  misc_feature (501)..(502): "n" may be a, t, c, g, other or unknown
  misc_feature (525)..(525): "n" may be a, t, c, g, other or unknown
  misc_feature (532)..(533): "n" may be a, t, c, g, other or unknown
gttttnccaggttgtttattctttttaattatgaatgcacatttatttattcatgaacattgggaaaaacgcaaatacatcagaatcgttaaaaatctacagctcctcattcttcactactagtttctcttctcagangtaaacactttttcaaaaattcgtattttaaatttgggggtgggtaattcacatggtgcaaacatcaaaagctatgaaaaggtgaagtttccctcccatttctcattgctccaaagcaggaaatcattgtgattaattttgtttgtttttccanaatgaacacaaagttttataatatttggaaaggacactgttcctcanantccaccctctaagctaagcatttgtgatataaagtcagtanaaaatatattaacattttccccctttctagatgtatttctagaaccanaaaaaggaaaggcacccaggggaattataatctcnttaaaagtttgaacnacccaattaatttgtttctcnnaaaaaatttattgctccattgtnactgttnnaaaaaaggaaaagaat

SEQ ID NO: 9458 - DNA, 599 bp, Homo sapiens
  misc_feature (245)..(245): "n" may be a, t, c, g, other or unknown
  misc_feature (365)..(365): "n" may be a, t, c, g, other or unknown
  misc_feature (380)..(380): "n" may be a, t, c, g, other or unknown
  misc_feature (409)..(409): "n" may be a, t, c, g, other or unknown
  misc_feature (438)..(438): "n" may be a, t, c, g, other or unknown
  misc_feature (491)..(491): "n" may be a, t, c, g, other or unknown
  misc_feature (536)..(536): "n" may be a, t, c, g, other or unknown
  misc_feature (545)..(545): "n" may be a, t, c, g, other or unknown
  misc_feature (563)..(563): "n" may be a, t, c, g, other or unknown
  misc_feature (572)..(572): "n" may be a, t, c, g, other or unknown
  misc_feature (585)..(585): "n" may be a, t, c, g, other or unknown
  misc_feature (598)..(599): "n" may be a, t, c, g, other or unknown
gatggaaaaatggaattctcagttcatttgaagaatacagattagcaattaaaaaatacagcagtatctcaggaaataaacattattctcattttacaaaaaagtgtatgtgaactttaaaaaaatctacactacaatatgaattgatattatctctgggtagaatgctaacaattttattttctcctttactgtattcactaaatgtttcacattaaatgttgtattacctttgaaatcagaanatacattgtctaaaactgatacatcaagaaatagttgtataagcatattacctaaacacagaggttaccaacagaaattaaaagtggttaaaaatgactcctggggaactgtaagaagangaaggtgaagggaanaaatggttgctttccattctaaatcttcncacaatctattcttaaaatcagacaaagntgtggtaaattttttccattattaaaaaaaattatttcctcctataagaatangcccttgaaaaacccattaattgttataggttcccattccctttntcccccccntttttttaaatgccaccnggttttccnaaaatatttcccncccccccggaccnn

SEQ ID NO: 9459 - DNA, 456 bp, Homo sapiens
  misc_feature (67)..(67): "n" may be a, t, c, g, other or unknown
  misc_feature (88)..(88): "n" may be a, t, c, g, other or unknown
  misc_feature (117)..(117): "n" may be a, t, c, g, other or unknown
  misc_feature (120)..(120): "n" may be a, t, c, g, other or unknown
  misc_feature (177)..(177): "n" may be a, t, c, g, other or unknown
  misc_feature (236)..(236): "n" may be a, t, c, g, other or unknown
  misc_feature (238)..(238): "n" may be a, t, c, g, other or unknown
  misc_feature (262)..(262): "n" may be a, t, c, g, other or unknown
  misc_feature (279)..(280): "n" may be a, t, c, g, other or unknown
  misc_feature (285)..(285): "n" may be a, t, c, g, other or unknown
  misc_feature (317)..(317): "n" may be a, t, c, g, other or unknown
  misc_feature (341)..(341): "n" may be a, t, c, g, other or unknown
  misc_feature (355)..(355): "n" may be a, t, c, g, other or unknown
  misc_feature (387)..(387): "n" may be a, t, c, g, other or unknown
  misc_feature (399)..(399): "n" may be a, t, c, g, other or unknown
  misc_feature (405)..(405): "n" may be a, t, c, g, other or unknown
  misc_feature (428)..(428): "n" may be a, t, c, g, other or unknown
  misc_feature (447)..(447): "n" may be a, t, c, g, other or unknown
  misc_feature (449)..(449): "n" may be a, t, c, g, other or unknown
  misc_feature (455)..(455): "n" may be a, t, c, g, other or unknown
atattagattttaaaatattttctttgcttttattttaatgctttatcctttacttctggctttganagtaacaggggaaagatttancttcttactgtgaagaaacagaaaattantcnaaaatatatgaaacaactgcagatattgacatgcaccttaagactatgacccctganaggaatgaagtgaggcccatccatcattctagatttctacctgcaggcacagacctcanancagggtaggggatcccaaacaaancatggtggtttcatgtnnttganaaaacagaggctggagttcagggaggctgaantggctgaagttgcagagcagagtnccagagagcttacngatatgtttaaacagaattccagaaatctgcntatggagccccntgagangtggctggatattaagacatgtnagcctagaacaaaactctncnaagtcna

SEQ ID NO: 9460 - DNA, 568 bp, Homo sapiens
  misc_feature (253)..(253): "n" may be a, t, c, g, other or unknown
  misc_feature (263)..(263): "n" may be a, t, c, g, other or unknown
  misc_feature (273)..(273): "n" may be a, t, c, g, other or unknown
  misc_feature (341)..(341): "n" may be a, t, c, g, other or unknown
  misc_feature (372)..(372): "n" may be a, t, c, g, other or unknown
  misc_feature (407)..(407): "n" may be a, t, c, g, other or unknown
  misc_feature (430)..(430): "n" may be a, t, c, g, other or unknown
  misc_feature (519)..(519): "n" may be a, t, c, g, other or unknown
  misc_feature (522)..(522): "n" may be a, t, c, g, other or unknown
  misc_feature (540)..(540): "n" may be a, t, c, g, other or unknown
  misc_feature (550)..(550): "n" may be a, t, c, g, other or unknown
  misc_feature (568)..(568): "n" may be a, t, c, g, other or unknown
gtgagtggcaacattttatgtatgctaaattggatggcaatattagattacatcttctgcaactgtggtgtcaaaaatctgatagcaaatttgattatctgttccatttgtgacattgtatgacttgatgaagcattccaaccacggatatgcatcaatttttattcctggaggacaaaacatatccatgatcatatccacacttttctgaaggtcatcatccatcagaacttctgatgctggaatctggaanaatttgtcanaatccatganataggcttctagtactcctgttccatcatcaagtgtaaaggtcataacaaacacatattggaggggtncaatacccagtgcttctgccacagaaagaangaatccacgatgttttatcaaccaggggaatttanattttgtatggatctcaaactanaacactgtttacatccctagtgatgttttgttccctgtataaaaaatggtgctgaaaaggtccaaaattcccaggtcctccttggcccnatntccccggaatttcccttntttaaccttnttccaaaaatttgccatn

SEQ ID NO: 9461 - DNA, 561 bp, Homo sapiens
  misc_feature (29)..(29): "n" may be a, t, c, g, other or unknown
  misc_feature (31)..(31): "n" may be a, t, c, g, other or unknown
  misc_feature (73)..(73): "n" may be a, t, c, g, other or unknown
  misc_feature (133)..(133): "n" may be a, t, c, g, other or unknown
  misc_feature (222)..(222): "n" may be a, t, c, g, other or unknown
  misc_feature (287)..(287): "n" may be a, t, c, g, other or unknown
  misc_feature (289)..(289): "n" may be a, t, c, g, other or unknown
  misc_feature (414)..(414): "n" may be a, t, c, g, other or unknown
  misc_feature (478)..(478): "n" may be a, t, c, g, other or unknown
  misc_feature (485)..(485): "n" may be a, t, c, g, other or unknown
  misc_feature (539)..(539): "n" may be a, t, c, g, other or unknown
ctgatttcatcttttattaaaaagctgananttaaagaactgtagggataactaagtccacctcaaagtccanacagaaactgccctcccaaagaaacaatgtttctttaaaacaaataccacaccttcccanatattatgggtaggtaagtgactaggttttgcaaattaatctatagctgcccatgtgcatgtagtccaaaaaacatgccaagaaggaanagctctgaaccagacacagaaaggcagtgtggcttcctcgctcaaggggaatgcaaagggctaananccctggcttcaagcagctgttatcctagatgaggaaaatgcaaacagattcaatctctgggatattgctgccaacatgctaagcccttcaccagttgccttgattcgaagcagttcctctatgtntactggctaaatgatggactccggcagtgaaacccacatactcagcaggctgcattctaatganaatgaangaatttaactaatggtgtttgaactggaaaaggtaaggtctgaaaatcccattnaactggaaacccaaaaaaaaaa

SEQ ID NO: 9462 - DNA, 562 bp, Homo sapiens
  misc_feature (27)..(27): "n" may be a, t, c, g, other or unknown
  misc_feature (301)..(301): "n" may be a, t, c, g, other or unknown
  misc_feature (303)..(303): "n" may be a, t, c, g, other or unknown
  misc_feature (407)..(407): "n" may be a, t, c, g, other or unknown
  misc_feature (414)..(414): "n" may be a, t, c, g, other or unknown
  misc_feature (448)..(448): "n" may be a, t, c, g, other or unknown
  misc_feature (464)..(464): "n" may be a, t, c, g, other or unknown
  misc_feature (490)..(490): "n" may be a, t, c, g, other or unknown
  misc_feature (493)..(493): "n" may be a, t, c, g, other or unknown
  misc_feature (537)..(537): "n" may be a, t, c, g, other or unknown
  misc_feature (539)..(539): "n" may be a, t, c, g, other or unknown
  misc_feature (549)..(549): "n" may be a, t, c, g, other or unknown
  misc_feature (562)..(562): "n" may be a, t, c, g, other or unknown
gagacagagtcttgctctgtcacccangctggagtgcagtggcgcaatctcggctcactgcaagctccgcctcccgggttcatgccattctcctgcctcagcctcccgagtagctggaactataggtgcccgccaccacgcctgactaattttttgtatttttagtaaaaacggggttacaccgtgttagccaggatggtctcgatctcctgacatcgtgttccgcccacctcggcctcccaaagtgctgggattacaggcgtgagccaccgcgcccagcctaattttgcatttttagtananacgggatttctccatgttggtcaggctggtctggaactcccgacctcaggtgatccacctgcctcggcctcccaaagtgctgggattacaggcgtgagccatancgcccancctatttcattcattctaacacatctaagctganctttgaagaaaaaatnggtgacagggaatctacagccaaaanaantggttgaagaattgccacccaaatctgttactaaggggcccaantnctcactcctncaaacttcccggn

SEQ ID NO: 9463 - DNA, 541 bp, Homo sapiens
  misc_feature (49)..(49): "n" may be a, t, c, g, other or unknown
  misc_feature (112)..(112): "n" may be a, t, c, g, other or unknown
  misc_feature (160)..(160): "n" may be a, t, c, g, other or unknown
  misc_feature (181)..(181): "n" may be a, t, c, g, other or unknown
  misc_feature (183)..(183): "n" may be a, t, c, g, other or unknown
  misc_feature (229)..(229): "n" may be a, t, c, g, other or unknown
  misc_feature (397)..(397): "n" may be a, t, c, g, other or unknown
  misc_feature (459)..(459): "n" may be a, t, c, g, other or unknown
  misc_feature (471)..(472): "n" may be a, t, c, g, other or unknown
  misc_feature (476)..(476): "n" may be a, t, c, g, other or unknown
  misc_feature (517)..(517): "n" may be a, t, c, g, other or unknown
  misc_feature (529)..(529): "n" may be a, t, c, g, other or unknown
  misc_feature (536)..(536): "n" may be a, t, c, g, other or unknown
gaaagtatttattgtttaataattctttctcccctcagccccatccggncactctctctttctgcttttctgatcatcctaaaggctgaatacatcctcctcctgtgtggangacacgaagcaatactaaaatcaatacactcgatcaggtcttcatcanataccacgtcactgtgggtanantgctagttttcaacaaatgtggtgttcttagggctccacaaggtantcctttctcaaggtcgctgggccactcatggagttgaaatgccgctgcccatctaagtacaacatggactctccatatgtttttgggaaaaccaatggcacttctttttccgacatgaacgtgaaatgaaagacattggtggttgtatgctgcttctcctgcagggangccacttcactgtgtactctgacttgaatataattattctgaaataaagcatacctgtgaanaaagaaagaacnntganccccctccacaggttccgaaacatgatttctctactgctancacaaacggtcnaaaaacnccaaa

SEQ ID NO: 9464 - DNA, 460 bp, Homo sapiens
  misc_feature (190)..(190): "n" may be a, t, c, g, other or unknown
  misc_feature (295)..(295): "n" may be a, t, c, g, other or unknown
  misc_feature (387)..(387): "n" may be a, t, c, g, other or unknown
  misc_feature (398)..(398): "n" may be a, t, c, g, other or unknown
  misc_feature (409)..(409): "n" may be a, t, c, g, other or unknown
  misc_feature (414)..(414): "n" may be a, t, c, g, other or unknown
  misc_feature (417)..(417): "n" may be a, t, c, g, other or unknown
  misc_feature (445)..(445): "n" may be a, t, c, g, other or unknown
  misc_feature (457)..(457): "n" may be a, t, c, g, other or unknown
gtaataacattcacatatgtaattagagtttaaaaatgtaaaaaacttagggtaacaaacactttaaacttattttttagacattcaataagcccattctcccacaaactgtttgattacaaagaagcacaatgggttaactgtggcaaaacataagaaataaggcaggggaggcagatacagacttganaacataaggatatccaaacaattttgtcaatatcaaaagacaaaatcaaaacatcttttataatataaaacaaatccatataattaaatactaattaggtgaaanattatagggtatataacatatattttctctacataaatttgcatatcttaaatttaatgcaaaacatcatgtttcacttcaacttaacatcntaacatgttanttcttggtgantctanatnttatggaatgaatatttaaattaaactncaaaaatcctancca

SEQ ID NO: 9465 - DNA, 349 bp, Homo sapiens
  misc_feature (141)..(142): "n" may be a, t, c, g, other or unknown
  misc_feature (167)..(167): "n" may be a, t, c, g, other or unknown
  misc_feature (178)..(178): "n" may be a, t, c, g, other or unknown
  misc_feature (205)..(205): "n" may be a, t, c, g, other or unknown
  misc_feature (222)..(222): "n" may be a, t, c, g, other or unknown
  misc_feature (255)..(255): "n" may be a, t, c, g, other or unknown
  misc_feature (270)..(270): "n" may be a, t, c, g, other or unknown
  misc_feature (272)..(272): "n" may be a, t, c, g, other or unknown
  misc_feature (277)..(277): "n" may be a, t, c, g, other or unknown
  misc_feature (283)..(283): "n" may be a, t, c, g, other or unknown
  misc_feature (307)..(307): "n" may be a, t, c, g, other or unknown
  misc_feature (337)..(337): "n" may be a, t, c, g, other or unknown
atttctgaaatttttatgtttcatttttcccagaggaataagatacattctgatcccataataatcgaatcacaaaagaaaccattgagggcatttgctttgctgaactgatgagatgaatgattaattgtctggaattcnncttcctggagaggcaaatggaggtntaggaaggccnaaaattaaaattaaaattaaaaacccnaggaaagagaagagaanaaaaggaaagtttaagagaaaaagaaagaaacnaaggagaaaaaactntnaagtngaaaanggagaaagtggaaaaaatattccnttgggttgtatattgtcttctagggccccntgacaaaatacc

SEQ ID NO: 9466 - DNA, 566 bp, Homo sapiens
  misc_feature (13)..(13): "n" may be a, t, c, g, other or unknown
  misc_feature (174)..(174): "n" may be a, t, c, g, other or unknown
  misc_feature (190)..(190): "n" may be a, t, c, g, other or unknown
  misc_feature (216)..(216): "n" may be a, t, c, g, other or unknown
  misc_feature (234)..(234): "n" may be a, t, c, g, other or unknown
  misc_feature (241)..(241): "n" may be a, t, c, g, other or unknown
  misc_feature (301)..(301): "n" may be a, t, c, g, other or unknown
  misc_feature (405)..(405): "n" may be a, t, c, g, other or unknown
  misc_feature (457)..(457): "n" may be a, t, c, g, other or unknown
  misc_feature (490)..(490): "n" may be a, t, c, g, other or unknown
  misc_feature (528)..(528): "n" may be a, t, c, g, other or unknown
  misc_feature (534)..(534): "n" may be a, t, c, g, other or unknown
  misc_feature (552)..(552): "n" may be a, t, c, g, other or unknown
  misc_feature (556)..(556): "n" may be a, t, c, g, other or unknown
gtatttttagtanagatgaggtttcaccatgtttgccaggctgatctcgaactcctgacatcaggtgatccacccaccttggcctcccaaagtgctgggatcacaggtgtgagccaccacacccggcccataaacatatatgtttaatcagagctttaatgaaataggatggangtactgaatttgtgantatcctttttgctttttgagacagantctcattttgtcacccangctggantgcagtggtgcaatcatggctcactacaacctctgcttcttggactcaagtgattctcangcctcatgcacccaagtagctgggattacaggtgtaccccaccacaccaagctaatttttgcatttttagtaaaaatagggttttgtcatgttgaccaaactantctcaaaccctggcttcaagtgattccccaccttgggccttaaaaattgctnaaaattaccactgaacccaccctgttgaatatnctttaaataggattataaggtttttgccttggaacaanttttcnggaaaaaaaatccaaaanaaanaacccttcct

SEQ ID NO: 9467 - DNA, 545 bp, Homo sapiens
  misc_feature (230)..(230): "n" may be a, t, c, g, other or unknown
  misc_feature (248)..(248): "n" may be a, t, c, g, other or unknown
  misc_feature (268)..(268): "n" may be a, t, c, g, other or unknown
  misc_feature (314)..(314): "n" may be a, t, c, g, other or unknown
  misc_feature (352)..(352): "n" may be a, t, c, g, other or unknown
  misc_feature (358)..(358): "n" may be a, t, c, g, other or unknown
  misc_feature (402)..(402): "n" may be a, t, c, g, other or unknown
  misc_feature (441)..(441): "n" may be a, t, c, g, other or unknown
  misc_feature (462)..(462): "n" may be a, t, c, g, other or unknown
  misc_feature (477)..(477): "n" may be a, t, c, g, other or unknown
  misc_feature (482)..(482): "n" may be a, t, c, g, other or unknown
  misc_feature (492)..(492): "n" may be a, t, c, g, other or unknown
  misc_feature (517)..(517): "n" may be a, t, c, g, other or unknown
  misc_feature (520)..(520): "n" may be a, t, c, g, other or unknown
  misc_feature (543)..(543): "n" may be a, t, c, g, other or unknown
atgtatgaaaaattatttaatccagtttcctgatttcattatatatttcttataaggttttcattaggcttttgtttttgtttttggttttaaataaaaacactttattgcacaaatcccacaaaggtctcaggccctgggtccaagcccacagccccaacctgtcccctggctctgggcctggtctttggtgcccaccctggcctcacatgccaacgtcttctgtggantgtgcaggtgtccatgancgttcctgtgttgggggaancctgcctgggccacaagtaatcaggcactgtggcagcctcacaatnaaaacaggtggggtggaattgggtccccacctgcccangctcangggccacaggggtctacacagtcctttctgctttgaaacacctngtaaatgctggtgggaaggaacatggcaccggcaccaancaaggaacccacttggatggncacaccaactgccancaatnccgggccaancccaccatgcacaaggaaacttgcnccncctccccttttaaaaaccccccnaa

SEQ ID NO: 9468 - DNA, 532 bp, Homo sapiens
  misc_feature (192)..(192): "n" may be a, t, c, g, other or unknown
  misc_feature (258)..(258): "n" may be a, t, c, g, other or unknown
  misc_feature (292)..(292): "n" may be a, t, c, g, other or unknown
  misc_feature (309)..(309): "n" may be a, t, c, g, other or unknown
  misc_feature (327)..(327): "n" may be a, t, c, g, other or unknown
  misc_feature (384)..(384): "n" may be a, t, c, g, other or unknown
  misc_feature (393)..(393): "n" may be a, t, c, g, other or unknown
  misc_feature (399)..(399): "n" may be a, t, c, g, other or unknown
  misc_feature (435)..(435): "n" may be a, t, c, g, other or unknown
  misc_feature (445)..(445): "n" may be a, t, c, g, other or unknown
  misc_feature (476)..(476): "n" may be a, t, c, g, other or unknown
  misc_feature (493)..(493): "n" may be a, t, c, g, other or unknown
  misc_feature (517)..(517): "n" may be a, t, c, g, other or unknown
  misc_feature (522)..(523): "n" may be a, t, c, g, other or unknown
actggtaaattcattttaataatgaggggaaaaaactttagttattaaaaacaaaagaatgaatacacatacacacactaaatgtggcagatgtttccaggagagattagcaacagagaggccacatgatcaaataaaatttacacttttgatgggattgtcccctcgcggccacccaagtgtttgtggaanaaagtctggagttgtttccaagcatccacctgagccatggcatgagccctgggctcccctccccanataataggactgcccaccaaggcatgcagggaancccgacacagggggaantaaggaggctcaatatantgccctgtctctgggtaacaaatgatctggggctttctcctcccatgggcctgcaancgtttacangcctcnttaacataaaaatccctcctcccgttgttggtcctncctgacctanccagaaacaggaaagttctctctgccctttnccccaggaaataaaccnctcctggttcggttcctcccaaangggcnnttccaggaa

SEQ ID NO: 9469 - DNA, 505 bp, Homo sapiens
  misc_feature (10)..(10): "n" may be a, t, c, g, other or unknown
  misc_feature (55)..(55): "n" may be a, t, c, g, other or unknown
  misc_feature (110)..(110): "n" may be a, t, c, g, other or unknown
  misc_feature (125)..(125): "n" may be a, t, c, g, other or unknown
  misc_feature (129)..(129): "n" may be a, t, c, g, other or unknown
  misc_feature (142)..(142): "n" may be a, t, c, g, other or unknown
  misc_feature (257)..(257): "n" may be a, t, c, g, other or unknown
  misc_feature (304)..(304): "n" may be a, t, c, g, other or unknown
  misc_feature (317)..(318): "n" may be a, t, c, g, other or unknown
  misc_feature (334)..(334): "n" may be a, t, c, g, other or unknown
  misc_feature (339)..(339): "n" may be a, t, c, g, other or unknown
  misc_feature (371)..(371): "n" may be a, t, c, g, other or unknown
  misc_feature (435)..(435): "n" may be a, t, c, g, other or unknown
  misc_feature (447)..(447): "n" may be a, t, c, g, other or unknown
  misc_feature (450)..(450): "n" may be a, t, c, g, other or unknown
  misc_feature (460)..(460): "n" may be a, t, c, g, other or unknown
  misc_feature (475)..(475): "n" may be a, t, c, g, other or unknown
  misc_feature (495)..(495): "n" may be a, t, c, g, other or unknown
  misc_feature (502)..(502): "n" may be a, t, c, g, other or unknown
caccataacntttttattaaataaagggaaatattaggagacgatgtctgctaanataggaggttaattctttacatggtgagtgggtcacagaaacaatacatcaatcntctgttaccaccganaganacactttaagttnccccaagagtacaaatcccatctatgaaacagcagtgctggcttcttaaaaacagtaaaaccaatcaaaaagaaaagatttagaggttcagacattagaacaaatgtggccaganataccacagagcccttgaagggaaaggcctcactgctggctccgtancaatgttgacccnnaaacagggcaggccangggantggcagggcgcggaggggtggaaaggagggangaaaaaaaatacacccctccagacctgcggcaagcgccactatgggattctgaagttagcgtcnccctccaatttnccnggaaagggantgcctggcccaacangggcaatttttaaagggccnggatttntcc

SEQ ID NO: 9470 - DNA, 543 bp, Homo sapiens
  misc_feature (3)..(3): "n" may be a, t, c, g, other or unknown
  misc_feature (34)..(34): "n" may be a, t, c, g, other or unknown
  misc_feature (46)..(46): "n" may be a, t, c, g, other or unknown
  misc_feature (142)..(142): "n" may be a, t, c, g, other or unknown
  misc_feature (376)..(376): "n" may be a, t, c, g, other or unknown
  misc_feature (420)..(420): "n" may be a, t, c, g, other or unknown
  misc_feature (460)..(460): "n" may be a, t, c, g, other or unknown
  misc_feature (468)..(468): "n" may be a, t, c, g, other or unknown
  misc_feature (490)..(490): "n" may be a, t, c, g, other or unknown
  misc_feature (527)..(527): "n" may be a, t, c, g, other or unknown
  misc_feature (530)..(530): "n" may be a, t, c, g, other or unknown
  misc_feature (541)..(541): "n" may be a, t, c, g, other or unknown
  misc_feature (543)..(543): "n" may be a, t, c, g, other or unknown
ganacggagtctcgctctgtcgcccaggctggantgcagtggcacnatctcggctcactgcaacctctgcctccgcctccagagtagctgggactacaggcgcccgccaccatgcccggctaattttttttgtattttttantaaaaacggggtttcacagtcttagccaggatggtcttgatctcctgacctcgtgatccaccccccttggcctcccaaagggctgggattacaggtgtgagccaccacgcccagccaaagcctgcccttcttcttatctatccatcctggtctccccattttaggggggctctggtttggctctttctgccttgtggccatttgccttggactcttagctttgacctctaaganattaagtcctacacctcattttggccacttcctacctatcaagnaagtgacttgggcaccattctggacactaatccttggcangctccaangttctcatcctacattggttgnaagttggggaaaaaactgttggtcttttattaaaccnctncccccccctcnan

SEQ ID NO: 9471 - DNA, 488 bp, Homo sapiens
  misc_feature (234)..(234): "n" may be a, t, c, g, other or unknown
  misc_feature (281)..(281): "n" may be a, t, c, g, other or unknown
  misc_feature (390)..(390): "n" may be a, t, c, g, other or unknown
  misc_feature (415)..(415): "n" may be a, t, c, g, other or unknown
  misc_feature (419)..(419): "n" may be a, t, c, g, other or unknown
  misc_feature (432)..(432): "n" may be a, t, c, g, other or unknown
  misc_feature (456)..(456): "n" may be a, t, c, g, other or unknown
  misc_feature (476)..(476): "n" may be a, t, c, g, other or unknown
  misc_feature (479)..(479): "n" may be a, t, c, g, other or unknown
atttctgaaatttttatgtttcatttttcccagaggaataagatacattctgatcccataataatcgaatcacaaaagaaaccattgagggcatttgctttgctgaactgatgagatgaatgattaattgtctggaattcagcttcctggagaggcaaatggaggtataggaaggccaaaaattaaaattaaaattaaaaaccagaggaaagagaagagaagaaaaggaaagtnaaagagaaaaagaaagaaacgaaggagaaaaaactataaagtggaanagggagaaagtggaaagaatattcctttgggttgtatattgtcttctagggccaccatgacaaaataccacgactgggggatttaaacaacaccagttcatttttttcncagttctggagactggacctcccanatcnaggtgcaggccanactggtttcttctgaagtttcccnccctgggcttacaaatttcntcntcttactgt

SEQ ID NO: 9472 - DNA, 561 bp, Homo sapiens
  misc_feature (7)..(7): "n" may be a, t, c, g, other or unknown
  misc_feature (23)..(23): "n" may be a, t, c, g, other or unknown
  misc_feature (49)..(49): "n" may be a, t, c, g, other or unknown
  misc_feature (72)..(72): "n" may be a, t, c, g, other or unknown
  misc_feature (117)..(117): "n" may be a, t, c, g, other or unknown
  misc_feature (146)..(146): "n" may be a, t, c, g, other or unknown
  misc_feature (149)..(149): "n" may be a, t, c, g, other or unknown
  misc_feature (164)..(164): "n" may be a, t, c, g, other or unknown
  misc_feature (166)..(166): "n" may be a, t, c, g, other or unknown
  misc_feature (208)..(208): "n" may be a, t, c, g, other or unknown
  misc_feature (240)..(240): "n" may be a, t, c, g, other or unknown
  misc_feature (242)..(242): "n" may be a, t, c, g, other or unknown
  misc_feature (270)..(270): "n" may be a, t, c, g, other or unknown
  misc_feature (336)..(336): "n" may be a, t, c, g, other or unknown
  misc_feature (344)..(344): "n" may be a, t, c, g, other or unknown
  misc_feature (347)..(347): "n" may be a, t, c, g, other or unknown
  misc_feature (396)..(396): "n" may be a, t, c, g, other or unknown
  misc_feature (406)..(406): "n" may be a, t, c, g, other or unknown
  misc_feature (440)..(440): "n" may be a, t, c, g, other or unknown
  misc_feature (443)..(443): "n" may be a, t, c, g, other or unknown
  misc_feature (468)..(468): "n" may be a, t, c, g, other or unknown
  misc_feature (489)..(489): "n" may be a, t, c, g, other or unknown
  misc_feature (509)..(509): "n" may be a, t, c, g, other or unknown
  misc_feature (529)..(529): "n" may be a, t, c, g, other or unknown
  misc_feature (535)..(535): "n" may be a, t, c, g, other or unknown
  misc_feature (551)..(551): "n" may be a, t, c, g, other or unknown
  misc_feature (558)..(558): "n" may be a, t, c, g, other or unknown
atgctanggacgtggagatgttnaaacgacaaccaaaaatatatatatnaaaacaggaatgaaatctgtganaagaatatttttggttctaaagacgggtgcatccgtttgtcttcncccgaatcccttgctggagaccacacgancantgacattgcacggananggcagctttgggttccgccgccgtcactgaaaccaccggaangcggctcccgtcggaagcatcaccttctccanancagcggaagcttctttttgagttcctcncattttctgaatttgcaaatctgatggccagtctttcgattcctacaactgctgcactgctcgcanttgatgcnccnccggcagggcgcgcacattccgcagcgtttccgcttcttcttgccgganctgatggcanaagccagctctccctgcatggggtatcaccaagnccnccattttctcccgctctccggccangaaaaaacctgcccggggtcnttataaaaaagcctgggttnattggggaaacccccccttngggganattcgaatggcccttnaagggtncgg

SEQ ID NO: 9473 - DNA, 462 bp, Homo sapiens
  misc_feature (343)..(343): "n" may be a, t, c, g, other or unknown
  misc_feature (408)..(408): "n" may be a, t, c, g, other or unknown
  misc_feature (432)..(432): "n" may be a, t, c, g, other or unknown
  misc_feature (434)..(434): "n" may be a, t, c, g, other or unknown
  misc_feature (443)..(443): "n" may be a, t, c, g, other or unknown
  misc_feature (445)..(445): "n" may be a, t, c, g, other or unknown
  misc_feature (452)..(452): "n" may be a, t, c, g, other or unknown
  misc_feature (456)..(456): "n" may be a, t, c, g, other or unknown
cagcagacccaccaccaataccctgcttatgaataaaaacatttaaaacattgaaatccttgatttctccaggtctctgtcaggcttgccaccttttgggccactgaaggtttgtgacccacagcaaaggcagaggcaaaccaccccaccctttctcagttggggctgagaaagagctgggaccctggcagcccacacacagtctcttcataagctgtaataaatcacttatactccttctcccaaccgcccagctaggcttcctacttatgaggtttttcctcttctagattgttctactaagtgttcatttaaaaaacgcttttgttgtctaccttggggnaagggtttcacatcacagactgtccttccccagtccagaatgttccatctgctgccattcaaaangaatcaataaatctctttaaagtncnataatgttnanaattttnggtnttttct

SEQ ID NO: 9474 - DNA, 280 bp, Homo sapiens
  misc_feature (233)..(233): "n" may be a, t, c, g, other or unknown
  misc_feature (239)..(239): "n" may be a, t, c, g, other or unknown
  misc_feature (249)..(249): "n" may be a, t, c, g, other or unknown
  misc_feature (252)..(252): "n" may be a, t, c, g, other or unknown
  misc_feature (256)..(256): "n" may be a, t, c, g, other or unknown
  misc_feature (260)..(260): "n" may be a, t, c, g, other or unknown
  misc_feature (269)..(269): "n" may be a, t, c, g, other or unknown
caagggtttaataaattttatcttgataacatcaaaaacaagtttagcttttacactgcaatataaaaatacattagtcttcacattagttttacatggaaatatataattatttgaatatttaaatatagcttttctttaaccaaaaaaaaaaaaaaaaaaaaagtgttactcacagccctagttacataaataatttaaatgcacaaatgcaaaaacacacttcacacganattgtncacatactgntanaacncggnacaattacnataaaaattct

SEQ ID NO: 9475 - DNA, 366 bp, Homo sapiens
  misc_feature (1)..(366): "n" may be a, t, c, g, other or unknown
nnnnnnnnnnnnnnnnnnnnnnnnnnnnnnnnnnnnnnnnnnnnnnnnnnnnnnnnnnnnnnnnnnnnnnnnnnnnnnnnnnnnnnnnnnnnnnnnnnnnnnnnnnnnnnnnnnnnnnnnnnnnnnnnnnnnnnnnnnnnnnnnnnnnnnnnnnnnnnnnnnnnnnnnnnnnnnnnnnnnnnnnnnnnnnnnnnnnnnnnnnnnnnnnnnnnnnnnnnnnnnnnnnnnnnnnnnnnnnnnnnnnnnnnnnnnnnnnnnnnnnnnnnnnnnnnnnnnnnnnnnnnnnnnnnnnnnnnnnnnnnnnnnnnnnnnnnnnnnnnnnnnnnnnnnnnnnnnnnnnnnnnnnnnnnnnnnnnnnnnnnnnnn

SEQ ID NO: 9476 - DNA, 405 bp, Homo sapiens
  misc_feature (166)..(166): "n" may be a, t, c, g, other or unknown
  misc_feature (330)..(330): "n" may be a, t, c, g, other or unknown
  misc_feature (333)..(333): "n" may be a, t, c, g, other or unknown
  misc_feature (337)..(337): "n" may be a, t, c, g, other or unknown
  misc_feature (373)..(373): "n" may be a, t, c, g, other or unknown
  misc_feature (375)..(375): "n" may be a, t, c, g, other or unknown
  misc_feature (388)..(388): "n" may be a, t, c, g, other or unknown
  misc_feature (401)..(401): "n" may be a, t, c, g, other or unknown
ccatggaaaacactgtttatttgaaaacaatgagacctcaaatatgaaatatagttaacaatgacattgacactgttgctagcactttcccctaaaccacccataagtcttggacgcatgtgcatgcagcacacacacacacacacaaaaaccaaaaacaaagccnaaaaaaaaaaaaatcccaaacacaacaatccatgattgttcaatgactcctgatgccgggaggacaggctgttaaaaaaatttgtctcccacaatatctctggagtgggcacaaagcccatcacctgttagtgatcacagacattcagttaacctgtccttccngtnatcngaaaaaacaattcaaacccggaattccccaaaaccntnttttggtgaattntgggtttgaaaanaaaa

SEQ ID NO: 9477 - DNA, 374 bp, Homo sapiens
  misc_feature (154)..(154): "n" may be a, t, c, g, other or unknown
  misc_feature (160)..(160): "n" may be a, t, c, g, other or unknown
  misc_feature (210)..(210): "n" may be a, t, c, g, other or unknown
  misc_feature (316)..(316): "n" may be a, t, c, g, other or unknown
  misc_feature (333)..(333): "n" may be a, t, c, g, other or unknown
  misc_feature (337)..(337): "n" may be a, t, c, g, other or unknown
  misc_feature (339)..(339): "n" may be a, t, c, g, other or unknown
  misc_feature (342)..(342): "n" may be a, t, c, g, other or unknown
  misc_feature (350)..(350): "n" may be a, t, c, g, other or unknown
  misc_feature (367)..(367): "n" may be a, t, c, g, other or unknown
gggaaccaaaatttgcttttaaaatgtgagtttataacacttgaaggatttcattcttaactcccaattatataattacaaaaaaaatccaagtttcaggaaaacatacttaatcctaacataaaattcatgtcacttatcacaaagacagtcnagtgtntaaaggagaaacaaaacagaagcagtatttacaaatttaaactacatganatgttgtgaacaatcttttgttaataaacagcacgttacatacttttacatactacatttcaaaaatgcatctgtgaataatatgataaagcgcatagtgttgaanactttaaattaaatccnaggncntcntgttgaanacctgaaattaaattcnaggttgt

SEQ ID NO: 9478 - DNA, 443 bp, Homo sapiens
  misc_feature (113)..(113): "n" may be a, t, c, g, other or unknown
  misc_feature (166)..(166): "n" may be a, t, c, g, other or unknown
  misc_feature (168)..(168): "n" may be a, t, c, g, other or unknown
  misc_feature (266)..(266): "n" may be a, t, c, g, other or unknown
  misc_feature (274)..(274): "n" may be a, t, c, g, other or unknown
  misc_feature (288)..(288): "n" may be a, t, c, g, other or unknown
  misc_feature (297)..(297): "n" may be a, t, c, g, other or unknown
  misc_feature (368)..(368): "n" may be a, t, c, g, other or unknown
  misc_feature (397)..(397): "n" may be a, t, c, g, other or unknown
  misc_feature (404)..(404): "n" may be a, t, c, g, other or unknown
  misc_feature (410)..(410): "n" may be a, t, c, g, other or unknown
  misc_feature (422)..(422): "n" may be a, t, c, g, other or unknown
  misc_feature (432)..(432): "n" may be a, t, c, g, other or unknown
  misc_feature (434)..(434): "n" may be a, t, c, g, other or unknown
agcagaagttgtgtttattgcttctctcttgaaaatcagcagcatgcgatgcaatatttggtgcagagttattgtttcaaaaagtgagaaactacttaggtttaactgaaganggaacatgatctttattggcttatatgcaaagtttcattttggttttatgcanantttgcatagttcatgatttgtttctaatgaaaaactaaatgtgttgccagtgactgtgaaaaaaatcaggtgacagtagcaaacagaaaaatctgaanaaaaagcntaacttttaaagtnaaaaggtcngcaagaactgcttcagctgcagccagtgatgtcacctccatcaggttcactgctcggaaagcaaacacggnagctgccagcacagcaagaatttccaganaattgtntcctangattctatcccntaaaagcaananctgatctgt

SEQ ID NO: 9479 - DNA, 496 bp, Homo sapiens
  misc_feature (110)..(110): "n" may be a, t, c, g, other or unknown
  misc_feature (171)..(171): "n" may be a, t, c, g, other or unknown
  misc_feature (195)..(195): "n" may be a, t, c, g, other or unknown
  misc_feature (269)..(269): "n" may be a, t, c, g, other or unknown
  misc_feature (289)..(289): "n" may be a, t, c, g, other or unknown
  misc_feature (322)..(322): "n" may be a, t, c, g, other or unknown
  misc_feature (360)..(360): "n" may be a, t, c, g, other or unknown
  misc_feature (367)..(367): "n" may be a, t, c, g, other or unknown
  misc_feature (403)..(403): "n" may be a, t, c, g, other or unknown
  misc_feature (410)..(410): "n" may be a, t, c, g, other or unknown
  misc_feature (419)..(419): "n" may be a, t, c, g, other or unknown
  misc_feature (443)..(443): "n" may be a, t, c, g, other or unknown
  misc_feature (451)..(451): "n" may be a, t, c, g, other or unknown
  misc_feature (483)..(483): "n" may be a, t, c, g, other or unknown
  misc_feature (491)..(491): "n" may be a, t, c, g, other or unknown
gagacagggtcttgctttgtcgcccaggctggagtgcagtggtgcgatttcagctcactgcagcctctgcttcctgggttcaagcaattctcccacctcagcctccctantagctgggattacaggggcctgccaccaagcctggctaatttttttgtattcttagtaaanacaaggtttcaccatgttggccanactaatcttgaactcctgacctcaggcgatccatctgcctcagccccacaaagtgctgggattacaggcatganacaccacggccggccccaanttcttgaacattacacttttccaccaacatgtnggtattttcatgtggggaattaaccgggactggagganggaggtnaggaattgatacctgttcactttgcaactaacaaangaaaatnggttctttnaaaacatttacttttttccatgtnggcccaanataaacaccttaaaatttaattgtttaccttnaaggtttncctac

SEQ ID NO: 9480 - DNA, 346 bp, Homo sapiens
  misc_feature (12)..(12): "n" may be a, t, c, g, other or unknown
  misc_feature (36)..(36): "n" may be a, t, c, g, other or unknown
  misc_feature (44)..(44): "n" may be a, t, c, g, other or unknown
  misc_feature (60)..(60): "n" may be a, t, c, g, other or unknown
  misc_feature (96)..(96): "n" may be a, t, c, g, other or unknown
  misc_feature (114)..(114): "n" may be a, t, c, g, other or unknown
  misc_feature (131)..(131): "n" may be a, t, c, g, other or unknown
  misc_feature (157)..(157): "n" may be a, t, c, g, other or unknown
  misc_feature (178)..(178): "n" may be a, t, c, g, other or unknown
  misc_feature (180)..(180): "n" may be a, t, c, g, other or unknown
  misc_feature (193)..(193): "n" may be a, t, c, g, other or unknown
  misc_feature (252)..(252): "n" may be a, t, c, g, other or unknown
  misc_feature (257)..(257): "n" may be a, t, c, g, other or unknown
  misc_feature (277)..(277): "n" may be a, t, c, g, other or unknown
  misc_feature (294)..(295): "n" may be a, t, c, g, other or unknown
  misc_feature (328)..(328): "n" may be a, t, c, g, other or unknown
  misc_feature (331)..(331): "n" may be a, t, c, g, other or unknown
agcaaaaagtanacttttattacagcagcaactgangcgaatcnaatggccccccagggncaccactgcagcaccacctttctctcccgccccggncgccccagcgggattgtnaaattcggctcccctantgcccgtgggcctcctttccacacangctgggcgggaacggcaaatnancgactaacccccnactaaaaagcggctgctgaaaagcccaagcccacctctgttcaaaacaagttaacaaanttcanaagggaagaaaaaaagggangggaaagattattctcnnaacaggaccccccccccctcctgaattattaanganggaaagggcttccca

SEQ ID NO: 9481 - DNA, 490 bp, Homo sapiens
  misc_feature (239)..(239): "n" may be a, t, c, g, other or unknown
  misc_feature (357)..(357): "n" may be a, t, c, g, other or unknown
  misc_feature (427)..(427): "n" may be a, t, c, g, other or unknown
  misc_feature (432)..(432): "n" may be a, t, c, g, other or unknown
  misc_feature (449)..(449): "n" may be a, t, c, g, other or unknown
  misc_feature (451)..(451): "n" may be a, t, c, g, other or unknown
  misc_feature (455)..(455): "n" may be a, t, c, g, other or unknown
  misc_feature (473)..(473): "n" may be a, t, c, g, other or unknown
  misc_feature (475)..(475): "n" may be a, t, c, g, other or unknown
gagaattcaggacatttatttttctgcatggaaatttaactactgtataacacacgcacatacaaaacaaacccacaaagcaacagtgtgtaataggtagtgagagacacacaaaataagcatatttaaaacgcctacaaacagccttttttttttaggcaacaaaatacgtccagtccttgacatcttctcatactcacctagcaccacagatgcaaggacctaacagtaaacatgtncaatctcatgcttaacacctaaagcatgcactgaattgaatttgtatgttgtgatctattctactaagtatgcaatacatactttttcttactaatattttatacattaaattacccngcagcattttgaaattttaacattgatgttaaacaacttttgaaagatttatgaaacaagtttccagggntcccntcacgggtggtttgggntnaatngaaaaatggcaccccccncnaggttcctactgaat

SEQ ID NO: 9482 - DNA, 561 bp, Homo sapiens
  misc_feature (37)..(37): "n" may be a, t, c, g, other or unknown
  misc_feature (368)..(368): "n" may be a, t, c, g, other or unknown
  misc_feature (480)..(480): "n" may be a, t, c, g, other or unknown
  misc_feature (521)..(521): "n" may be a, t, c, g, other or unknown
  misc_feature (524)..(524): "n" may be a, t, c, g, other or unknown
  misc_feature (543)..(543): "n" may be a, t, c, g, other or unknown
  misc_feature (554)..(554): "n" may be a, t, c, g, other or unknown
aaagaaacatggtctcactctgttgcccaggctggantacagtggcacaattatagctcactgcagcctcaaactcctgggctcaagcaatcctcctgtctcagcctcctgagtagctggaactacaggtgtgtgctaccactcctggctaagaataccctttgtttggctggtcttaccttatagaaagagtaacagtaatagtacagtgctactccattatcaataggatatgtaactgtaggtttgtactacactagttttgcacaatcacctgtataatcactggcacatggctctaagactattgttgcgtcaagggatgaggtcaatcactaacactgtaaacagcaagtgaaacttaagtnacagaaaagaaagaactgatgcgaatgaaaattgctgaactctgctatatgataattctctagctctccactttagaaaagccagaatataaaccctcctggggatatgaanatgactttccattttgaatgatctctgaaatccttaatgcntcnggattatattaatttttcnccctgccaacntccccaa

SEQ ID NO: 9483 - DNA, 457 bp, Homo sapiens
  misc_feature (34)..(34): "n" may be a, t, c, g, other or unknown
  misc_feature (45)..(45): "n" may be a, t, c, g, other or unknown
  misc_feature (47)..(47): "n" may be a, t, c, g, other or unknown
  misc_feature (84)..(84): "n" may be a, t, c, g, other or unknown
  misc_feature (136)..(136): "n" may be a, t, c, g, other or unknown
  misc_feature (149)..(149): "n" may be a, t, c, g, other or unknown
  misc_feature (300)..(300): "n" may be a, t, c, g, other or unknown
  misc_feature (308)..(308): "n" may be a, t, c, g, other or unknown
  misc_feature (319)..(319): "n" may be a, t, c, g, other or unknown
  misc_feature (330)..(330): "n" may be a, t, c, g, other or unknown
  misc_feature (381)..(381): "n" may be a, t, c, g, other or unknown
  misc_feature (390)..(390): "n" may be a, t, c, g, other or unknown
  misc_feature (392)..(392): "n" may be a, t, c, g, other or unknown
  misc_feature (401)..(401): "n" may be a, t, c, g, other or unknown
  misc_feature (411)..(411): "n" may be a, t, c, g, other or unknown
  misc_feature (437)..(437): "n" may be a, t, c, g, other or unknown
  misc_feature (456)..(456): "n" may be a, t, c, g, other or unknown
attaacaacaaaaatttatttctcacaattctanaagctgggaantncaaaactaaagtgctggtacatttggtctctggtgangggccacttcctggttcataaaatgacaccttcttactgcttcctcacatantgaaagggacaangcaactctttgggatctcttttataagggactaatcccattgatgagggctcctccctcatgacctaatcaccttccaaaggccccacctcctaaaaccatcacctcaggggttaggatttcaatatatgaattttgaagggacacattcngaccacancttaaggacangggtttggggnagttaaaaaggaacttccaaggggaaaccaacattactaattttagattcncaactattnanaatttgaanattcctgaancttttcactatccattttccccatantttaacacaaataatatgnc

SEQ ID NO: 9484 - DNA, 559 bp, Homo sapiens
  misc_feature (245)..(245): "n" may be a, t, c, g, other or unknown
  misc_feature (266)..(266): "n" may be a, t, c, g, other or unknown
  misc_feature (268)..(268): "n" may be a, t, c, g, other or unknown
  misc_feature (314)..(314): "n" may be a, t, c, g, other or unknown
  misc_feature (399)..(399): "n" may be a, t, c, g, other or unknown
  misc_feature (440)..(440): "n" may be a, t, c, g, other or unknown
  misc_feature (468)..(468): "n" may be a, t, c, g, other or unknown
  misc_feature (471)..(471): "n" may be a, t, c, g, other or unknown
  misc_feature (512)..(512): "n" may be a, t, c, g, other or unknown
  misc_feature (526)..(526): "n" may be a, t, c, g, other or unknown
  misc_feature (545)..(545): "n" may be a, t, c, g, other or unknown
  misc_feature (547)..(547): "n" may be a, t, c, g, other or unknown
  misc_feature (549)..(549): "n" may be a, t, c, g, other or unknown
aagtttgggagctctttttattacactgagaaatctcagaaacgtacaaagcccatgaaagtagatgcatttcagaaaataagataaaacatttgcatacatacatattaatgacattttagttttgaattaaaaatattcatgattttgcattgaagcatcctgcctgtgaattaagtacattctgaaatactgggaaaagatttcatatatcctgtacttgaacctaaattcctataaatggntgagttatattctctttctananattaagttcacaatttgatttgtagactaatggttttattgattcnaagtatctttaaagagcagaaataggaaacaagcatacaccacacacacccctttagtttaagtgatatatcagatcaaagttgnaattaatataataatctttagtgcttttaattgtattgttncgttttcagtagaccaatggaaaatacntanaatccaactgcaaaaaaagttaggtaatgccggaatgaatnctctaaccatatcngggtttttatttcccattntncngattaattaa

SEQ ID NO: 9485 - DNA, 567 bp, Homo sapiens
  misc_feature (83)..(83): "n" may be a, t, c, g, other or unknown
  misc_feature (128)..(128): "n" may be a, t, c, g, other or unknown
  misc_feature (336)..(336): "n" may be a, t, c, g, other or unknown
  misc_feature (347)..(347): "n" may be a, t, c, g, other or unknown
  misc_feature (377)..(377): "n" may be a, t, c, g, other or unknown
  misc_feature (461)..(461): "n" may be a, t, c, g, other or unknown
  misc_feature (466)..(466): "n" may be a, t, c, g, other or unknown
  misc_feature (485)..(485): "n" may be a, t, c, g, other or unknown
  misc_feature (525)..(525): "n" may be a, t, c, g, other or unknown
  misc_feature (527)..(527): "n" may be a, t, c, g, other or unknown
  misc_feature (531)..(531): "n" may be a, t, c, g, other or unknown
  misc_feature (533)..(533): "n" may be a, t, c, g, other or unknown
  misc_feature (564)..(564): "n" may be a, t, c, g, other or unknown
attggcgggggagatggtactataacttgttatttatcagggcagatcacacatttggatcaaaaagaaaaaccagcaagtanatcctaaaacacatttcttaacctgagtcataactgaaaacatanactttaattacattttgttgaaaattcattcaactttggtgcttgtaaaagcacttatgtcaatttttgacacaaatcataaccctcagtacacaggtattttcaaaggaaacaagtcatcttaaagtaatatttttctatatgctaattgatacatctttatagcaaattgaaaattctgagtaaactgaaagtatgcttaacgacnaaataaatacngcatatatggttaacatatacatttcttantgtaaaggcagcaatgaaatttgtgtctcacaataaatctgtaaatccagttgctttctttctggaaattttatatagtgtccnccatnttccacaatgctggaaatntcttttttggcatcaatctatgcccaaatttccgaatacntntttncnccaaatgaaatttacttttaaacttttcccnaaa

SEQ ID NO: 9486 - DNA, 577 bp, Homo sapiens
  misc_feature (109)..(109): "n" may be a, t, c, g, other or unknown
  misc_feature (143)..(143): "n" may be a, t, c, g, other or unknown
  misc_feature (145)..(145): "n" may be a, t, c, g, other or unknown
  misc_feature (232)..(232): "n" may be a, t, c, g, other or unknown
  misc_feature (302)..(302): "n" may be a, t, c, g, other or unknown
  misc_feature (330)..(330): "n" may be a, t, c, g, other or unknown
  misc_feature (348)..(348): "n" may be a, t, c, g, other or unknown
  misc_feature (397)..(397): "n" may be a, t, c, g, other or unknown
  misc_feature (408)..(408): "n" may be a, t, c, g, other or unknown
  misc_feature (415)..(415): "n" may be a, t, c, g, other or unknown
  misc_feature (417)..(417): "n" may be a, t, c, g, other or unknown
  misc_feature (470)..(470): "n" may be a, t, c, g, other or unknown
  misc_feature (496)..(496): "n" may be a, t, c, g, other or unknown
  misc_feature (498)..(498): "n" may be a, t, c, g, other or unknown
  misc_feature (519)..(519): "n" may be a, t, c, g, other or unknown
  misc_feature (542)..(542): "n" may be a, t, c, g, other or unknown
  misc_feature (572)..(572): "n" may be a, t, c, g, other or unknown
gaattaagaaactaatactttattaggaatgttaatgtccattaaaagtataaccaacatccattcataagagtgacctttggaaagattttgtaagggtgcaaataanactttaagggaagtggacatccagtacaaagaananattccatgtttgtggctcaatgtcatacacttaaatttcacagtgcctcaagattctcaggagggcacccacatgttcccatgcgtntccggtgctttgacataaggaatgttccatatccatggccgatctttacttccatacagttctggaggcnaatcatatggcacagggaaaggtggccnttggctcctggctgccancgaaaaacttctgtttcactttgaaactgtctaaaaccaaatgctgaanggaaagaaaangaacccnanctcctaggaacggatcatcacctgggttccattcctcctccaatgctccccangccaccttggaacaaatttgcccttntnacaaggaaccaacccattttnctgaattctggaaaaaggccccnattttttcttaatattttgccttggcattnctgcc

SEQ ID NO: 9487 - DNA, 550 bp, Homo sapiens
  misc_feature (23)..(23): "n" may be a, t, c, g, other or unknown
  misc_feature (195)..(195): "n" may be a, t, c, g, other or unknown
  misc_feature (255)..(255): "n" may be a, t, c, g, other or unknown
  misc_feature (259)..(259): "n" may be a, t, c, g, other or unknown
  misc_feature (413)..(413): "n" may be a, t, c, g, other or unknown
  misc_feature (443)..(443): "n" may be a, t, c, g, other or unknown
  misc_feature (480)..(480): "n" may be a, t, c, g, other or unknown
  misc_feature (490)..(490): "n" may be a, t, c, g, other or unknown
  misc_feature (517)..(517): "n" may be a, t, c, g, other or unknown
  misc_feature (522)..(522): "n" may be a, t, c, g, other or unknown
  misc_feature (533)..(533): "n" may be a, t, c, g, other or unknown
  misc_feature (535)..(535): "n" may be a, t, c, g, other or unknown
  misc_feature (549)..(549): "n" may be a, t, c, g, other or unknown
gaagattattaaattaccacccngagaccaaaaaaaaaaaatagtgaactcactattaaatgagatgtttttaaccttaactttttttataatacatacatacataaaaactgcacaaagtatgtgtcaacaaaatacagtctttaaaacttaaatatcatttaaacagacttaattgcatacattttatatacncacaaagtcaggatttttacatggcagggaaatactgtggaatgatgaggtctgcagganacanatgctatcaaatgaggactctggggtggtattttctaaaaatggggttctgaaataaatttttattgtatgtagcttattttacttctaagaggaacaaaagatacttttgggcagccaaagtatttctacttcctgcttaaaacattcaggcnaatgaaatgattataataattaggttagcnccttattaatctctcggtctccatttccttatcttcntaatacccanaaaatttatccttcctttctcccccanccccncctggccttcntnaaattttttttttna

SEQ ID NO: 9488 - DNA, 536 bp, Homo sapiens
  misc_feature (63)..(63): "n" may be a, t, c, g, other or unknown
  misc_feature (99)..(99): "n" may be a, t, c, g, other or unknown
  misc_feature (133)..(133): "n" may be a, t, c, g, other or unknown
  misc_feature (144)..(144): "n" may be a, t, c, g, other or unknown
  misc_feature (216)..(216): "n" may be a, t, c, g, other or unknown
  misc_feature (222)..(222): "n" may be a, t, c, g, other or unknown
  misc_feature (273)..(273): "n" may be a, t, c, g, other or unknown
  misc_feature (343)..(343): "n" may be a, t, c, g, other or unknown
  misc_feature (361)..(361): "n" may be a, t, c, g, other or unknown
  misc_feature (374)..(374): "n" may be a, t, c, g, other or unknown
  misc_feature (463)..(463): "n" may be a, t, c, g, other or unknown
  misc_feature (476)..(476): "n" may be a, t, c, g, other or unknown
  misc_feature (485)..(485): "n" may be a, t, c, g, other or unknown
  misc_feature (499)..(499): "n" may be a, t, c, g, other or unknown
  misc_feature (503)..(503): "n" may be a, t, c, g, other or unknown
  misc_feature (510)..(510): "n" may be a, t, c, g, other or unknown
  misc_feature (516)..(516): "n" may be a, t, c, g, other or unknown
caattcacaatagatttattttacataaaagaaaaagcttgctgttaatgaaaaatccagtanaaaacagttctgctttaagttgaggctcaaaagtanaagctgcttattagtgaaacctcaataaaaaganaattttgtaanaaaacattcttggcatgaaagctctaacataaattctgtaatgaaatatttaccatgcaactttattggcanaaaggncagtttctgatggctggtattttcagtctcttaacacattaacatgggaanatacttaacctgctttatttagagttaattgtatataaatacaaagtcatgatgggcaacctttccatantccacctacttaattgancagttctaagtangtaattggcaccttgcccttctggtttcccctttcccccattagccagtctgaatccattccaacaacactgaacacagtgatccctcntctgccaaaaatnataattccntactgtttgctgcntccnaacctanaaaaanccgggctttctggtggcact

SEQ ID NO: 9489 - DNA, 542 bp, Homo sapiens
  misc_feature (48)..(48): "n" may be a, t, c, g, other or unknown
  misc_feature (51)..(51): "n" may be a, t, c, g, other or unknown
  misc_feature (192)..(192): "n" may be a, t, c, g, other or unknown
  misc_feature (197)..(197): "n" may be a, t, c, g, other or unknown
  misc_feature (359)..(359): "n" may be a, t, c, g, other or unknown
  misc_feature (381)..(381): "n" may be a, t, c, g, other or unknown
  misc_feature (410)..(410): "n" may be a, t, c, g, other or unknown
  misc_feature (432)..(432): "n" may be a, t, c, g, other or unknown
  misc_feature (442)..(442): "n" may be a, t, c, g, other or unknown
  misc_feature (454)..(454): "n" may be a, t, c, g, other or unknown
  misc_feature (501)..(501): "n" may be a, t, c, g, other or unknown
  misc_feature (509)..(509): "n" may be a, t, c, g, other or unknown
  misc_feature (529)..(529): "n" may be a, t, c, g, other or unknown
acctgtgcatatttatttattatccacaaaaatggaggtgcggaaaanaanaaggagacaggagggaacgtactctcccactggaactctggggcccactgaggcaccattattggggatttcagggtggctgggcactgcaaactgctccctcctctgtggtccctgaaaaaacccacacgcctgcttcanacgtntccacgcacaccagtcctcacagacacacacacacatgcatggaggcaataaatatgttccgtaccaaactgcccccagcctgacgcttcagggggccccctccaaaagggaagggtttaagtgctcaatttttttcggggggggggcaaggggggggcaangaaattgggattggaaagccanactctgttatctccatttgctgactaaangccaatcctggggtcttccccnggaaaaggtntgggaaacactntttctctataaccccaagctaccctgttttcatgctggaacccaaanaagggctncccccccaaaaattcccctnccaatcttttttc

SEQ ID NO: 9490 - DNA, 443 bp, Homo sapiens
  misc_feature (164)..(164): "n" may be a, t, c, g, other or unknown
  misc_feature (409)..(409): "n" may be a, t, c, g, other or unknown
  misc_feature (417)..(417): "n" may be a, t, c, g, other or unknown
  misc_feature (423)..(423): "n" may be a, t, c, g, other or unknown
  misc_feature (427)..(427): "n" may be a, t, c, g, other or unknown
  misc_feature (438)..(438): "n" may be a, t, c, g, other or unknown
  misc_feature (441)..(441): "n" may be a, t, c, g, other or unknown
  misc_feature (443)..(443): "n" may be a, t, c, g, other or unknown
gacagtttaactctttattctccttcacagcccagcagaccccaaggcgggcagagggtgcaggccgtccccaggatgctggtcatgggccagggtcatccttgcacctgcggcagtaggggcagcagccatgctgaagcaccagcaactcatagtcctcagantggagcatctggaagcaggaggggcacatggtaatggaggcgtcaggcagcagtgagcggaagtattgccacctcaggggtgggggccatcgcttgatgaggacatcccggcggctcatggagcgcagcaccagccggctcaccaccactggcacgaactctgagccaccttgctcaaagctcagcttagctgtgaacgggtcctcatctccgatggagtccttggtctccactagccgcagaantctggganctgttntttngcaatctctanctntn

SEQ ID NO: 9491 - DNA, 526 bp, Homo sapiens
  misc_feature (35)..(35): "n" may be a, t, c, g, other or unknown
  misc_feature (53)..(53): "n" may be a, t, c, g, other or unknown
  misc_feature (85)..(85): "n" may be a, t, c, g, other or unknown
  misc_feature (87)..(87): "n" may be a, t, c, g, other or unknown
  misc_feature (173)..(173): "n" may be a, t, c, g, other or unknown
  misc_feature (189)..(189): "n" may be a, t, c, g, other or unknown
  misc_feature (262)..(262): "n" may be a, t, c, g, other or unknown
  misc_feature (265)..(265): "n" may be a, t, c, g, other or unknown
  misc_feature (279)..(279): "n" may be a, t, c, g, other or unknown
  misc_feature (316)..(316): "n" may be a, t, c, g, other or unknown
  misc_feature (340)..(340): "n" may be a, t, c, g, other or unknown
  misc_feature (453)..(453): "n" may be a, t, c, g, other or unknown
  misc_feature (459)..(459): "n" may be a, t, c, g, other or unknown
  misc_feature (490)..(490): "n" may be a, t, c, g, other or unknown
  misc_feature (496)..(496): "n" may be a, t, c, g, other or unknown
  misc_feature (502)..(502): "n" may be a, t, c, g, other or unknown
  misc_feature (516)..(516): "n" may be a, t, c, g, other or unknown
  misc_feature (521)..(521): "n" may be a, t, c, g, other or unknown
aatttttaattttcgtgggcacatagtttattganaatttttttttttttganatggcaggggtctcatatgttccccaaactanantgcagtggctattcacaggcgccgtctagcgcactacaaccttaaactcctgggctcaagcaattctcctgcctcagccttgggantagctgggattacaantgcccgccaccacgcctggtctgccaatactttctatcagtctgtcatgtttactgtcttttcctccatacanaantttttccttctcanttgggtcaagtccattgacctttctgttacagcttgnaattttgtgtcttacgtaaaaaangtgcccctgctctcactttctgcacaactatcaggtccagctcataacaattcttctatttatccatccactgccccaagaactgcctgggcattcaatggcccgcaaccctnttccancccaaaggtaaaactccgggccctggggaantcccanaaacancccggaaatggggnaactntttgg

SEQ ID NO: 9492 - DNA, 543 bp, Homo sapiens
  misc_feature (179)..(179): "n" may be a, t, c, g, other or unknown
  misc_feature (181)..(181): "n" may be a, t, c, g, other or unknown
  misc_feature (231)..(231): "n" may be a, t, c, g, other or unknown
  misc_feature (340)..(340): "n" may be a, t, c, g, other or unknown
  misc_feature (346)..(346): "n" may be a, t, c, g, other or unknown
  misc_feature (473)..(473): "n" may be a, t, c, g, other or unknown
  misc_feature (475)..(475): "n" may be a, t, c, g, other or unknown
  misc_feature (489)..(489): "n" may be a, t, c, g, other or unknown
  misc_feature (495)..(495): "n" may be a, t, c, g, other or unknown
  misc_feature (505)..(505): "n" may be a, t, c, g, other or unknown
  misc_feature (512)..(512): "n" may be a, t, c, g, other or unknown
  misc_feature (518)..(518): "n" may be a, t, c, g, other or unknown
ctttcctttcctttgacagagtttcgctctgtcgcccaggctggaatgaagtggcacaatcttggctcactgcaatctccgcctccccggttcaagcaattttcctgcctcagcttcctgtgtagctgggattacaggcgcccaccatcacgcctgggtaatttttgtatttttagtananatggggtctcaccctgttggccaggctggtcttgaactcctgacctcaantgatctgcctgcctcagcctcccaaagtgctgcaattacaggtgtgagccaccatgcccagcttgaaccacttttattttattccttctcttccctaaaaaaaattgangataanctctgccttttttcatcaaccataataagtatggtatccattcactacttgactgctggaaaactcaggacatttggacaaaatgcttcaaactggggccaaaattacctgtccctccaaaaaactnanttctgggcataccntctctntttttggaangcccatnaaattnaacctaactcctttttcaaaagtct

SEQ ID NO: 9493 - DNA, 532 bp, Homo sapiens
  misc_feature (390)..(390): "n" may be a, t, c, g, other or unknown
  misc_feature (442)..(442): "n" may be a, t, c, g, other or unknown
  misc_feature (500)..(500): "n" may be a, t, c, g, other or unknown
  misc_feature (507)..(507): "n" may be a, t, c, g, other or unknown
  misc_feature (521)..(522): "n" may be a, t, c, g, other or unknown
  misc_feature (528)..(528): "n" may be a, t, c, g, other or unknown
  misc_feature (531)..(531): "n" may be a, t, c, g, other or unknown
atttttaaagtaacatttaatgaatacacatttataaaagccatcatcccttaacatggggaaagtgtacaaaaataatgtgaaagtgtaaaaatttttctagaatacaggaaacatatcagcagtaaagaagtttagtttaactttttttttaaatgtaaaatagtttggatctgttaaaaggaatacagttcgcccaaagcacttattttcatctgttgtaaactcattctttctaccttaagtaaactggaggagtcagctgtgttaatatggtcaaattaatttcatagttttgggagcagggaggttgtgggaaggacagaaggagaacttgggctttctttggtcagctggtggggcttggagcacttgtggttggggccaaangtcaggtctggaaatgcagctattatgccaaaaccaccagaatgctctttancttcaggcttcatgaattgcttttaactactccggttgaacatttttactaagctatnaaaattnaaattcctttttcnntaaggnccnc

SEQ ID NO: 9494 - DNA, 568 bp, Homo sapiens
  misc_feature (39)..(39): "n" may be a, t, c, g, other or unknown
  misc_feature (171)..(171): "n" may be a, t, c, g, other or unknown
  misc_feature (327)..(327): "n" may be a, t, c, g, other or unknown
  misc_feature (351)..(351): "n" may be a, t, c, g, other or unknown
  misc_feature (355)..(355): "n" may be a, t, c, g, other or unknown
  misc_feature (363)..(363): "n" may be a, t, c, g, other or unknown
  misc_feature (366)..(366): "n" may be a, t, c, g, other or unknown
  misc_feature (376)..(376): "n" may be a, t, c, g, other or unknown
  misc_feature (454)..(454): "n" may be a, t, c, g, other or unknown
  misc_feature (495)..(495): "n" may be a, t, c, g, other or unknown
  misc_feature (499)..(499): "n" may be a, t, c, g, other or unknown
  misc_feature (520)..(520): "n" may be a, t, c, g, other or unknown
  misc_feature (524)..(524): "n" may be a, t, c, g, other or unknown
  misc_feature (548)..(548): "n" may be a, t, c, g, other or unknown
  misc_feature (560)..(560): "n" may be a, t, c, g, other or unknown
gagacagggtcttattctgttgtccaggctggagtgtantggtgtgatcacagctcactgcagcttcaaactcctgggttcaagcaactcttccacctcagcctctcagtagctgggactacaggtgtgtctcatgacacctggctaatttttaaatttttttttgcaganacagagtctccctatgttgcccaggctggtctcagactcctgggctcaaggaatcctcctgcctcagcctcccaaagtgctaggattacaggcatgagccactgcacctagccaggatccacttcttacactatattgtattttgataatataaantaaaatgcattgatccattggcanatanaaatgaantcngaaataaaangcattcaaccccacacaaaactaacctgaggcaaccttctactctaatgcccctacgttcagtgcataaaaaatcatnacttggcagggtgggacggaaaatgcttttttttaaatacntttncccccccccttattccaaacntaantttttgttgttataaaatccgggnaattccccccanaaaaaaac

SEQ ID NO: 9495 - DNA, 404 bp, Homo sapiens
  misc_feature (179)..(179): "n" may be a, t, c, g, other or unknown
  misc_feature (181)..(181): "n" may be a, t, c, g, other or unknown
  misc_feature (341)..(341): "n" may be a, t, c, g, other or unknown
  misc_feature (344)..(344): "n" may be a, t, c, g, other or unknown
  misc_feature (352)..(352): "n" may be a, t, c, g, other or unknown
  misc_feature (389)..(389): "n" may be a, t, c, g, other or unknown
  misc_feature (394)..(394): "n" may be a, t, c, g, other or unknown
  misc_feature (396)..(396): "n" may be a, t, c, g, other or unknown
  misc_feature (401)..(401): "n" may be a, t, c, g, other or unknown
atccttttttgacatgggagtctcactctttcgcccagcctgaagtgcaggggcacgatcttggcttactgcaactccacctcctgggttcaagcgattctcctgcctcagcctcccgcgtggctgggattataggcacccgccaccacacctggctaatttttgcatttttagtaaananagggttgatttcaccacattggccaggctggtcttgaactcctgacctcaggtgatccacccacctcggccttccaaagtgttgggattacaggcgtgagccactgcacccggccctgaatgtccttgtttttagaaaatacacatgttaatatttatangtnaaagggtntcacgtctacaacttatttccaaatggttcagaaacnaaccntntgttnaca

SEQ ID NO: 9496 - DNA, 575 bp, Homo sapiens
  misc_feature (58)..(58): "n" may be a, t, c, g, other or unknown
  misc_feature (127)..(127): "n" may be a, t, c, g, other or unknown
  misc_feature (286)..(286): "n" may be a, t, c, g, other or unknown
  misc_feature (376)..(376): "n" may be a, t, c, g, other or unknown
  misc_feature (442)..(442): "n" may be a, t, c, g, other or unknown
  misc_feature (452)..(452): "n" may be a, t, c, g, other or unknown
  misc_feature (458)..(458): "n" may be a, t, c, g, other or unknown
  misc_feature (469)..(469): "n" may be a, t, c, g, other or unknown
  misc_feature (499)..(499): "n" may be a, t, c, g, other or unknown
  misc_feature (509)..(509): "n" may be a, t, c, g, other or unknown
  misc_feature (544)..(544): "n" may be a, t, c, g, other or unknown
  misc_feature (549)..(549): "n" may be a, t, c, g, other or unknown
  misc_feature (563)..(563): "n" may be a, t, c, g, other or unknown
  misc_feature (573)..(573): "n" may be a, t, c, g, other or unknown
  misc_feature (575)..(575): "n" may be a, t, c, g, other or unknown
gtaaatttgtttaaattctttgtaaattctggatattagccctttgtcagatgggtanattgtaaaaattttctcccattctgtaggttgcctgttcactctgatggtagtttcttttgctgtgcanaagctctttagtttaattagatcccatttgtcaattttggcttttgttgccattgcttttggtgttttagtcatgaagtctttgcacatgcctatgggctgaatggtattgcctgggttttcttctagggttattatggttttaggtctaacatttaantctttaatccatcttgaattaatttttgtataaggtgtaaggaagggatccagtttcagctttctacatatggctagccagttttcccancaccatttattaaatagggaccctttccccatttcttgtttttgccaggtttgtcaaaaatcaaanaattgtaaangttttngtaataattcngaaggcctgttccgttcccatgggccaaanccccgttttnggtaacaataaccaaaccgtttttgggtaccgtanccctntttttaaaattttnaaaatccggntn

SEQ ID NO: 9497 - DNA, 564 bp, Homo sapiens
  misc_feature (375)..(375): "n" may be a, t, c, g, other or unknown
  misc_feature (401)..(401): "n" may be a, t, c, g, other or unknown
  misc_feature (501)..(501): "n" may be a, t, c, g, other or unknown
  misc_feature (505)..(505): "n" may be a, t, c, g, other or unknown
  misc_feature (523)..(523): "n" may be a, t, c, g, other or unknown
  misc_feature (551)..(551): "n" may be a, t, c, g, other or unknown
  misc_feature (554)..(554): "n" may be a, t, c, g, other or unknown
  misc_feature (557)..(557): "n" may be a, t, c, g, other or unknown
  misc_feature (559)..(559): "n" may be a, t, c, g, other or unknown
attattctggctagtgatctatctattttgttaatctcttcaaaaaaccaggtcctggattcattgatttttttgaagggtttttcatgtctctatctccttcagttctgctctgatcttagttatttcttgtcttctggtagcttttgaatttgtttgctcttgcttctctagttcttttagttgtgatgttagggtgttgactttagatctttcctgctttctcctgtgggcatttagtgctatacatttctctccaaacattgctttagctgtgtcccacagattctggtacattgtgtctttgttctcattggtttcaaaaaacttatttatttctgccttaatttcgttatttacccagtagtcattcangagcaggttgttcagtttccatgtanttgtgcggttttgaattaatttccttaatcctgaattcctaatttgaatgcacctgtggtcctgaaaaaaaaatgttgtgaattcccgttcctttgcatnccgngttttaatgttttaactncccaataaagttggtcaattttaaaaanaanttncnaaatt

SEQ ID NO: 9498 - DNA, 568 bp, Homo sapiens
  misc_feature (5)..(5): "n" may be a, t, c, g, other or unknown
  misc_feature (205)..(205): "n" may be a, t, c, g, other or unknown
  misc_feature (239)..(239): "n" may be a, t, c, g, other or unknown
  misc_feature (510)..(510): "n" may be a, t, c, g, other or unknown
  misc_feature (549)..(549): "n" may be a, t, c, g, other or unknown
ctttnaatttatctatgaactcataggtccttcatctttcttttgttggacattaaatgctttgggaaaggttttggggtctgggtgctgacttttgaatccccctgattattattttttaaaaaattccttatattatttcggtgggcagcattattttatcccactgcgggtcctgagcagggaatttatgatttgctgccanaacattttgacctggaggatgtttacgttcccanatcgtatttctttttttccttgaaaaaataatacctaggatgcacactgattcagcccaagtatataactgtgggcctaaaaactgatcaatttgatctgccaccctgttaggattatttaacagtggctttagttctctttttatactccaaacttcagacccagtaaggggagcatccacaaaaccaatagcttctcctccttggggaactttccttaaaggaaaaaatgttgaaatttactttttgggggggcaggaaaaagggaaantctgaatatcctcctacattgttttaatttttgttgganttctttcctttaaaaaaag

SEQ ID NO: 9499 - DNA, 484 bp, Homo sapiens
  misc_feature (26)..(26): "n" may be a, t, c, g, other or unknown
  misc_feature (77)..(77): "n" may be a, t, c, g, other or unknown
  misc_feature (118)..(118): "n" may be a, t, c, g, other or unknown
  misc_feature (172)..(172): "n" may be a, t, c, g, other or unknown
  misc_feature (193)..(193): "n" may be a, t, c, g, other or unknown
  misc_feature (317)..(317): "n" may be a, t, c, g, other or unknown
  misc_feature (319)..(319): "n" may be a, t, c, g, other or unknown
  misc_feature (321)..(321): "n" may be a, t, c, g, other or unknown
  misc_feature (365)..(365): "n" may be a, t, c, g, other or unknown
  misc_feature (403)..(403): "n" may be a, t, c, g, other or unknown
  misc_feature (407)..(407): "n" may be a, t, c, g, other or unknown
  misc_feature (438)..(438): "n" may be a, t, c, g, other or unknown
  misc_feature (449)..(449): "n" may be a, t, c, g, other or unknown
  misc_feature (455)..(455): "n" may be a, t, c, g, other or unknown
  misc_feature (461)..(461): "n" may be a, t, c, g, other or unknown
  misc_feature (473)..(473): "n" may be a, t, c, g, other or unknown
acgtgaggtctcactccatcgcccangctggaatgctgtggcgcaatcacagttcatgcagcctccacccctggggntcaagtgatcctcccacctcagcttctcaagtagctgggantacaggcgcatgccaccacacccagccaatttttgtatttttttgtaaaaacanaattttgccacgttgtccganctggtctctaactcctgggctcaagcttccacctcccaaagtgctgggattataggcgtgagccactgcgcctggcctatttttcctattcttaaagtatttttttttgtttttctccaccaananantttccatctttccttgtgtatgttgaggtttcatccatgtccancaggggctctggcctttgcaataaaatctacttatgcnccanataaaaacattgcacactaactggaaaatcnttaaaaaaacncctccncttttntactttaaaaanaaagttcccgt

SEQ ID NO: 9500 - DNA, 513 bp, Homo sapiens
  misc_feature (434)..(434): "n" may be a, t, c, g, other or unknown
  misc_feature (447)..(447): "n" may be a, t, c, g, other or unknown
  misc_feature (460)..(460): "n" may be a, t, c, g, other or unknown
  misc_feature (477)..(477): "n" may be a, t, c, g, other or unknown
  misc_feature (482)..(482): "n" may be a, t, c, g, other or unknown
  misc_feature (486)..(486): "n" may be a, t, c, g, other or unknown
  misc_feature (509)..(509): "n" may be a, t, c, g, other or unknown
ggtggatgttagattattttaatttgctgatagtgcattcagtatgaggttgattttttacaactgctgattcaaatactgtcacaaaatatttgaaaatcgatctttatgtatcaccaagtaacttttccataagtagtatccacaaatacaaaatcactgaatataaattttcagctgtattttctgatctggttacataaatgttctttgatttaaattaagccaaagttggagctaaacagattttctgcaaccatttcatctttaagatgaagttaaagatttgcatttgaaatctcccattattgaattggaagtagcagttccagttaatgtccagcatcctctgaatgccaatggtctttgagtaaacatatgaaccttcatcgcttttagttgtttaagacaccacttcacatgatcagtaagtnacaacaacaaccncttggtaaatgcncatgaatgccaatcccngtttnaaanatttggggttaaaggataaaacntttt

SEQ ID NO: 9501 - DNA, 482 bp, Homo sapiens
  misc_feature (40)..(40): "n" may be a, t, c, g, other or unknown
  misc_feature (394)..(394): "n" may be a, t, c, g, other or unknown
  misc_feature (434)..(434): "n" may be a, t, c, g, other or unknown
  misc_feature (439)..(439): "n" may be a, t, c, g, other or unknown
  misc_feature (446)..(446): "n" may be a, t, c, g, other or unknown
  misc_feature (473)..(473): "n" may be a, t, c, g, other or unknown
  misc_feature (477)..(477): "n" may be a, t, c, g, other or unknown
  misc_feature (481)..(481): "n" may be a, t, c, g, other or unknown
cttcttttctttcttttctttctgttgatttgatgtcgangtaagtgggatagtgctggttactgggtgttatgcttggctccaaaatttctgactctaagccaagtcttttcaaatcctcttggtatgctttcagggcagctgcctccattgcagcaaactcctttgatgccttttcttcttcctttgccttatccaggcttttctgtttaatctcactgatcctttttgccacattttccttatgattctttcctctttcatgaaattcaacactcttgaaatgaaaagagaaaataacaaaagaaaactacataaacatcataaaattcatagtaaacataattttctcataaacatgagaaaattaaaattaaaatgaatggcagaaaanatgaaaacattaatttaatgcaaattgggccctttaatcnaattnaatgctngggaactaccttggtttaataataatnttcnccgna

SEQ ID NO: 9502 - DNA, 323 bp, Homo sapiens
  misc_feature (94)..(94): "n" may be a, t, c, g, other or unknown
  misc_feature (134)..(134): "n" may be a, t, c, g, other or unknown
  misc_feature (146)..(146): "n" may be a, t, c, g, other or unknown
  misc_feature (150)..(150): "n" may be a, t, c, g, other or unknown
  misc_feature (219)..(219): "n" may be a, t, c, g, other or unknown
  misc_feature (257)..(257): "n" may be a, t, c, g, other or unknown
  misc_feature (260)..(260): "n" may be a, t, c, g, other or unknown
  misc_feature (270)..(270): "n" may be a, t, c, g, other or unknown
  misc_feature (276)..(276): "n" may be a, t, c, g, other or unknown
  misc_feature (285)..(285): "n" may be a, t, c, g, other or unknown
  misc_feature (298)..(298): "n" may be a, t, c, g, other or unknown
  misc_feature (321)..(321): "n" may be a, t, c, g, other or unknown
acagggataaataaatcaataataaatagaaagcaagcagcccagtccctgatccctgggctgagagcccttccaccaggcccaagtccaggangagacaagccctggtctttgcgctgggctggccagtccanaaggctccaganggangcaggcagggtcccggggccctcggcgtgtgcaggtctggctcaattgttattcattatccaccaggangctgggaaaaacacagtggtgagggtgtccggggcccncangtggtccatnaagatncgctggaangccttgctgccangcgactgctggtgccttctccanga

SEQ ID NO: 9503 - DNA, 395 bp, Homo sapiens
  misc_feature (6)..(6): "n" may be a, t, c, g, other or unknown
  misc_feature (207)..(207): "n" may be a, t, c, g, other or unknown
  misc_feature (354)..(354): "n" may be a, t, c, g, other or unknown
  misc_feature (357)..(357): "n" may be a, t, c, g, other or unknown
  misc_feature (369)..(370): "n" may be a, t, c, g, other or unknown
  misc_feature (372)..(372): "n" may be a, t, c, g, other or unknown
  misc_feature (382)..(382): "n" may be a, t, c, g, other or unknown
  misc_feature (384)..(384): "n" may be a, t, c, g, other or unknown
aagtanagacaaggtcttgctatgttgcccaggctggtcttgaactcctgagctcaaacaatcctcccgccttggcctcccaaactgttgggattacaagcatgagccaccatgcctggcctatcaatttttctcaccatgacaactgacttgggtcatgtcctcatttcacacctgcctcattgtgctttcccatctggttctganttcctctaggatcaaaggaccaagttcttactattcatgttcatatcccagtgttattgcatataatttcagctggctgaaaaaaggattatatgttaactgaaaaaacaacaacaacaacaaaaaaaacacatatctctgctgggnaanacatgaaacttnngnggaaagatcntnggattattacc

SEQ ID NO: 9504 - DNA, 558 bp, Homo sapiens
  misc_feature (35)..(35): "n" may be a, t, c, g, other or unknown
  misc_feature (42)..(42): "n" may be a, t, c, g, other or unknown
  misc_feature (95)..(95): "n" may be a, t, c, g, other or unknown
  misc_feature (131)..(131): "n" may be a, t, c, g, other or unknown
  misc_feature (154)..(154): "n" may be a, t, c, g, other or unknown
  misc_feature (157)..(157): "n" may be a, t, c, g, other or unknown
  misc_feature (188)..(188): "n" may be a, t, c, g, other or unknown
  misc_feature (269)..(269): "n" may be a, t, c, g, other or unknown
  misc_feature (271)..(271): "n" may be a, t, c, g, other or unknown
  misc_feature (285)..(285): "n" may be a, t, c, g, other or unknown
  misc_feature (304)..(304): "n" may be a, t, c, g, other or unknown
  misc_feature (317)..(317): "n" may be a, t, c, g, other or unknown
  misc_feature (320)..(320): "n" may be a, t, c, g, other or unknown
  misc_feature (334)..(334): "n" may be a, t, c, g, other or unknown
  misc_feature (396)..(396): "n" may be a, t, c, g, other or unknown
  misc_feature (427)..(427): "n" may be a, t, c, g, other or unknown
  misc_feature (442)..(442): "n" may be a, t, c, g, other or unknown
  misc_feature (477)..(478): "n" may be a, t, c, g, other or unknown
  misc_feature (485)..(485): "n" may be a, t, c, g, other or unknown
  misc_feature (497)..(497): "n" may be a, t, c, g, other or unknown
  misc_feature (506)..(506): "n" may be a, t, c, g, other or unknown
  misc_feature (553)..(553): "n" may be a, t, c, g, other or unknown
cagctttccaacccagctcatggagctttattcanacgggantgacaacatcctgcttcgttcttgctgcccttgaaggggcaggccctactganccatattccctaaaaacccaatgccgaaggcccatntttgacctcccactttattcaantcncctaggactagggctggggccttcctaaaanccccctctcaaaacctgttctcacccacccaccactcccgttgtcaggcccagggaggacccatgaatgacaaaaatcatntngggatattccctgnactgggaatcccctgccancttcaaggacatntcntctgacacaggganaactgacatctgtcatattcttctgcctcacgttcacacacacacacacacacacgcatacncactcttaggctttcaaaaaaggaatttatntggcaaaatttaccnctggcccttttcccccccccctgaaagaatccctnnaaaaatnaacttgcccaanggggcctcnttcttggttgcccaaaaattgccccctgggcccaacttattttaacnctttt

SEQ ID NO: 9505 - DNA, 465 bp, Homo sapiens
  misc_feature (55)..(55): "n" may be a, t, c, g, other or unknown
  misc_feature (361)..(361): "n" may be a, t, c, g, other or unknown
  misc_feature (459)..(465): "n" may be a, t, c, g, other or unknown
aactgatgaattctggtgatattttatttagaaaaagataatcactgattttaanatcttaatttttctttcttgtaaatgctacactaattagacgtaagatagtattagataataaaagtatttacacattgaatacaaaataaatataaagtaactgaaaaacaaatcaggtttccattgacttattttgttttcccactgtccatcctctgtttcatttttctttgccttttgtaaatccgtttctttcttgctttcaaatcaacttttggctctggttttacccactgtatttctattggtttctcctcagctggtgttacaaaaacatctgcagtgggatcatgtggaaaaaaantcttcggctctttctttctcagtttttgcacatctttcacttgctgtttctctctgtattttgcagctgtgatgggatcttatgacacgccgatgctnnnnnnn

SEQ ID NO: 9506 - DNA, 548 bp, Homo sapiens
  misc_feature (12)..(12): "n" may be a, t, c, g, other or unknown
  misc_feature (51)..(51): "n" may be a, t, c, g, other or unknown
  misc_feature (210)..(210): "n" may be a, t, c, g, other or unknown
  misc_feature (228)..(228): "n" may be a, t, c, g, other or unknown
  misc_feature (338)..(338): "n" may be a, t, c, g, other or unknown
  misc_feature (408)..(408): "n" may be a, t, c, g, other or unknown
  misc_feature (451)..(452): "n" may be a, t, c, g, other or unknown
  misc_feature (470)..(470): "n" may be a, t, c, g, other or unknown
  misc_feature (493)..(493): "n" may be a, t, c, g, other or unknown
  misc_feature (495)..(495): "n" may be a, t, c, g, other or unknown
  misc_feature (511)..(511): "n" may be a, t, c, g, other or unknown
  misc_feature (548)..(548): "n" may be a, t, c, g, other or unknown
gtaggcatgcanatattttattgctgaaaatttacatttctacatttgaanaaaaaattctctgacctatgacctgtggccaagtctgagtagcctgtgctttcgtttgtccacgtggtgaagtcccacagcctcccctgacactcagggagaatcctcttgtgaatcaaatacaaaagcaaacgtttgttttgtattttcatttatggntgccttaacttatacaanaaataggcaaaaagtcttaatcacattgctttgagcgtatgtaacatctttaaagactgttaattgatgtcatactccttaatctttaaaaatatcaccctgaggagganatttgtagttttacccccattctacaaaaataaaaataaaagattaaatcatatacacaaagtctagaanaggaatgattagctttagttgtcttgttttaatcaagcatgannaaaactaagctaattccntacattggggactgaagaaaatntnttaattaatttgggcncattacaatttgttccatttgggccaaaaaaaactan

SEQ ID NO: 9507 - DNA, 585 bp, Homo sapiens
  misc_feature (11)..(11): "n" may be a, t, c, g, other or unknown
  misc_feature (25)..(25): "n" may be a, t, c, g, other or unknown
  misc_feature (52)..(52): "n" may be a, t, c, g, other or unknown
  misc_feature (81)..(81): "n" may be a, t, c, g, other or unknown
  misc_feature (90)..(90): "n" may be a, t, c, g, other or unknown
  misc_feature (92)..(92): "n" may be a, t, c, g, other or unknown
  misc_feature (104)..(104): "n" may be a, t, c, g, other or unknown
  misc_feature (118)..(118): "n" may be a, t, c, g, other or unknown
  misc_feature (134)..(134): "n" may be a, t, c, g, other or unknown
  misc_feature (234)..(234): "n" may be a, t, c, g, other or unknown
  misc_feature (248)..(248): "n" may be a, t, c, g, other or unknown
  misc_feature (325)..(325): "n" may be a, t, c, g, other or unknown
  misc_feature (354)..(354): "n" may be a, t, c, g, other or unknown
  misc_feature (362)..(362): "n" may be a, t, c, g, other or unknown
  misc_feature (377)..(377): "n" may be a, t, c, g, other or unknown
  misc_feature (460)..(460): "n" may be a, t, c, g, other or unknown
  misc_feature (479)..(479): "n" may be a, t, c, g, other or unknown
  misc_feature (496)..(496): "n" may be a, t, c, g, other or unknown
  misc_feature (528)..(528): "n" may be a, t, c, g, other or unknown
  misc_feature (539)..(539): "n" may be a, t, c, g, other or unknown
  misc_feature (547)..(547): "n" may be a, t, c, g, other or unknown
  misc_feature (550)..(550): "n" may be a, t, c, g, other or unknown
  misc_feature (568)..(568): "n" may be a, t, c, g, other or unknown
  misc_feature (580)..(580): "n" may be a, t, c, g, other or unknown
gtcctaaatancatgcgttcatgangctggctcactttatttttggccccangtcaggtctcccaaagggtttcccagcantcacttcanantctcctgcagantcaccatcaagcanacctcttcctcgggangccgtgtcgccaccccaacccttgacttctggtatcaccatctcctgtcacctgggctccagtctttgtccgatggcctcaacaggacatcaaagcatanctaccagtttgaangtgccctcaggcttggcaggaaccacgtggacaaaagtcttgtaaaacacagcacccttgggcagcctggtgatcanatccacagcctccgtgtttctgggatgangcacgtanacctccttagtgtancggactatcccctcttccagggcatacagacatttattcttcccaacacccacctgcaacacacaaacctggtcactggtcanctggtcattaaggtgtccntcccaaaattttggganaaattctcacacaaaaaccgggccctggggcnaaaaggttatnaaaaaacnccnctcaggtttccctttccnctgggtaacaanttcaa

SEQ ID NO: 9508 - DNA, 530 bp, Homo sapiens
  misc_feature (20)..(20): "n" may be a, t, c, g, other or unknown
  misc_feature (41)..(41): "n" may be a, t, c, g, other or unknown
  misc_feature (91)..(91): "n" may be a, t, c, g, other or unknown
  misc_feature (93)..(93): "n" may be a, t, c, g, other or unknown
  misc_feature (114)..(114): "n" may be a, t, c, g, other or unknown
  misc_feature (128)..(129): "n" may be a, t, c, g, other or unknown
  misc_feature (211)..(211): "n" may be a, t, c, g, other or unknown
  misc_feature (273)..(273): "n" may be a, t, c, g, other or unknown
  misc_feature (451)..(451): "n" may be a, t, c, g, other or unknown
  misc_feature (488)..(488): "n" may be a, t, c, g, other or unknown
  misc_feature (500)..(500): "n" may be a, t, c, g, other or unknown
  misc_feature (505)..(505): "n" may be a, t, c, g, other or unknown
  misc_feature (507)..(507): "n" may be a, t, c, g, other or unknown
  misc_feature (512)..(512): "n" may be a, t, c, g, other or unknown
  misc_feature (524)..(524): "n" may be a, t, c, g, other or unknown
ctttccttctttttagaganggagtctacttctgttgccangcgggaatgcagtgatgtgatcgcagctcactgcagccttgaattactangntcagggggatccttctatgtnaccaggattcaggnncaagccactacacctagattgcatatttcttttataacttataaaaatttcagctatattaaaaaacagaatagtacaagtnttccatcagtcagcttcaaatttaccaaaatcagagccagtcttgtttcatttgaacccccntccactcaatatgaattattctgaagcaaattccaggcattttatcatttaatccataaatcatagtatctttaacagataggtttcaaaaacaaccacggtaccattattcatgcctaaatgaataattccgcactgtcatacaatatccagcgtacacatttcctggaagtttccncaaagatttttaaaattaacttgtttgaatcaggatncaaataaacccnttgcncnaattnattgaaaaatcncccaaa

SEQ ID NO: 9509 - DNA, 283 bp, Homo sapiens
  misc_feature (206)..(206): "n" may be a, t, c, g, other or unknown
  misc_feature (217)..(217): "n" may be a, t, c, g, other or unknown
  misc_feature (220)..(220): "n" may be a, t, c, g, other or unknown
  misc_feature (226)..(226): "n" may be a, t, c, g, other or unknown
  misc_feature (230)..(230): "n" may be a, t, c, g, other or unknown
  misc_feature (232)..(232): "n" may be a, t, c, g, other or unknown
  misc_feature (245)..(245): "n" may be a, t, c, g, other or unknown
gtagagacagggtttcgccatgttgcctaggctggtctccaacctggtctcctgggctcaagcgatccgcccgcctcggcctcccacagtgctgggattccaggcgtgagctaccgcgcccggcctatttacttttcttactaagctggggatctccgtcgccctcggcttggcaggaaggcgggggtaggggagcggtgggaaangggggtgggcnacnactctnatananggaaaagaggaanggaaagttggggcttactgcagggcaagctccttagga

SEQ ID NO: 9510 - DNA, 454 bp, Homo sapiens
  misc_feature (103)..(103): "n" may be a, t, c, g, other or unknown
  misc_feature (105)..(105): "n" may be a, t, c, g, other or unknown
  misc_feature (121)..(121): "n" may be a, t, c, g, other or unknown
  misc_feature (169)..(169): "n" may be a, t, c, g, other or unknown
  misc_feature (171)..(171): "n" may be a, t, c, g, other or unknown
  misc_feature (196)..(196): "n" may be a, t, c, g, other or unknown
  misc_feature (237)..(237): "n" may be a, t, c, g, other or unknown
  misc_feature (426)..(427): "n" may be a, t, c, g, other or unknown
  misc_feature (436)..(436): "n" may be a, t, c, g, other or unknown
  misc_feature (439)..(439): "n" may be a, t, c, g, other or unknown
  misc_feature (442)..(442): "n" may be a, t, c, g, other or unknown
  misc_feature (444)..(444): "n" may be a, t, c, g, other or unknown
  misc_feature (453)..(453): "n" may be a, t, c, g, other or unknown
ctggtttccttctcggtttattctgttagaatgaaatggttcccataaataaggggcatgagcccttcctcacgaccatggtccatgacaaggggcagggcananggggcctggatgggantccttgtgggggaccaggcaggggacttggatcaacaagcaccagacnantggcgggggcaggcgagaggctcantgggacctccaccctcgttgccccagctggtggctgaccangtggctgtggagggtcaggagctgccccggatcctctccatgtagttgcgaagctcctcagggtccttcagccccatgtcctcacacacccagcggatgtcctcctcgcctgccacaaggatggactgcacagcaggggcccctacaggctcctcaggtgactgggctggaggggctggcgcaaatgtnnaaagtctantcnctncngccgccccna

SEQ ID NO: 9511 - DNA, 568 bp, Homo sapiens
  misc_feature (137)..(137): "n" may be a, t, c, g, other or unknown
  misc_feature (198)..(198): "n" may be a, t, c, g, other or unknown
  misc_feature (307)..(307): "n" may be a, t, c, g, other or unknown
  misc_feature (354)..(354): "n" may be a, t, c, g, other or unknown
  misc_feature (370)..(370): "n" may be a, t, c, g, other or unknown
  misc_feature (403)..(403): "n" may be a, t, c, g, other or unknown
  misc_feature (417)..(417): "n" may be a, t, c, g, other or unknown
  misc_feature (425)..(425): "n" may be a, t, c, g, other or unknown
  misc_feature (454)..(454): "n" may be a, t, c, g, other or unknown
  misc_feature (467)..(467): "n" may be a, t, c, g, other or unknown
  misc_feature (484)..(484): "n" may be a, t, c, g, other or unknown
  misc_feature (512)..(512): "n" may be a, t, c, g, other or unknown
  misc_feature (540)..(540): "n" may be a, t, c, g, other or unknown
  misc_feature (563)..(563): "n" may be a, t, c, g, other or unknown
agaactttcataacagatattcaatacctttattatcaggagaaagaatgatcaatctataacattcccaaaagtacaactctaaaaatgtcagttttgttcatataggactcccaactttaatgatatacccatcntacagccaggaagcagaacaatccctccagaaaaaaagcacaaatgccaagatgctctccnaccacaatttttttaaatctatgaaacaatttccttacaaattaagtagtttttatagtagtgacatttgtcattgatgtgatctgtttaatatgactgtagtaagaangaagttgggcctgttactgttttcagaaattgaaaagagtaccatcnttaagataaggaaganaaagatttgtatccatctttttgggacatgttnaggtgagagtgaantgtcccanttgggagaatttgtggatattgctggaanaattggaaatgcnccctattagccgggtantcctctccccaacccgctgttttggccnaaatttggccccaaatggttttcccccnggggtttttgacctggtcccccnaaaaa

SEQ ID NO: 9512 - DNA, 560 bp, Homo sapiens
  misc_feature (481)..(481): "n" may be a, t, c, g, other or unknown
  misc_feature (516)..(516): "n" may be a, t, c, g, other or unknown
  misc_feature (525)..(525): "n" may be a, t, c, g, other or unknown
  misc_feature (547)..(547): "n" may be a, t, c, g, other or unknown
  misc_feature (551)..(551): "n" may be a, t, c, g, other or unknown
  misc_feature (553)..(553): "n" may be a, t, c, g, other or unknown
  misc_feature (557)..(557): "n" may be a, t, c, g, other or unknown
aagaggtcattttagcagttttattcaacagatgccataaattaactacattcaggaaaaaaaacttaaacaaagaacaaagccaccctatctagcattctctcactcacaaagaagtatcaaagatatgtttatgttccattaaccgagtatgaagcaaaatcattaaaatattacaactgctaaacacagaagactagaaatcaaatagtttcatatccagtatacaggcatcaaaaacttcaatttccagctgttttttttttctaattcatatcatggatttacttacaaggagcttattcctatgggattaattcaattactcaatggtaaatagattttagctcagaatttttaaaggatgacttgctttaagttactattctacgtgctgctctatttctgctcacacttgcatgtggccaaacagatcatgctctgatcagataagtatactgtaatctacttatatgtttangaattggcatagggttaaaaaggcccaaaccgttntttaatacncattttcctaataactaattgnttangnactnctt

SEQ ID NO: 9513 - DNA, 593 bp, Homo sapiens
  misc_feature (113)..(113): "n" may be a, t, c, g, other or unknown
  misc_feature (186)..(186): "n" may be a, t, c, g, other or unknown
  misc_feature (201)..(201): "n" may be a, t, c, g, other or unknown
  misc_feature (375)..(375): "n" may be a, t, c, g, other or unknown
  misc_feature (377)..(377): "n" may be a, t, c, g, other or unknown
  misc_feature (440)..(440): "n" may be a, t, c, g, other or unknown
  misc_feature (469)..(469): "n" may be a, t, c, g, other or unknown
  misc_feature (492)..(492): "n" may be a, t, c, g, other or unknown
  misc_feature (508)..(508): "n" may be a, t, c, g, other or unknown
  misc_feature (538)..(538): "n" may be a, t, c, g, other or unknown
  misc_feature (556)..(556): "n" may be a, t, c, g, other or unknown
  misc_feature (561)..(561): "n" may be a, t, c, g, other or unknown
atcttaaatacaatcaaaacttcatgtttaatagggattcatctgtttcccatactttttacatgttcagttcagacagaactcatggaagaaaagacttttctgtgagatanaacagaccatctgcttgaccggatggctctgagggacagccaaactcccaatggccaaagggctgtgaggaanggcaacacgtatcanaaaaattttcagcaagggctgaaacacagtaaggttagccacaaaatggaatgagagaagccctaacccaatgggagtttgcctaattttaatgaacccaaactctaacattgtactggaaaagcagcattaaaatccagcctgattatcacaatttacagaatttctcaccanangcccacaggtgaaaaggctgcttactctaaagcccttagaacgtattgtgaactgcgcatgcnaaggatctaggttgcgtgctccttatganactctaatgcctgatgatctgangtggaattttctcccnccaccaccaccccgtcccttggaaaaactnttttccccaaaactggtncctgnttcccaaaaaggtttgggaacgccgcttttaa

SEQ ID NO: 9514 - DNA, 486 bp, Homo sapiens
  misc_feature (2)..(2): "n" may be a, t, c, g, other or unknown
  misc_feature (101)..(101): "n" may be a, t, c, g, other or unknown
  misc_feature (144)..(144): "n" may be a, t, c, g, other or unknown
  misc_feature (210)..(210): "n" may be a, t, c, g, other or unknown
  misc_feature (217)..(217): "n" may be a, t, c, g, other or unknown
  misc_feature (232)..(232): "n" may be a, t, c, g, other or unknown
  misc_feature (257)..(257): "n" may be a, t, c, g, other or unknown
  misc_feature (314)..(314): "n" may be a, t, c, g, other or unknown
  misc_feature (339)..(339): "n" may be a, t, c, g, other or unknown
  misc_feature (408)..(408): "n" may be a, t, c, g, other or unknown
  misc_feature (426)..(426): "n" may be a, t, c, g, other or unknown
  misc_feature (431)..(431): "n" may be a, t, c, g, other or unknown
  misc_feature (433)..(433): "n" may be a, t, c, g, other or unknown
  misc_feature (435)..(435): "n" may be a, t, c, g, other or unknown
  misc_feature (445)..(445): "n" may be a, t, c, g, other or unknown
  misc_feature (464)..(464): "n" may be a, t, c, g, other or unknown
anaattttttgggcatatttaccaatgtcatgtattctgaacaaaggcaaaaaatacaaattcctaccattaaactggcttggttgttgtttgggttggantaactgtgggggcttggggaaaggtgtcctttctttctaatantctcatgtcgctttaggtcaactgggctggcttacacgcgctgtgcggtcttcatggaaatggganctctgtntgtcagcacaggaantggtctcccagcggtcagcctgaancagcccaagtcctgtaggtgcttgccgtctctgaagccccaggaacatcagtgcaanaaggaaaaaactgctggcaaaaatnactcccaaggctgttctccgctctggtgggacaacctgggtgctggccccaaggggctcctccaaaaanatgtgtgtgacctggcangtgtnantngcacctgcanaaccaagttctgccgtganaaaagaagaaatgctgtagttc

SEQ ID NO: 9515 - DNA, 562 bp, Homo sapiens
  misc_feature (57)..(57): "n" may be a, t, c, g, other or unknown
  misc_feature (251)..(251): "n" may be a, t, c, g, other or unknown
  misc_feature (275)..(275): "n" may be a, t, c, g, other or unknown
  misc_feature (383)..(383): "n" may be a, t, c, g, other or unknown
  misc_feature (441)..(441): "n" may be a, t, c, g, other or unknown
  misc_feature (474)..(474): "n" may be a, t, c, g, other or unknown
  misc_feature (498)..(498): "n" may be a, t, c, g, other or unknown
  misc_feature (503)..(503): "n" may be a, t, c, g, other or unknown
  misc_feature (526)..(526): "n" may be a, t, c, g, other or unknown
  misc_feature (542)..(542): "n" may be a, t, c, g, other or unknown
  misc_feature (544)..(544): "n" may be a, t, c, g, other or unknown
  misc_feature (555)..(555): "n" may be a, t, c, g, other or unknown
atagcacaatggttttattgacggcagaagaaaaattcttcctttcacttgtaaaangtatttgcttaatttaactcagtatttttttccattctttgtgtgagttgactgttttttccaccctaaaatctgttttttctttcttcaaataataatatccaccacagctacttattctgaaaaaaaagtggaaggtctgtcaacaggtttccaccagggtgtttcagtcactggctcgtttcttcacaaanagtctactttaaaaagaaatgaanaaaatgaaattgaagcctcaaattaacttttccatactttgtcaagatacatttctgctgaaacttatctgtaaatgtgaagtgtttgtataaatagatcttaactanaattttgggatactgctaatttgttaacaatcttataaagccatatgaaagaaaaaanccaatttttttgaaaataaatttttttttttanactttgtttaaattctctctgccnccgtnataccacttattgctggcggttnattcccgaatttgganancccaactgttnttttcgg

SEQ ID NO: 9516 - DNA, 609 bp, Homo sapiens
  misc_feature (105)..(105): "n" may be a, t, c, g, other or unknown
  misc_feature (177)..(177): "n" may be a, t, c, g, other or unknown
  misc_feature (243)..(243): "n" may be a, t, c, g, other or unknown
  misc_feature (451)..(451): "n" may be a, t, c, g, other or unknown
  misc_feature (462)..(462): "n" may be a, t, c, g, other or unknown
  misc_feature (509)..(509): "n" may be a, t, c, g, other or unknown
  misc_feature (519)..(519): "n" may be a, t, c, g, other or unknown
  misc_feature (559)..(559): "n" may be a, t, c, g, other or unknown
  misc_feature (566)..(566): "n" may be a, t, c, g, other or unknown
  misc_feature (590)..(590): "n" may be a, t, c, g, other or unknown
  misc_feature (609)..(609): "n" may be a, t, c, g, other or unknown
atatttcttttcctttttataaacgataaacaaaaatcatcaaaatcatttcagcaaaagacttttctatcattggggcaagttaaaaaaaatacaatgaaatanaagacactttaaaagctgttgttgggtctcttgtttaattttaaatttagcaataccatctcaaacctggancaatcctggaacagttaccaggatcaccttttcccttcaatccttgtggcttctgggaatcttcanaacctgggtctgaaaggtgtttcctacatgtctcagggctggatgcaaacctggctggggacctgagcatcaactcccatttagaatcagacatctcccttccctgcaaatgtctacaactaccaaattgctccccaacagttagctcaatggattgaatttgcagaaccaactcctaaaatggggactgcctggccatacaactaanaaaaaaaatcnatttatagatgcttataaggtgacacctaattaaaaaatattagctncttccatatnaacccaaattgattttgtgcccaaaaaaaccttttccccntttaccncactttccccctgaaaatcccctnaacccaaaaaactcccccn

SEQ ID NO: 9517 - DNA, 552 bp, Homo sapiens
  misc_feature (243)..(243): "n" may be a, t, c, g, other or unknown
  misc_feature (309)..(309): "n" may be a, t, c, g, other or unknown
  misc_feature (364)..(364): "n" may be a, t, c, g, other or unknown
  misc_feature (379)..(379): "n" may be a, t, c, g, other or unknown
  misc_feature (399)..(399): "n" may be a, t, c, g, other or unknown
  misc_feature (410)..(410): "n" may be a, t, c, g, other or unknown
  misc_feature (420)..(420): "n" may be a, t, c, g, other or unknown
  misc_feature (457)..(457): "n" may be a, t, c, g, other or unknown
  misc_feature (482)..(482): "n" may be a, t, c, g, other or unknown
  misc_feature (487)..(487): "n" may be a, t, c, g, other or unknown
  misc_feature (530)..(530): "n" may be a, t, c, g, other or unknown
  misc_feature (535)..(535): "n" may be a, t, c, g, other or unknown
  misc_feature (550)..(551): "n" may be a, t, c, g, other or unknown
aagggaaatgagagtattttattacaacatcattgcaattaatattatcaatgaatgataattagtagtggtgctaacagtagtagtgttggttaagcatttatttttgcatcctaatcctaatatccactctatgaatttaggacctactattactcccattttaaagataagtacaccgaggtttaccaagattaactgacttgccaagggtcacacactggagtaagggcagaaccttanactcatgtctgacccctcgccccatgctcttaaccacataatgccatcttttatttcagtgacaanacaaaagcatttaggtcacactcttgttgttaaacaggaaaattatataaatgcnaattgtttaaaatangttttggatttccttttgancaaacccccantcctttaaangatatacttaaaattttttttaagccgaagaaaattnactactatttaccatgacaattttnttaantttttaaaaccaaaaggtttttaaaaatctgcctcccaggtgnaaaanttttctttggttccnnc

SEQ ID NO: 9518 - DNA, 610 bp, Homo sapiens
  misc_feature (169)..(169): "n" may be a, t, c, g, other or unknown
  misc_feature (193)..(193): "n" may be a, t, c, g, other or unknown
  misc_feature (221)..(221): "n" may be a, t, c, g, other or unknown
  misc_feature (302)..(302): "n" may be a, t, c, g, other or unknown
  misc_feature (438)..(438): "n" may be a, t, c, g, other or unknown
  misc_feature (440)..(440): "n" may be a, t, c, g, other or unknown
  misc_feature (443)..(443): "n" may be a, t, c, g, other or unknown
  misc_feature (446)..(446): "n" may be a, t, c, g, other or unknown
  misc_feature (494)..(494): "n" may be a, t, c, g, other or unknown
  misc_feature (522)..(522): "n" may be a, t, c, g, other or unknown
  misc_feature (571)..(571): "n" may be a, t, c, g, other or unknown
  misc_feature (585)..(585): "n" may be a, t, c, g, other or unknown
  misc_feature (593)..(593): "n" may be a, t, c, g, other or unknown
  misc_feature (607)..(607): "n" may be a, t, c, g, other or unknown
gagacacgttctcactctgctgccttggctggagtgcagtggcatgatcacagctcaatgcagcgtcaaactactaggctcaagggatcctcccatctcagcctcctgagtagctgggactacaggcacacagcaccatgttcagctaattttttaattttttgtgganaccgggtctccctatattgcccangctggtcccaaactcctgggcccaagcnagtctcccacctcagcctccgaaagcactgaaatttataggcataagccatcacccccagcctgacaattttttttagganaacaaaaacaaagtgagttctacttgctactttaaagcaccacatgtgaatattcaatgatgtttcattgcaaattggaaactaaatcccatttgtcaattttggcttttgttgccatcgcttttggtgttttaananatnaantccttgcccatgcctatgttctgaatggtgttgcctaaggtttcctcnagggttttaatggtttttaaggtccaanatttaattctttaacccccctgaaataaattttgtttttaggtttaggnaaggatccatttcnactttctnctattggtagcccnttt

SEQ ID NO: 9519 - DNA, 597 bp, Homo sapiens
  misc_feature (44)..(44): "n" may be a, t, c, g, other or unknown
  misc_feature (68)..(68): "n" may be a, t, c, g, other or unknown
  misc_feature (70)..(70): "n" may be a, t, c, g, other or unknown
  misc_feature (103)..(103): "n" may be a, t, c, g, other or unknown
  misc_feature (339)..(339): "n" may be a, t, c, g, other or unknown
  misc_feature (363)..(363): "n" may be a, t, c, g, other or unknown
  misc_feature (379)..(379): "n" may be a, t, c, g, other or unknown
  misc_feature (382)..(382): "n" may be a, t, c, g, other or unknown
  misc_feature (440)..(440): "n" may be a, t, c, g, other or unknown
  misc_feature (443)..(443): "n" may be a, t, c, g, other or unknown
  misc_feature (466)..(466): "n" may be a, t, c, g, other or unknown
  misc_feature (505)..(505): "n" may be a, t, c, g, other or unknown
  misc_feature (508)..(508): "n" may be a, t, c, g, other or unknown
  misc_feature (518)..(518): "n" may be a, t, c, g, other or unknown
  misc_feature (534)..(534): "n" may be a, t, c, g, other or unknown
  misc_feature (552)..(552): "n" may be a, t, c, g, other or unknown
  misc_feature (567)..(567): "n" may be a, t, c, g, other or unknown
  misc_feature (591)..(591): "n" may be a, t, c, g, other or unknown
gcagttacaacatttaccactttattataaaggctacaactcanaaacagccaaatggaagacatgtntnggacaaagaaagatggtagtttgcatggatganataaagccccaggggacagggcagctacacatgaatccaaatagtctaatctccaaaaggaacagagagtggattcatacaacataccaagcccgccccctaaatgcatcccactcaggtcacttataaagctccaaggatgggccaagaacacaagctctacaccagggaaacttggaggcatcagaaggacagaataagacccaggttcataggggatgaaaaatcgaacaganaaccatctcagggcatttgtgaangtccaaggatggaganaanaagtgctggcttacaagtgggtgaagttctgctataccacaatggaagctgaagctancanggaaacactattcctctctgaancagctgcggctttttgcaaatccattattgtcacgtccntcnatgtcttccnccctgccctaattccnccatctcctccctatgtngttcccctttccttncctggaactggttacaagtaaccnccccct

SEQ ID NO: 9520 - DNA, 623 bp, Homo sapiens
  misc_feature (553)..(553): "n" may be a, t, c, g, other or unknown
  misc_feature (597)..(597): "n" may be a, t, c, g, other or unknown
  misc_feature (601)..(601): "n" may be a, t, c, g, other or unknown
  misc_feature (608)..(608): "n" may be a, t, c, g, other or unknown
  misc_feature (619)..(619): "n" may be a, t, c, g, other or unknown
  misc_feature (622)..(622): "n" may be a, t, c, g, other or unknown
ccaaaattaacatttttattaaatcaagttaaaaaaaaatgttcagtgtagaaaagtcaacaagggttttaacaaaaccaaaatatacctttttatacaatatatgtatatattagcagcaaactacttctgagattctctttcttttatgttcttctagttattttaaagaaagcataaacaatgtatattagtatggaatgtcagcaaatccactcttagtcctttattctgtgatttgggccttctacaaaatactttgtgattctcactaatgaatattaagaacatacccaattttaactaaaaagtagtgaaacagtggttggtagaatctttctcactatatcacggtcacacattatatttgagaataacaaatgagcaccatataaacaggtaattgtgtgtgtgtaaactcaatttttaaggtgtaatagtagccaactagataacttagcactgtgactatcactttttaaaaatttggtgatatacaaaattttaaacaaatcagataaacactccacccctatgctgtccattaaaaaancctaataaaaatcctatatataaccgacaactgcataccccatntttnttttttncccccaaattnttnt

SEQ ID NO: 9521 - DNA, 566 bp, Homo sapiens
  misc_feature (7)..(7): "n" may be a, t, c, g, other or unknown
  misc_feature (49)..(49): "n" may be a, t, c, g, other or unknown
  misc_feature (103)..(103): "n" may be a, t, c, g, other or unknown
  misc_feature (105)..(105): "n" may be a, t, c, g, other or unknown
  misc_feature (205)..(205): "n" may be a, t, c, g, other or unknown
  misc_feature (209)..(209): "n" may be a, t, c, g, other or unknown
  misc_feature (286)..(286): "n" may be a, t, c, g, other or unknown
  misc_feature (296)..(296): "n" may be a, t, c, g, other or unknown
  misc_feature (374)..(374): "n" may be a, t, c, g, other or unknown
  misc_feature (378)..(378): "n" may be a, t, c, g, other or unknown
  misc_feature (381)..(381): "n" may be a, t, c, g, other or unknown
  misc_feature (383)..(383): "n" may be a, t, c, g, other or unknown
  misc_feature (387)..(387): "n" may be a, t, c, g, other or unknown
  misc_feature (456)..(456): "n" may be a, t, c, g, other or unknown
  misc_feature (488)..(488): "n" may be a, t, c, g, other or unknown
  misc_feature (544)..(544): "n" may be a, t, c, g, other or unknown
gcatgangccaatactgttattgttcacattttacagagcaagaaacanaggcagcgaggcattaaaacacctgtctagggtcacagggtgtacagctttcananccaggaatcataaccaggtctgtcttgttctaaagcttgccttttgtaactcctgcacattaaacaaataatcacaactaatttcttaaataattacaanaaanccaagtgttttgaagtataaatacaaagggctaccgaagcataaaatgggaattggaaaaatacctacctcacccanaattattgtnagaattaaaaagcactcattggtgcactttgtatatcaaaaagaactttaaaaatgttcagcattgtcaaactttgtnccangananatantcttatctggacattcatcaccttgaaatttccaaaatgttaaacgccctctcctgaacagtgcaatanctttctgtatacctttgggaatactgacaaanaataatgaattttaaatttttaaaaatctacatttccgactgccactccaaaaaantttccctccgaatcctaactgt

SEQ ID NO: 9522 - DNA, 574 bp, Homo sapiens
  misc_feature (207)..(207): "n" may be a, t, c, g, other or unknown
  misc_feature (352)..(352): "n" may be a, t, c, g, other or unknown
  misc_feature (476)..(476): "n" may be a, t, c, g, other or unknown
  misc_feature (500)..(500): "n" may be a, t, c, g, other or unknown
  misc_feature (503)..(503): "n" may be a, t, c, g, other or unknown
  misc_feature (554)..(554): "n" may be a, t, c, g, other or unknown
  misc_feature (569)..(569): "n" may be a, t, c, g, other or unknown
gaaggagaaaggctttaataatattaaaaataggcaaggtaatgcttttcatagtatagtaagatttgcctaataccatcttatttctttgattaaaagttacttagcttcagcatgcgtgtacattcaaaatacaaaattaaagcatgagttgtcattaatttgcagaattctatgattgaagcctctaaatgaattgtgcagganagggagtttgtaaacaactgactacagacattcacattgggtcatctttaaaaagctggactctgcttttggatgcttctcggaggcgagttggattttggactgaagtactgtcgttccattcctttttttgaggtgttatgantggggctataacatcgccatcctgcggcttggtgaaatttctgtctgcacaccactgaaacaaaatattgtcttgcggcatacaaactctttctgtccaccttcttacaatatactcgaatcanctgctctgcaaatttctctggcanaanttgtgaaacctggttttaagtaatcctgatgctctgttgggggcagtcttncataaaaccaacttnatcat

SEQ ID NO: 9523 - DNA, 558 bp, Homo sapiens
  misc_feature (358)..(358): "n" may be a, t, c, g, other or unknown
  misc_feature (429)..(429): "n" may be a, t, c, g, other or unknown
  misc_feature (445)..(445): "n" may be a, t, c, g, other or unknown
  misc_feature (469)..(469): "n" may be a, t, c, g, other or unknown
  misc_feature (506)..(506): "n" may be a, t, c, g, other or unknown
  misc_feature (508)..(508): "n" may be a, t, c, g, other or unknown
  misc_feature (534)..(534): "n" may be a, t, c, g, other or unknown
  misc_feature (543)..(543): "n" may be a, t, c, g, other or unknown
  misc_feature (546)..(546): "n" may be a, t, c, g, other or unknown
  misc_feature (557)..(557): "n" may be a, t, c, g, other or unknown
ccctgaaatagaaatttaatatttggacaaaaaactgtaaacttttggttacattcaaaatacaaccttttaaagacttaaattgaggttttagcaactggagctcctaacagcagatttatattactatgatgttttaaaaacatgataattctaaacagtttgtttctcttactctgacatttactaccaggaggaaaaaaatggcttcctgcaattgacagtctgggtaaaggaattgctcaggtggacaatccgaccctgacttccaccttgactgcgttccacaatcacacaaggtatctgtactagctggaaaggactcttcccgtctctcaatgcctgagtaaggtttaanatctgacccctcatcacagacatctgactttcaaaagtggctttgtcaaatcctttgtcagtcttaaaaanttcataaaaatcttcncataaatcttgcccaaatttcatntcaaaaatatatggtaaaatcaaatttcttatttctncnaaaaagggaactttggcttgaagaanccacccccnttnaaatgaatttnc

SEQ ID NO: 9524 - DNA, 594 bp, Homo sapiens
  misc_feature (197)..(197): "n" may be a, t, c, g, other or unknown
  misc_feature (199)..(199): "n" may be a, t, c, g, other or unknown
  misc_feature (234)..(234): "n" may be a, t, c, g, other or unknown
  misc_feature (303)..(303): "n" may be a, t, c, g, other or unknown
  misc_feature (379)..(379): "n" may be a, t, c, g, other or unknown
  misc_feature (384)..(384): "n" may be a, t, c, g, other or unknown
  misc_feature (394)..(394): "n" may be a, t, c, g, other or unknown
  misc_feature (444)..(444): "n" may be a, t, c, g, other or unknown
  misc_feature (447)..(447): "n" may be a, t, c, g, other or unknown
  misc_feature (449)..(449): "n" may be a, t, c, g, other or unknown
  misc_feature (483)..(483): "n" may be a, t, c, g, other or unknown
  misc_feature (491)..(491): "n" may be a, t, c, g, other or unknown
  misc_feature (507)..(507): "n" may be a, t, c, g, other or unknown
  misc_feature (524)..(524): "n" may be a, t, c, g, other or unknown
  misc_feature (579)..(579): "n" may be a, t, c, g, other or unknown
gccattgaaacaatcatttacttcaagcatttcccctgttaatcatcttcaccattaaactaactgaaggaaaaaatggataatttactaatcatgaattttgtcgacaaacttcccataaaggagaacaagtgagattttaataggaagataaaagactctgccagaagtattttttttttttttttttgagacanantctggatctgtcacccaggctggagtgcagtggancgatctcggttcactgcaagctccacctcccaggttcacaccattctcctgcctcagcctcccgagtanctgggactacaggtgcccaccaccacgcccagctaattttgtgtatttttagtaaaaatggggtttcacggtgttngccangacggtctcnatctcctgacctcgtgatccgcccgccttgggctccccaaatgctgccanaantnttctttactggcttgaactttgtcccccaatacnttaatatntttatgttacaaatcncccgacagttaaaaatntttttttccctctgaataaactgaacttttcttaatactgaaaaatttgaaattncttgaatatttaaaa

SEQ ID NO: 9525 - DNA, 445 bp, Homo sapiens
  misc_feature (31)..(31): "n" may be a, t, c, g, other or unknown
  misc_feature (122)..(122): "n" may be a, t, c, g, other or unknown
  misc_feature (275)..(275): "n" may be a, t, c, g, other or unknown
  misc_feature (304)..(304): "n" may be a, t, c, g, other or unknown
  misc_feature (307)..(307): "n" may be a, t, c, g, other or unknown
  misc_feature (313)..(313): "n" may be a, t, c, g, other or unknown
  misc_feature (323)..(323): "n" may be a, t, c, g, other or unknown
  misc_feature (363)..(363): "n" may be a, t, c, g, other or unknown
  misc_feature (415)..(417): "n" may be a, t, c, g, other or unknown
  misc_feature (428)..(428): "n" may be a, t, c, g, other or unknown
  misc_feature (436)..(436): "n" may be a, t, c, g, other or unknown
  misc_feature (438)..(438): "n" may be a, t, c, g, other or unknown
ggctttaaataaagcgtttattgattagtanaagcatgaacagtgtgcataatattttcaatacaatatcagggagggatgatgggaacccctccttcactcaggacacttcccctccgcanacctgcacgttctgggcctttctcatttcaccccaggcctgcccaccccatgaggcaccccctaaatctcatctctccacccagcacccccagcctggctccagcctgaaaacccctccttccccttccctccaaaacagtggggaaagcgangctcggtccacccctaactgcggaaagancanggccangaaggcacantgctccctctcccggtcctggcccaaccactccttgggtnaattgggcgggaaccactgggctcacaccaacttttcacctccctctctccnnnaaaggatggcncccccctnangggatgg

SEQ ID NO: 9526 - DNA, 392 bp, Homo sapiens
  misc_feature (165)..(165): "n" may be a, t, c, g, other or unknown
  misc_feature (282)..(282): "n" may be a, t, c, g, other or unknown
  misc_feature (327)..(327): "n" may be a, t, c, g, other or unknown
  misc_feature (347)..(347): "n" may be a, t, c, g, other or unknown
  misc_feature (351)..(351): "n" may be a, t, c, g, other or unknown
  misc_feature (359)..(359): "n" may be a, t, c, g, other or unknown
  misc_feature (375)..(375): "n" may be a, t, c, g, other or unknown
  misc_feature (377)..(377): "n" may be a, t, c, g, other or unknown
  misc_feature (384)..(384): "n" may be a, t, c, g, other or unknown
aaacctgcttaactttattggaactagctcagttgattacagaatggggtcacaatcattaggggaccacatacattttaaaccaaaggcgattcttctctagccatctgccaaccccagctatccattttacaaacacatgccattaatcacaagggaggccanaaggaggtttcatggctccatgtaacccatcgttgctactggaaaaaaataaacaaactcccgacacttgtcctactgatgatggatggcacttggaaaacatatttccaaaaatcntggcaggctgaaattggtggccattaaccccccactgaatacctncccttgaaaaaattttccantaanaatgcccnctttttaatttacttntnccctatnccccttaa

SEQ ID NO: 9527 - DNA, 417 bp, Homo sapiens
  misc_feature (82)..(82): "n" may be a, t, c, g, other or unknown
  misc_feature (159)..(159): "n" may be a, t, c, g, other or unknown
  misc_feature (194)..(194): "n" may be a, t, c, g, other or unknown
  misc_feature (256)..(256): "n" may be a, t, c, g, other or unknown
  misc_feature (267)..(267): "n" may be a, t, c, g, other or unknown
  misc_feature (271)..(271): "n" may be a, t, c, g, other or unknown
  misc_feature (276)..(276): "n" may be a, t, c, g, other or unknown
  misc_feature (337)..(337): "n" may be a, t, c, g, other or unknown
  misc_feature (359)..(359): "n" may be a, t, c, g, other or unknown
  misc_feature (364)..(364): "n" may be a, t, c, g, other or unknown
  misc_feature (369)..(369): "n" may be a, t, c, g, other or unknown
  misc_feature (376)..(376): "n" may be a, t, c, g, other or unknown
  misc_feature (382)..(382): "n" may be a, t, c, g, other or unknown
  misc_feature (407)..(407): "n" may be a, t, c, g, other or unknown
gtcaaaacaaggatctgctggtgatgcttcacagtgaaacctccattaccactgagaatgtcacttggaaaacattcttaanaaatgagtctctttctcataggctcaatttcaggattctcaaactcaatgttctgctcagaagtttccatgatgaancctatttgtctctgaggctggggctctgcctttanacttattctgctccagtcataggttgtggttgtctttgttcttggtcagaacctgcaagtanacttcatgaantgtnctgangaactggaatcattctttattaaatgtattaatgtttcccggaaccgaaaacttgctgaanaataatggaaaggcttcctctnacttnctggngttccantatttnaaagaaaaaggggaactggcttccnctcaaggtcc

SEQ ID NO: 9528 - DNA, 390 bp, Homo sapiens
  misc_feature (224)..(224): "n" may be a, t, c, g, other or unknown
  misc_feature (261)..(261): "n" may be a, t, c, g, other or unknown
  misc_feature (337)..(337): "n" may be a, t, c, g, other or unknown
  misc_feature (347)..(347): "n" may be a, t, c, g, other or unknown
  misc_feature (353)..(353): "n" may be a, t, c, g, other or unknown
  misc_feature (355)..(355): "n" may be a, t, c, g, other or unknown
  misc_feature (362)..(362): "n" may be a, t, c, g, other or unknown
  misc_feature (377)..(377): "n" may be a, t, c, g, other or unknown
  misc_feature (382)..(382): "n" may be a, t, c, g, other or unknown
attgtggtaataaacacatgacataaagtttaccatcttcaccatttttcagcgtatagttcagtagtattaagtatattcacactgttctttgcaaaactaaaactcatttccattcccctccccaggcccctggtaaccaacattctactttgtttccataaatgtgactactttagagacctcatagaagtggaatcaccccatatttgtcttcttatggntgacttatttcacttagcataatgtcctcaagggtcntccatgctgcttccctgattttgattctagagctcttatttcctactacttcccctaatgaaatgtactttaattngggctatttnctttangnttttttnaaaggtattttttcnggggngaaatcct

SEQ ID NO: 9529 - DNA, 327 bp, Homo sapiens
  misc_feature (62)..(62): "n" may be a, t, c, g, other or unknown
  misc_feature (88)..(88): "n" may be a, t, c, g, other or unknown
  misc_feature (98)..(98): "n" may be a, t, c, g, other or unknown
  misc_feature (138)..(138): "n" may be a, t, c, g, other or unknown
  misc_feature (178)..(178): "n" may be a, t, c, g, other or unknown
  misc_feature (180)..(180): "n" may be a, t, c, g, other or unknown
  misc_feature (218)..(218): "n" may be a, t, c, g, other or unknown
  misc_feature (251)..(251): "n" may be a, t, c, g, other or unknown
  misc_feature (273)..(273): "n" may be a, t, c, g, other or unknown
  misc_feature (281)..(281): "n" may be a, t, c, g, other or unknown
  misc_feature (289)..(289): "n" may be a, t, c, g, other or unknown
  misc_feature (299)..(299): "n" may be a, t, c, g, other or unknown
  misc_feature (316)..(316): "n" may be a, t, c, g, other or unknown
  misc_feature (318)..(318): "n" may be a, t, c, g, other or unknown
aagggtaaacaagctttatcccacataaatggcaatgcagatataataagcaaatgatatantaagcaagttgcaatgggaagggganaaaggaaaanaaatatatgtttttatactccccagactatggaggattcnccaccagactgggaagcaacagcaacagcctgggctcganantcggacactgcactcaccaaactatggcggattcaccnccagactaggaaacaacggcctgggctccaaantcggccactcgtccgtgcacanacaaaganaggtctcntgaagcttcngcacaatctaggacccnanctcttttgt

SEQ ID NO: 9530 - DNA, 528 bp, Homo sapiens
  misc_feature (463)..(463): "n" may be a, t, c, g, other or unknown
  misc_feature (480)..(480): "n" may be a, t, c, g, other or unknown
  misc_feature (484)..(484): "n" may be a, t, c, g, other or unknown
  misc_feature (494)..(494): "n" may be a, t, c, g, other or unknown
  misc_feature (504)..(504): "n" may be a, t, c, g, other or unknown
  misc_feature (517)..(517): "n" may be a, t, c, g, other or unknown
  misc_feature (522)..(522): "n" may be a, t, c, g, other or unknown
cttaaaagatactttttttgttcaattcctttgtaaaaacattggtcaccatttaacatacatggcaacaaaatgcacccaatttacatgcatcaacaagttaataaatcataatacatggacaacacaaatttaaacaaacaggactaaagtagctcatgttgcatttaactatggttcttgtgctcctaatagagaagtagctaatatgagaaacaaacagttccagtttcaacctaaattaaagttatttgtggcaagtaacatgaaacaatgatcatatgaagtcattatcttaaaaagaaccattcttcagaaatcactttgtggcaaagcaccatactagggtagactatgatcttaaacatataccttcagttaaagacaaatggtctccattttttgaaaattacctgaatgattccaatttttattatgccataaattttatctttccatgttnaaggtatttttttgacncctnaattattccngaaaaattcnatttaaccattantcccngggacc

SEQ ID NO: 9531 - DNA, 602 bp, Homo sapiens
  misc_feature (107)..(107): "n" may be a, t, c, g, other or unknown
  misc_feature (436)..(436): "n" may be a, t, c, g, other or unknown
  misc_feature (491)..(491): "n" may be a, t, c, g, other or unknown
  misc_feature (496)..(496): "n" may be a, t, c, g, other or unknown
  misc_feature (500)..(500): "n" may be a, t, c, g, other or unknown
  misc_feature (507)..(507): "n" may be a, t, c, g, other or unknown
  misc_feature (576)..(576): "n" may be a, t, c, g, other or unknown
  misc_feature (582)..(582): "n" may be a, t, c, g, other or unknown
  misc_feature (586)..(586): "n" may be a, t, c, g, other or unknown
  misc_feature (592)..(592): "n" may be a, t, c, g, other or unknown
cgttcttttgtttatcaagttttaatgaaaggatacaactgatgctactttacaacatgataaacatttgcaatgtcccaaattactactattgttacgagaataanattgctcaggttgctaaaaggaatttttaaagtatttcctcttttggttgatgtagtacctgatcagagttctaaactaccgcctaccaaatttttctttgaaaaatctacctttatatgtgaaattaatatacacatatattttaggtaacagtaatttacaggtttctttattaaattaggatctttgcattaagcccaactcatcactgatcaacatatttcatgctgataagcatttagcaaaatttgagactgatattcaataatatgtattaaatcagataatctgaatgctaaaatagtttggcccccggaattatagttanttttaaatgaaaaaaaccccttttatccggcccattggcaattttaattttaccnggcanaatnccccccnaaattttttatgggtctttaaaaaacaccggcctccccctttcctgatttcccaatttttaaccctttnttgggnaaangaaaanaaccccttgg

SEQ ID NO: 9532 - DNA, 485 bp, Homo sapiens
  misc_feature (29)..(29): "n" may be a, t, c, g, other or unknown
  misc_feature (37)..(37): "n" may be a, t, c, g, other or unknown
  misc_feature (53)..(53): "n" may be a, t, c, g, other or unknown
  misc_feature (102)..(102): "n" may be a, t, c, g, other or unknown
  misc_feature (147)..(147): "n" may be a, t, c, g, other or unknown
  misc_feature (152)..(152): "n" may be a, t, c, g, other or unknown
  misc_feature (171)..(171): "n" may be a, t, c, g, other or unknown
  misc_feature (413)..(413): "n" may be a, t, c, g, other or unknown
  misc_feature (415)..(415): "n" may be a, t, c, g, other or unknown
  misc_feature (422)..(422): "n" may be a, t, c, g, other or unknown
  misc_feature (428)..(428): "n" may be a, t, c, g, other or unknown
  misc_feature (447)..(447): "n" may be a, t, c, g, other or unknown
  misc_feature (466)..(466): "n" may be a, t, c, g, other or unknown
  misc_feature (479)..(479): "n" may be a, t, c, g, other or unknown
gagttttcaaacaatttatttcacagganaagtgganaaggcaatcttcttcncacaagttttataacccattaaaacagtatctttctaatcccctcagantgggaaaacaggtaattctcaacctgggagacaagctctgaagtncaganctatcacctgctgcaggangtgtgaaagctcattcttaaagttttctcacgtttattttccattttcttagcacagaatgttctttccagcaaggtccattaagagagaccgaaatatgaatatggctgcattggattccagaggaggacttgatcaaatacacagaaatagtggcttcaatgatcaagttattttgcttctggtcaagtcggatacaagtctgagttttcttttcaaagctcccttatgctgagaggaantntgaacanaatccnactgccgtcttcacacaantgccgaactcctttccccnaaaaactcctttnaatccc

SEQ ID NO: 9533 - DNA, 516 bp, Homo sapiens
  misc_feature (31)..(31): "n" may be a, t, c, g, other or unknown
  misc_feature (39)..(39): "n" may be a, t, c, g, other or unknown
  misc_feature (42)..(42): "n" may be a, t, c, g, other or unknown
  misc_feature (49)..(49): "n" may be a, t, c, g, other or unknown
  misc_feature (421)..(421): "n" may be a, t, c, g, other or unknown
  misc_feature (436)..(437): "n" may be a, t, c, g, other or unknown
  misc_feature (474)..(474): "n" may be a, t, c, g, other or unknown
  misc_feature (494)..(494): "n" may be a, t, c, g, other or unknown
  misc_feature (509)..(509): "n" may be a, t, c, g, other or unknown
  misc_feature (512)..(512): "n" may be a, t, c, g, other or unknown
aaaatttcaaatatattttattcaaaattcnccatttanganaaaaganatataacaatgtttacacatgctttaataacttatttcactgtacaacttacattctgtataacagtacaataaaccagccaaagaaaataaccagttagcacttaaataagaatctaccatgtaaaaaacacagtatgggacactacaaggtagtatttatatattttttaaatgactgagctacagtacaacagtcatctagttcagtggttgtctaaaacatcaagctgtccacatctttctgattcatgatgggaaagctattatgacctttcacattcgaacatgtcattttgttgtgtaaatttggtgggtggggggcagaaaggctctattacctttatccctttcttataaatatattttcccntttatattacttccnnaattttaaataaaatatttaattgtgtttgggttacnaccaagttcacattgtgttnaaaatatattaaccnttntttt

SEQ ID NO: 9534 - DNA, 472 bp, Homo sapiens
  misc_feature (282)..(282): "n" may be a, t, c, g, other or unknown
  misc_feature (321)..(321): "n" may be a, t, c, g, other or unknown
  misc_feature (329)..(329): "n" may be a, t, c, g, other or unknown
  misc_feature (342)..(342): "n" may be a, t, c, g, other or unknown
  misc_feature (349)..(349): "n" may be a, t, c, g, other or unknown
  misc_feature (400)..(400): "n" may be a, t, c, g, other or unknown
  misc_feature (410)..(410): "n" may be a, t, c, g, other or unknown
  misc_feature (442)..(442): "n" may be a, t, c, g, other or unknown
  misc_feature (455)..(455): "n" may be a, t, c, g, other or unknown
  misc_feature (461)..(461): "n" may be a, t, c, g, other or unknown
  misc_feature (466)..(467): "n" may be a, t, c, g, other or unknown
aaccttatccaacttcagtattattttagtagtaatgtgtataaaatccaaccactgcttgggtgaccttaggagacagcaagcctaagagatgaaaacatttacaccttttaattaaattacactgtcaccacataaaagtgtgaggttcaacatttgttttcttaaaaacagagcactaaacagtttaacacaggacctaacttacggctaagatgtttctaaaatgtatgcagaacccttaagactatactgcatcaagtagttcttttgaattatgtntactcaaatgatggtgttataatttacattgaaatgccncaacaaantcttgataaaacnagatatngggagaaataaaaattattttctgaaccaaatgtgttctaccttaccctanaattaaatcnctgggaaatacgggcaaaaaacaaactccgcntgtgaaaacaatnggcttntcccnnctgga

SEQ ID NO: 9535 - DNA, 488 bp, Homo sapiens
  misc_feature (77)..(77): "n" may be a, t, c, g, other or unknown
  misc_feature (99)..(99): "n" may be a, t, c, g, other or unknown
  misc_feature (102)..(102): "n" may be a, t, c, g, other or unknown
  misc_feature (217)..(217): "n" may be a, t, c, g, other or unknown
  misc_feature (317)..(317): "n" may be a, t, c, g, other or unknown
  misc_feature (434)..(434): "n" may be a, t, c, g, other or unknown
  misc_feature (448)..(448): "n" may be a, t, c, g, other or unknown
  misc_feature (456)..(456): "n" may be a, t, c, g, other or unknown
  misc_feature (463)..(463): "n" may be a, t, c, g, other or unknown
  misc_feature (478)..(478): "n" may be a, t, c, g, other or unknown
  misc_feature (484)..(484): "n" may be a, t, c, g, other or unknown
  misc_feature (488)..(488): "n" may be a, t, c, g, other or unknown
cctcaaattttatttttattgaaaaaaaatttcctattgtaagttttggcaaggtatttatttggctaatcaggcanaaaggaaattacccttcaaaanacnattttctttaaaaattatgcactcctgtacaatctttctttttatccaaaaaagggtctcatattatctctatgacctcatctcctgaaattacattaaaatgtttattacaaanatcttgtaaaaaacaaatgtacaaccttatggatatgttcatgcaaggtgacaaaaatatatgcaaaagggtcttcactcttgctttctttgtaataaanaagtgaaaataatcttgtagtccattcaacaggggactaattcaataagttaaagtatactcctacaatggattatgcagtaatttataaaaaaatgaaggtaaatctatttaaacncttatggaaaggtntctattantatttantaaaatgacaaaaantccccncccn

SEQ ID NO: 9536 - DNA, 499 bp, Homo sapiens
  misc_feature (339)..(339): "n" may be a, t, c, g, other or unknown
  misc_feature (456)..(456): "n" may be a, t, c, g, other or unknown
  misc_feature (469)..(469): "n" may be a, t, c, g, other or unknown
  misc_feature (481)..(481): "n" may be a, t, c, g, other or unknown
  misc_feature (486)..(488): "n" may be a, t, c, g, other or unknown
  misc_feature (497)..(497): "n" may be a, t, c, g, other or unknown
gtgggtggtattttgtttttaatctccatagtgtatttgttaagtttatttataagcagatcacttcactatttacagtacatgagcatagagattctacagtttctgtgatgtaaacaataaccccacagtgggagtttgagaaaagaagccagttctgaagtatttacagacattaaaatagaactttatactcacagaataataatacatagagcaatttggttaaattatctaggaaactatagaatctgacaatgtacaaatacaagaaaacattttctcatttagaaggtaagacagagaaatcacaccagaaataaaatagggacgatgacnaccacaataattaaaagcaaagaaggttcctccttgcctcttacggataaagtatttatataaataaggacacaacccaacaaaatggaaaaaatatataaaaatcctctaccaatnaaaaaaaatagcnaaactaaaactngatcnnnatcattacnat

SEQ ID NO: 9537 - DNA, 548 bp, Homo sapiens
  misc_feature (101)..(101): "n" may be a, t, c, g, other or unknown
  misc_feature (108)..(108): "n" may be a, t, c, g, other or unknown
  misc_feature (116)..(116): "n" may be a, t, c, g, other or unknown
  misc_feature (150)..(150): "n" may be a, t, c, g, other or unknown
  misc_feature (305)..(305): "n" may be a, t, c, g, other or unknown
  misc_feature (318)..(318): "n" may be a, t, c, g, other or unknown
  misc_feature (402)..(402): "n" may be a, t, c, g, other or unknown
  misc_feature (423)..(423): "n" may be a, t, c, g, other or unknown
  misc_feature (457)..(457): "n" may be a, t, c, g, other or unknown
  misc_feature (491)..(491): "n" may be a, t, c, g, other or unknown
  misc_feature (493)..(494): "n" may be a, t, c, g, other or unknown
  misc_feature (507)..(507): "n" may be a, t, c, g, other or unknown
  misc_feature (534)..(534): "n" may be a, t, c, g, other or unknown
  misc_feature (542)..(542): "n" may be a, t, c, g, other or unknown
gagataattgaaaagttttattataaacaacataagcaaaaaattcaatgcagtgggggcagaagtgtgtggatgacctgccaaacaataagtattcaaantgttgantgagggangtgaggttgcaactatctttctctagaaaagaanagaactgggtattcatcaaattggttaaattgaggttcgtcaaaaagtttctacagatacagctgaatatactaaacattgctctattatctgttgaattgctgtatttcactttttcagcatttggggatcattatttaattgaatttgtaaanatcgattttccanacaggtctctgttcttccatgaacaaatgataagaaacaatttgactccttatatgacaatggaattaaataaattgacactcntctaggaataattctccatcntctccatctctaaaattaccccctgccaacaaanaattgatctttcttccccaaaaccccttggttanannatcttgtgactcngaatgccaaaataattaattgaacctncagggganatttct

SEQ ID NO: 9538 - DNA, 580 bp, Homo sapiens
  misc_feature (219)..(219): "n" may be a, t, c, g, other or unknown
  misc_feature (322)..(322): "n" may be a, t, c, g, other or unknown
  misc_feature (349)..(349): "n" may be a, t, c, g, other or unknown
  misc_feature (369)..(369): "n" may be a, t, c, g, other or unknown
  misc_feature (374)..(374): "n" may be a, t, c, g, other or unknown
  misc_feature (415)..(415): "n" may be a, t, c, g, other or unknown
  misc_feature (420)..(420): "n" may be a, t, c, g, other or unknown
  misc_feature (436)..(436): "n" may be a, t, c, g, other or unknown
  misc_feature (438)..(438): "n" may be a, t, c, g, other or unknown
  misc_feature (454)..(454): "n" may be a, t, c, g, other or unknown
  misc_feature (469)..(469): "n" may be a, t, c, g, other or unknown
  misc_feature (494)..(494): "n" may be a, t, c, g, other or unknown
  misc_feature (515)..(515): "n" may be a, t, c, g, other or unknown
  misc_feature (530)..(530): "n" may be a, t, c, g, other or unknown
  misc_feature (552)..(552): "n" may be a, t, c, g, other or unknown
  misc_feature (580)..(580): "n" may be a, t, c, g, other or unknown
ggatgcatgctgggggaggaaagcatattgtttgtagtcaccctggcgtgctaaggtatattattccccagtaattctctcaaggtgggcatatgcaaaacataatctctaaattcttcaatactaagaaatacctttgttttgcccctaaaatcaaatgccattttggctggatataggattctaggattaaagcctttttccagcagaactttgaanacattgctccatttacttctagcatccagtgtgtccagtgataagtctgctgtcaacctgattcttgttccttggtaggtaatttctcttctctctctaaaancccttattattttctctttatcactanaattccaaaatttcaccaanatgtntctaagaatcatctcttttcatcaattttactaagtactcnacaancactgacaatctccananttgaacctttctttanttctgccaagtttcntccattaattccttaaatatgttcnctgcccaatctcataactccncctttccggaatccnaaccaaacaaatttgcacttcnaaattctccccaaatcccttggccttcn

SEQ ID NO: 9539 - DNA, 572 bp, Homo sapiens
  misc_feature (28)..(28): "n" may be a, t, c, g, other or unknown
  misc_feature (164)..(164): "n" may be a, t, c, g, other or unknown
  misc_feature (250)..(250): "n" may be a, t, c, g, other or unknown
  misc_feature (293)..(293): "n" may be a, t, c, g, other or unknown
  misc_feature (315)..(315): "n" may be a, t, c, g, other or unknown
  misc_feature (407)..(407): "n" may be a, t, c, g, other or unknown
  misc_feature (420)..(420): "n" may be a, t, c, g, other or unknown
  misc_feature (487)..(487): "n" may be a, t, c, g, other or unknown
  misc_feature (507)..(507): "n" may be a, t, c, g, other or unknown
  misc_feature (512)..(512): "n" may be a, t, c, g, other or unknown
  misc_feature (531)..(531): "n" may be a, t, c, g, other or unknown
  misc_feature (541)..(541): "n" may be a, t, c, g, other or unknown
  misc_feature (569)..(569): "n" may be a, t, c, g, other or unknown
gctttttaacttgtgtgtgtgtgttttntaataggtcccacgtgatttatgctttaaagaagctctgttttccaggatttgtttcaatatttagagctccttttatcagttcttgtagtggtggcttggtgtgaattatcttggcatttgtttgtctgaagatnactgtatctttccttcaaatatgatgcttagtttcgctgtatacaaaattcttggctgataattgttttgtttgagggggctgaanatagggccccaattctgtcttaacttgtagggtttctgctganaaatctgctgttaatctgatanatttttcctttgtaagttacctggtgcttctgtctcacagctcttaaaatggtttcctttggataacctgatgacagtgtacctaagtgaanatcttttggtgangaatttcccgggtgatctttgtgcctcctgtatttggatgtctaagtctctaacaaggccagggaantttcccccattatccccccnatatntttcccagccttaaaatcnctcctccccngaacatgaatatcctaagtttggtgttnaca

SEQ ID NO: 9540 - DNA, 383 bp, Homo sapiens
  misc_feature (70)..(70): "n" may be a, t, c, g, other or unknown
  misc_feature (86)..(86): "n" may be a, t, c, g, other or unknown
  misc_feature (236)..(236): "n" may be a, t, c, g, other or unknown
  misc_feature (252)..(252): "n" may be a, t, c, g, other or unknown
  misc_feature (262)..(262): "n" may be a, t, c, g, other or unknown
  misc_feature (321)..(321): "n" may be a, t, c, g, other or unknown
  misc_feature (350)..(350): "n" may be a, t, c, g, other or unknown
  misc_feature (363)..(364): "n" may be a, t, c, g, other or unknown
  misc_feature (380)..(380): "n" may be a, t, c, g, other or unknown
  misc_feature (382)..(383): "n" may be a, t, c, g, other or unknown
gcaagttttttgacttttattaaatctttacaaaacagaatacaaaattccggcattgacagttggtgtnaaggaaaacttctganctccgtcagttcacctggtacattggaattaaagtgcttggatgtttttcccccactttaaaaaaacttttgaggtttttttttttttttgtcttttaaaaacatcgtaacattaacacatggccgttcaccgtcccccaacgatggganctggcctggggcccanggtcctccangatcttcactcattcacagtaacggttctgaccaatcctccaagtcccacgtggatgcnacaagggtggggaagggaagaaaaaattnctttcccccttcnnaaaaaaaaaaaaaaancnn

SEQ ID NO: 9541 - DNA, 509 bp, Homo sapiens
  misc_feature (39)..(39): "n" may be a, t, c, g, other or unknown
  misc_feature (182)..(182): "n" may be a, t, c, g, other or unknown
  misc_feature (326)..(326): "n" may be a, t, c, g, other or unknown
  misc_feature (353)..(353): "n" may be a, t, c, g, other or unknown
  misc_feature (356)..(356): "n" may be a, t, c, g, other or unknown
  misc_feature (380)..(380): "n" may be a, t, c, g, other or unknown
  misc_feature (415)..(415): "n" may be a, t, c, g, other or unknown
  misc_feature (428)..(428): "n" may be a, t, c, g, other or unknown
  misc_feature (442)..(442): "n" may be a, t, c, g, other or unknown
  misc_feature (457)..(457): "n" may be a, t, c, g, other or unknown
  misc_feature (468)..(468): "n" may be a, t, c, g, other or unknown
  misc_feature (502)..(502): "n" may be a, t, c, g, other or unknown
  misc_feature (505)..(505): "n" may be a, t, c, g, other or unknown
cattcggctgccgaaaaggaataaattacttcttcccanaatgctccgatcagttacgtgccggacgttctaactgtacgcacttcctatttacatatctccgcccactcccttccgccaggcacctaccgtagtaaccaaaatagaagcgataccaagtatcttacggtctgcaggactanaaaacagcgttgttttttttttattcagtagttcagccatctcaattgtcccctaaaactgtatataagtcttaatgttactacaaaacatattttattacaaagcactaaatacaatgcggataatcccagactcaagacgtnattattccaacacatatcctccagcanaancagtttccgaggggaaaaccgaancctatgccttccttcttccaagaaatacaaacggnccttgcccctgtnggcttcgtccttangttcccgtcatgaangtaatcaaaanggttcttttccacccaaaaacgggacaaataaanccnttca

SEQ ID NO: 9542 - DNA, 461 bp, Homo sapiens
  misc_feature (28)..(28): "n" may be a, t, c, g, other or unknown
  misc_feature (64)..(64): "n" may be a, t, c, g, other or unknown
  misc_feature (89)..(89): "n" may be a, t, c, g, other or unknown
  misc_feature (140)..(140): "n" may be a, t, c, g, other or unknown
  misc_feature (211)..(211): "n" may be a, t, c, g, other or unknown
  misc_feature (305)..(305): "n" may be a, t, c, g, other or unknown
  misc_feature (326)..(326): "n" may be a, t, c, g, other or unknown
  misc_feature (399)..(399): "n" may be a, t, c, g, other or unknown
  misc_feature (405)..(405): "n" may be a, t, c, g, other or unknown
  misc_feature (415)..(415): "n" may be a, t, c, g, other or unknown
  misc_feature (427)..(427): "n" may be a, t, c, g, other or unknown
  misc_feature (437)..(438): "n" may be a, t, c, g, other or unknown
  misc_feature (440)..(440): "n" may be a, t, c, g, other or unknown
ccaggttttcaagccttttttttattanaaagcttaaattattagctttttttttaaaagggantagccaatatccatttttgagtttnctcaaacaaataataaggatagcaaactaggataagaaaacacattagaanacagccttctacttcgtacaacttctagttaccttttcctatccattcacctacttctgttcagcagcaanaaaaaaaatccatttatttttgcctttttggatttttccaaaataaacttcatttacctgaatacaaacaaaagctagggagatggcttttatnttggcataaaccaaggacatntctcacaaaccaggaaaaccctgcctcgtatggcttattttgcagtttggagtccaatggttataaaaccaantgaaantccaacaatntcccaaatgacncgaattgacnncnattatgggaaaccctgaatcc

SEQ ID NO: 9543 - DNA, 540 bp, Homo sapiens
  misc_feature (10)..(10): "n" may be a, t, c, g, other or unknown
  misc_feature (94)..(94): "n" may be a, t, c, g, other or unknown
  misc_feature (104)..(104): "n" may be a, t, c, g, other or unknown
  misc_feature (137)..(137): "n" may be a, t, c, g, other or unknown
  misc_feature (159)..(159): "n" may be a, t, c, g, other or unknown
  misc_feature (208)..(208): "n" may be a, t, c, g, other or unknown
  misc_feature (229)..(229): "n" may be a, t, c, g, other or unknown
  misc_feature (251)..(251): "n" may be a, t, c, g, other or unknown
  misc_feature (270)..(270): "n" may be a, t, c, g, other or unknown
  misc_feature (303)..(303): "n" may be a, t, c, g, other or unknown
  misc_feature (311)..(311): "n" may be a, t, c, g, other or unknown
  misc_feature (361)..(361): "n" may be a, t, c, g, other or unknown
  misc_feature (386)..(386): "n" may be a, t, c, g, other or unknown
  misc_feature (454)..(454): "n" may be a, t, c, g, other or unknown
  misc_feature (456)..(456): "n" may be a, t, c, g, other or unknown
  misc_feature (462)..(462): "n" may be a, t, c, g, other or unknown
  misc_feature (480)..(480): "n" may be a, t, c, g, other or unknown
  misc_feature (498)..(498): "n" may be a, t, c, g, other or unknown
  misc_feature (520)..(520): "n" may be a, t, c, g, other or unknown
  misc_feature (522)..(522): "n" may be a, t, c, g, other or unknown
ggggtctcanttcactctttccttgtttattaaatatcaacttttcctgcctaatgggctgaggttcattttcccattcctcagggtaagggtngactacctangaacttattgcatctttaggccagctggcttantgctacccatctgaacccccanattactacccaagtcttccttttgccccttcctgccctaacagcaagtnccaggccagtcccttccccancaaatgccaggggcttcatgtnaaaaagaactggccacaangctgaaagggaagaagaaaaactgtttctgcangaaaaganaacaatgcctccaagctcttgggcatcttcccatttttctaaataaaganaaactcaactctggaacctctggtngcaaaaaaaaagaagccgggaatttggcctgggcttcaaataccctgttctggatggattccccaatnanaaaagncaggttcctgggaactgnaatcccccagggccattnccaaccctttcccttaaaaggngnggcatgcccattcctctt

SEQ ID NO: 9544 - DNA, 533 bp, Homo sapiens
  misc_feature (30)..(30): "n" may be a, t, c, g, other or unknown
  misc_feature (46)..(46): "n" may be a, t, c, g, other or unknown
  misc_feature (53)..(53): "n" may be a, t, c, g, other or unknown
  misc_feature (110)..(110): "n" may be a, t, c, g, other or unknown
  misc_feature (159)..(159): "n" may be a, t, c, g, other or unknown
  misc_feature (241)..(241): "n" may be a, t, c, g, other or unknown
  misc_feature (273)..(273): "n" may be a, t, c, g, other or unknown
  misc_feature (299)..(299): "n" may be a, t, c, g, other or unknown
  misc_feature (386)..(386): "n" may be a, t, c, g, other or unknown
  misc_feature (388)..(388): "n" may be a, t, c, g, other or unknown
  misc_feature (449)..(449): "n" may be a, t, c, g, other or unknown
  misc_feature (480)..(481): "n" may be a, t, c, g, other or unknown
  misc_feature (490)..(490): "n" may be a, t, c, g, other or unknown
  misc_feature (508)..(508): "n" may be a, t, c, g, other or unknown
  misc_feature (513)..(513): "n" may be a, t, c, g, other or unknown
  misc_feature (522)..(522): "n" may be a, t, c, g, other or unknown
ccattcaagaccaagtttattttttaaaanatctcttctgcattanattctangtttcttttttggtttcaaaactgggtctacaatccataaaaatgacattaatgganatcttaaaaacaatctgattataccagcagtttggtaacatatcggtanaactgttctgtaaatgcttcaggggaaaatttttccttcactctggctcttccagccaggcccatggtggcttttaaggaangttcacggatgaacttttctattgcttctganaagtgcaccgggtcaggctcacacanaaaccctgtgacactgtggtcaatggactccaagggtccacccgaattaacagcaatgactgggcactgcatgtacatggcttccananggacaatgccaaagtgctcattgcttggtgtgttaacacacactttcactgttggaagaangaaaatttccttttttctaaaaaaaaccccnnaaaggtccnttcttggccaaggtcgantgttngaccatttnctccattcccg

SEQ ID NO: 9545 - DNA, 500 bp, Homo sapiens
  misc_feature (43)..(43): "n" may be a, t, c, g, other or unknown
  misc_feature (95)..(95): "n" may be a, t, c, g, other or unknown
  misc_feature (185)..(185): "n" may be a, t, c, g, other or unknown
  misc_feature (201)..(201): "n" may be a, t, c, g, other or unknown
  misc_feature (203)..(203): "n" may be a, t, c, g, other or unknown
  misc_feature (235)..(235): "n" may be a, t, c, g, other or unknown
  misc_feature (272)..(272): "n" may be a, t, c, g, other or unknown
  misc_feature (296)..(296): "n" may be a, t, c, g, other or unknown
  misc_feature (355)..(355): "n" may be a, t, c, g, other or unknown
  misc_feature (435)..(435): "n" may be a, t, c, g, other or unknown
  misc_feature (443)..(443): "n" may be a, t, c, g, other or unknown
  misc_feature (447)..(447): "n" may be a, t, c, g, other or unknown
  misc_feature (456)..(457): "n" may be a, t, c, g, other or unknown
  misc_feature (488)..(488): "n" may be a, t, c, g, other or unknown
  misc_feature (495)..(495): "n" may be a, t, c, g, other or unknown
gaatgacaatccactttaataatccagcttcagctcagctganaacttcccctctcaagtgcaaagggatggcaaaaaaatctttccaagaaggntcaatccactaagaaattatggcttaaaaaaaggaacagctcaaaaaacccttgaaaaaggtgagggtctggaagactcctgtggtgcangccatctcccggatanantgcatggccagttgggggctgcctaaatccancacccgcagccccagccgaaaaaccaaaataagtccnatggtggttccacagggggtgtcnttccggaccatgaaatcctgcagggggaccttgactttgttggccacctctcggatcanggcctctgacaccgcgtttgaaacataacgttgcttgctgttcccttgatcaccgggcccttgttgaataaaaggccgtnggttcccncctncctgttccnnttttttgggaatccccaccttgggccctttntcccctnttttt

SEQ ID NO: 9546 - DNA, 585 bp, Homo sapiens
  misc_feature (138)..(138): "n" may be a, t, c, g, other or unknown
  misc_feature (296)..(296): "n" may be a, t, c, g, other or unknown
  misc_feature (372)..(372): "n" may be a, t, c, g, other or unknown
  misc_feature (380)..(380): "n" may be a, t, c, g, other or unknown
  misc_feature (401)..(401): "n" may be a, t, c, g, other or unknown
  misc_feature (430)..(430): "n" may be a, t, c, g, other or unknown
  misc_feature (487)..(487): "n" may be a, t, c, g, other or unknown
  misc_feature (492)..(492): "n" may be a, t, c, g, other or unknown
  misc_feature (555)..(555): "n" may be a, t, c, g, other or unknown
  misc_feature (558)..(558): "n" may be a, t, c, g, other or unknown
  misc_feature (563)..(563): "n" may be a, t, c, g, other or unknown
  misc_feature (573)..(573): "n" may be a, t, c, g, other or unknown
aaacaagtgttgggagaacaacttttaataatacatatttaattttcagaaacatatgctaaccatcaacaacatgatcagggtttcattgccccagatgttatttcattggtacattatattgatatttacaaaggntttcaaattcaacaacacaaaacaaaacagcttaatttttaaaaactacaatgctttaaaaaaatgtaaacagtttaatttttacattattgtaaaaaagaagactcactccttaatgtggcttaatttttttttaagtgagcaaagcctggtgctcntggataaagaatgaaaataattctttacatagaaacattgtgctccagtgtggcaaagaaaaaaaaattatatgtncacatatnaagaaaagaatcttaagcccncaatttagacccaaaaaaatcttgtcccnaattgagaatttataaaaaccatttacatatggttgttgaactactggaaacctatntaccntttccaaacaatacccctccaaaaaacccctttttttaaaattaaattttgtgccaaaaaaantgntttancctaaaacanacatcccccctt

SEQ ID NO: 9547 - DNA, 588 bp, Homo sapiens
  misc_feature (54)..(54): "n" may be a, t, c, g, other or unknown
  misc_feature (71)..(71): "n" may be a, t, c, g, other or unknown
  misc_feature (107)..(107): "n" may be a, t, c, g, other or unknown
  misc_feature (118)..(118): "n" may be a, t, c, g, other or unknown
  misc_feature (149)..(149): "n" may be a, t, c, g, other or unknown
  misc_feature (219)..(219): "n" may be a, t, c, g, other or unknown
  misc_feature (236)..(236): "n" may be a, t, c, g, other or unknown
  misc_feature (264)..(264): "n" may be a, t, c, g, other or unknown
  misc_feature (299)..(299): "n" may be a, t, c, g, other or unknown
  misc_feature (387)..(387): "n" may be a, t, c, g, other or unknown
  misc_feature (399)..(399): "n" may be a, t, c, g, other or unknown
  misc_feature (416)..(416): "n" may be a, t, c, g, other or unknown
  misc_feature (454)..(454): "n" may be a, t, c, g, other or unknown
  misc_feature (497)..(497): "n" may be a, t, c, g, other or unknown
  misc_feature (517)..(517): "n" may be a, t, c, g, other or unknown
  misc_feature (540)..(540): "n" may be a, t, c, g, other or unknown
  misc_feature (575)..(575): "n" may be a, t, c, g, other or unknown
  misc_feature (581)..(581): "n" may be a, t, c, g, other or unknown
ggttgtttttattttttttttcattaaagtccattgatcatcacaaaaacccangaaatgcaactaagganaaaacaaacgtccaaccaagatctaagaaaccaganctatggagganacgttgcactggactgctgggtatgcacaanggggcaggaggggcgatccccatggggcatggccactggccatgggaaacacaggagggaggccaggcanctggctgggcggttatnttaaccgctgcacgatgacagcattgancaggttggcttccttcagggtctggctctcatcanccagctctttgttcgggaaagtattcatgaagataaaactggtggcaccatggctggccgggcatccaccataaaaaatccgatgtcnctgatcctgcangaattggggaaaccgtnaacaatgccatcctctgctgtccataccctgccctgtngaaaactaacacctccccaatccccttcctgactttctccccnaaacaccaaaactccccccngcctttggacaattccctccctnccaaaatcctccctttttttccctttccctgaaanaacccnccccccc

SEQ ID NO: 9548 - DNA, 366 bp, Homo sapiens
  misc_feature (69)..(69): "n" may be a, t, c, g, other or unknown
  misc_feature (139)..(139): "n" may be a, t, c, g, other or unknown
  misc_feature (146)..(146): "n" may be a, t, c, g, other or unknown
  misc_feature (171)..(171): "n" may be a, t, c, g, other or unknown
  misc_feature (243)..(243): "n" may be a, t, c, g, other or unknown
  misc_feature (268)..(268): "n" may be a, t, c, g, other or unknown
  misc_feature (273)..(273): "n" may be a, t, c, g, other or unknown
  misc_feature (295)..(295): "n" may be a, t, c, g, other or unknown
  misc_feature (308)..(308): "n" may be a, t, c, g, other or unknown
  misc_feature (320)..(320): "n" may be a, t, c, g, other or unknown
  misc_feature (349)..(350): "n" may be a, t, c, g, other or unknown
ctggagctctttctctgtaataagagctagagtggatgggcctgaccctagatgttttatgtaaatgangtcttggtttgagagaaacaaggattgggaaaaaaagcctgtattttccagtcctagtgaaacgggaganaaagaangtgtcagaagtggagcaaaagtcanataccagggtccccacttaatttttagcccttggtcaccacagcccaaaaggttggtggggagttgctttanaaacacccacatggccacggggaancccancaacactggggctggtggaatncctccgcaaaccngggaaaaagtcncccttggcttgaacttatcctgctgtttnnaaagctgtgatgggac

SEQ ID NO: 9549 - DNA, 584 bp, Homo sapiens
  misc_feature (165)..(165): "n" may be a, t, c, g, other or unknown
  misc_feature (336)..(336): "n" may be a, t, c, g, other or unknown
  misc_feature (389)..(389): "n" may be a, t, c, g, other or unknown
  misc_feature (416)..(416): "n" may be a, t, c, g, other or unknown
  misc_feature (503)..(503): "n" may be a, t, c, g, other or unknown
  misc_feature (516)..(516): "n" may be a, t, c, g, other or unknown
  misc_feature (531)..(531): "n" may be a, t, c, g, other or unknown
  misc_feature (549)..(549): "n" may be a, t, c, g, other or unknown
  misc_feature (569)..(569): "n" may be a, t, c, g, other or unknown
agatggagtctccctctgtcacccaggctggagtgcagtggcatgatcttggctcactgcaacctctatctcctgggttcaagtgattctgcctcagcctcctgagtagctgggactacagatgtgtgccaccacacccagctaatttttatatttttagtaaanacagggttttaccatattggccaggctagtctcgaactcttgacctcaaatgatccacccgccttggcttcccaaagtgttgggattacatgcgtaagccaccacaatcagctgagttctggctcttagtattactctagttatgtctctagataggctatggcctggaanattttaaaatttcaaattggacttattaaaataaaattataaacaatatttcnaagtttatttgatttaaaattacttcnttactactatttaaaaataatcttaacaacaaaaatattaatcccggcgtctttttctacccttatcataaatccctaatgggtaanccataatatatangtcttactgggatcnccaataaattaatccttnaaagttctgaatttcccccntttacccaatccccc

SEQ ID NO: 9550 - DNA, 591 bp, Homo sapiens
  misc_feature (122)..(122): "n" may be a, t, c, g, other or unknown
  misc_feature (368)..(368): "n" may be a, t, c, g, other or unknown
  misc_feature (444)..(444): "n" may be a, t, c, g, other or unknown
  misc_feature (467)..(467): "n" may be a, t, c, g, other or unknown
  misc_feature (476)..(476): "n" may be a, t, c, g, other or unknown
  misc_feature (485)..(485): "n" may be a, t, c, g, other or unknown
  misc_feature (502)..(502): "n" may be a, t, c, g, other or unknown
  misc_feature (509)..(509): "n" may be a, t, c, g, other or unknown
  misc_feature (524)..(524): "n" may be a, t, c, g, other or unknown
  misc_feature (565)..(565): "n" may be a, t, c, g, other or unknown
  misc_feature (569)..(569): "n" may be a, t, c, g, other or unknown
acagaagggagggagatttaatgttgtccatagaaagacattaaatgtcagactgacaatttagttatggttacaaaccggaaaaccatgccatttggagtaatggaatttgaagttactanaaaacgacaacagatttttgatacagaatgacaaggcttatctataacacgtcaacgttttcgacgactctgaaatttataaatagctggggagttcaccgtttctttcttcaccttcactttctgagttttatccataagatctttgcgtgtttgaattttctgagcaataacgaacaatttcttctctcgttcaatccgctgtgtcaggcagttatactgcttttgcctttctttagctattcncttaagttccagtctgattggtaactcctttcctttttcttctgccaaggtctctatcctgggcctattaaaaacnctgtcaactaactccggggctgnttgcaggtnatttgcaanatcaaactgttcacctnccttttnggtgtcaaaaaaaanacatgcttgttcctttgctcccctgaaatcccccaaatgancccngaattttatccttccaatttcc

SEQ ID NO: 9551 - DNA, 596 bp, Homo sapiens
  misc_feature (98)..(98): "n" may be a, t, c, g, other or unknown
  misc_feature (199)..(199): "n" may be a, t, c, g, other or unknown
  misc_feature (358)..(358): "n" may be a, t, c, g, other or unknown
  misc_feature (394)..(394): "n" may be a, t, c, g, other or unknown
  misc_feature (422)..(422): "n" may be a, t, c, g, other or unknown
  misc_feature (477)..(477): "n" may be a, t, c, g, other or unknown
  misc_feature (481)..(481): "n" may be a, t, c, g, other or unknown
  misc_feature (493)..(493): "n" may be a, t, c, g, other or unknown
  misc_feature (497)..(497): "n" may be a, t, c, g, other or unknown
  misc_feature (531)..(531): "n" may be a, t, c, g, other or unknown
  misc_feature (563)..(563): "n" may be a, t, c, g, other or unknown
  misc_feature (567)..(567): "n" may be a, t, c, g, other or unknown
  misc_feature (582)..(582): "n" may be a, t, c, g, other or unknown
  misc_feature (596)..(596): "n" may be a, t, c, g, other or unknown
agacctgtacagtttttattacataaaatatcacaaaattcacaagtacaacactgcttattttcttgcttgaagatcagatctctggtttatttaanatcaacattcaccacagctgaaggaaattaaactgaacctttaaaaggtaccgcatacggacctggttggggttatatacaatatattcattgtagttganggtataaccatctggattcagaattcctgtgtcacttgctggtcctaatggcactgtactcccattcctgccaaatggaaaaaaaatgtgtcaacatcagtctctggttcagaactgcaataaaaaacgtatcttatctgggccaaaagaattctctantcctcctggttctgaattacttacagggtgacaaantgggcaaaactgggaaccatcttgcccnccccctgggtgctatttttccctgaaaccaaccctccggccttaggaatgggccnctantttttcattacnctgnacctaaaactacccctgataaaacaaccatcctnttttcttttgcaaaaaagcaaaccattaattngccncctggaaaaaatttntcccaatttaatcn

SEQ ID NO: 9552 - DNA, 520 bp, Homo sapiens
  misc_feature (11)..(11): "n" may be a, t, c, g, other or unknown
  misc_feature (60)..(60): "n" may be a, t, c, g, other or unknown
  misc_feature (69)..(69): "n" may be a, t, c, g, other or unknown
  misc_feature (320)..(320): "n" may be a, t, c, g, other or unknown
  misc_feature (328)..(328): "n" may be a, t, c, g, other or unknown
  misc_feature (345)..(345): "n" may be a, t, c, g, other or unknown
  misc_feature (454)..(454): "n" may be a, t, c, g, other or unknown
  misc_feature (464)..(464): "n" may be a, t, c, g, other or unknown
  misc_feature (467)..(467): "n" may be a, t, c, g, other or unknown
  misc_feature (478)..(478): "n" may be a, t, c, g, other or unknown
  misc_feature (499)..(499): "n" may be a, t, c, g, other or unknown
  misc_feature (512)..(512): "n" may be a, t, c, g, other or unknown
  misc_feature (514)..(514): "n" may be a, t, c, g, other or unknown
aactgggaganatctgaacatggttaaatgcagataaaagagaaagatcagttgagggangtgacttangtatgagtgtgagggataactattggtatgtgtccaaaagaatgctgctcttttcagaactacaaatgtcagaaaggggcatctatagctgctaccgaccaaagtaggaaattttagagcacagtttctctaggaaataccatcaactaaccctccacaaatagctgagattgacagctttaccatggtttatttcacagtagaaaaataaggtttgagccgggcgtggtggtgtgcacctgcagctccanctactcangaggctgaggcaggaanattccttgagccccacagtttgaggctgcagtgagctgtgatcataccactgcactcctgcctgggtgaccagtgagaccttgtctcaatgtggtgactcctgcttgtntgttattccnccncttttaagggnccaagaagatagatccttccntccggaattccanantaaccc

SEQ ID NO: 9553 - DNA, 587 bp, Homo sapiens
  misc_feature (70)..(70): "n" may be a, t, c, g, other or unknown
  misc_feature (112)..(112): "n" may be a, t, c, g, other or unknown
  misc_feature (468)..(468): "n" may be a, t, c, g, other or unknown
  misc_feature (496)..(496): "n" may be a, t, c, g, other or unknown
  misc_feature (523)..(523): "n" may be a, t, c, g, other or unknown
  misc_feature (525)..(525): "n" may be a, t, c, g, other or unknown
  misc_feature (527)..(527): "n" may be a, t, c, g, other or unknown
atgaagatattttcctttaatttatcaaacatttcacattcatgaagtcatttacttcagagcaaatgtnagcttataatattaaaaattaaagtattacaatatttacaanatggttggcaggggacacttactagtataaaaataatacaaatattgtattttcctcttatctgccagtaaaaatggcaaacagttttgtctttctgaagtttctagtcaataaccaaagatgaggagcccctaataaagtgccttgccctgtatgctccactgtctatagctttagaccctcaacattcttcttcaagttcagcagctctttttcttgccttcttttctccagtttaaatgctaatttgttagctttcttctccactcttcgttccttgcgctcttcttttatagcttgctttcttgctcttttatcttctttgctttcatttttaaaaacgtggctgaattganactttaagaaaatcactggccattaacntccgttatcctttcagttggcttgggngnantcctttctttggtaaaaaattgaaaagtttcctgtttaaaaaaaattcaaattgtttggg

SEQ ID NO: 9554 - DNA, 587 bp, Homo sapiens
  misc_feature (91)..(91): "n" may be a, t, c, g, other or unknown
  misc_feature (192)..(192): "n" may be a, t, c, g, other or unknown
  misc_feature (198)..(198): "n" may be a, t, c, g, other or unknown
  misc_feature (203)..(203): "n" may be a, t, c, g, other or unknown
  misc_feature (290)..(290): "n" may be a, t, c, g, other or unknown
  misc_feature (299)..(299): "n" may be a, t, c, g, other or unknown
  misc_feature (368)..(368): "n" may be a, t, c, g, other or unknown
  misc_feature (524)..(524): "n" may be a, t, c, g, other or unknown
  misc_feature (537)..(537): "n" may be a, t, c, g, other or unknown
  misc_feature (561)..(561): "n" may be a, t, c, g, other or unknown
  misc_feature (569)..(569): "n" may be a, t, c, g, other or unknown
  misc_feature (571)..(571): "n" may be a, t, c, g, other or unknown
  misc_feature (577)..(577): "n" may be a, t, c, g, other or unknown
  misc_feature (579)..(579): "n" may be a, t, c, g, other or unknown
ctgggttgggttttttcatgggtttttgttttgtttatttcgaatactgaaaaagtcctttgggctctgtggggttccccacgctcacggntcctttctcccacactcactgcccttcttcccacagcaaatctatttcaaggacagtactttttaaaatgattaatgttgagttctcaactagctctgcanaactanagganctgtttgcatctgtctgtgcggatggagtttcttttatctgacaccaggtctccaaccacactgaaacaaggcatttatctacaganctcaactanaaccccttttcattaggctactccacttccttcccctcatacctaccccacatcagccacgtggttaanaaggatagtcaggaatgtttttaccaactccaagccctaattcatactcctccatatctcccaccccaccctttcaaccccacccccacccccagaatttcattgatatttctcccaactgttatttggaaaaaaagttaaacaaaaaagttccangtctttgtgccanccaaagggggcccttttttggganacccacangnaaaggntnttcccccc

SEQ ID NO: 9555 - DNA, 581 bp, Homo sapiens
  misc_feature (99)..(99): "n" may be a, t, c, g, other or unknown
  misc_feature (204)..(204): "n" may be a, t, c, g, other or unknown
  misc_feature (237)..(237): "n" may be a, t, c, g, other or unknown
  misc_feature (334)..(334): "n" may be a, t, c, g, other or unknown
  misc_feature (410)..(410): "n" may be a, t, c, g, other or unknown
  misc_feature (416)..(416): "n" may be a, t, c, g, other or unknown
  misc_feature (452)..(452): "n" may be a, t, c, g, other or unknown
  misc_feature (460)..(460): "n" may be a, t, c, g, other or unknown
  misc_feature (495)..(495): "n" may be a, t, c, g, other or unknown
  misc_feature (502)..(502): "n" may be a, t, c, g, other or unknown
  misc_feature (519)..(519): "n" may be a, t, c, g, other or unknown
  misc_feature (547)..(547): "n" may be a, t, c, g, other or unknown
  misc_feature (581)..(581): "n" may be a, t, c, g, other or unknown
gagacggcgtctcactgtctccaggctggagtgcaatggcgtgatcttggctaattttttgtagttttagtaaagacggggttccaccatgttggccangatggtctcaatctctcgacctcgtgatccacttgcctcggctttccaaagtgctgggattacaggcgtgagccaccgtgcccggccccctttttatctttgaanataaaaaataacttcttattttctaattctganaatgatttaagttcactttctaacctatccggggctgttttagttatttttgaacttccaggaaatctgctttcgaacccaaattttattaagtgtnactactcggacagcctgccaatcatatcacaggatatcccaattggaaagctattgggaatgttccttcctccccnaagtanaaatcaagttataaacgggcaaaatttcctattccnaagggcgnatttaatatttcaattcccttccctccccccttanaaaaatnttaaaaagaaaaaattntcccctgctccaattttaaccaggtttnaaaaaatggttttggggtaatattttaaattatn

SEQ ID NO: 9556 - DNA, 442 bp, Homo sapiens
  misc_feature (88)..(88): "n" may be a, t, c, g, other or unknown
  misc_feature (93)..(93): "n" may be a, t, c, g, other or unknown
  misc_feature (103)..(103): "n" may be a, t, c, g, other or unknown
  misc_feature (211)..(211): "n" may be a, t, c, g, other or unknown
  misc_feature (244)..(244): "n" may be a, t, c, g, other or unknown
  misc_feature (258)..(258): "n" may be a, t, c, g, other or unknown
  misc_feature (287)..(287): "n" may be a, t, c, g, other or unknown
  misc_feature (345)..(345): "n" may be a, t, c, g, other or unknown
  misc_feature (362)..(362): "n" may be a, t, c, g, other or unknown
  misc_feature (372)..(372): "n" may be a, t, c, g, other or unknown
  misc_feature (397)..(397): "n" may be a, t, c, g, other or unknown
  misc_feature (400)..(400): "n" may be a, t, c, g, other or unknown
  misc_feature (417)..(417): "n" may be a, t, c, g, other or unknown
  misc_feature (432)..(432): "n" may be a, t, c, g, other or unknown
aacagctacaatttattgagcacttactaggtcttaaatatttgctaaatacatacacagtactcacaatagccccaggaaattatanatgtntttaagtttnggatcaatgagtaatcgttagctgagtaaaaagctcttttctaccctacaataagctcgacattaaagactgacattccaattaatataattaaccctggacttatanaactgttttctcataataatgcacatctactgntaaatgactactcncaaagttgttttctttttcatgttcaaanaaaattacatttctttcctttcacttttccaataaaatactcttcagttctactctanaatctcttaggaaattntttgaaatanaaatcaatttaagccctataactanaanctttttctcttgttganctgctttgcaggganaaaatggctt

SEQ ID NO: 9557 - DNA, 606 bp, Homo sapiens
  misc_feature (314)..(314): "n" may be a, t, c, g, other or unknown
  misc_feature (425)..(425): "n" may be a, t, c, g, other or unknown
  misc_feature (511)..(511): "n" may be a, t, c, g, other or unknown
  misc_feature (549)..(549): "n" may be a, t, c, g, other or unknown
  misc_feature (554)..(554): "n" may be a, t, c, g, other or unknown
  misc_feature (597)..(597): "n" may be a, t, c, g, other or unknown
agagtgcaaaatgcttcttattaaatacttcagggacacaaaagcaatttgtttttaaacagaggcatccttttctgaaggatcatcaccacaaagacatccattgccggcaatggacgtgaacagaactgccagctcgaataagatgcaacgttaggactctgccttcagtttctttgcctttcccgatgaccccagttatttgtacaaactcattgttggactctggtacatgcacatatatgcatcacaaagcagtcttcgtgcacagccttggattctcctggagtccaaggaatgcaggtcttccaaanacatcttcaagtactctcctacttctgggcatggggtgacttgaggaatgttgaaccattctgaccaccatcccgatcggccatgctgtcaaaaaaaaaccagcaaaatcnccttcccatacttcacaaaagcacatatgggcttgtttctatgcaaaaaacaacaaataactccatattctggcaaggggatgcanccgtgtttccatcccatcgggttattctttgggaaatnacccngggttttttttttaatcccccccctccgaaaaaagtggaattnaattttccg

SEQ ID NO: 9558 - DNA, 556 bp, Homo sapiens
  misc_feature (156)..(156): "n" may be a, t, c, g, other or unknown
  misc_feature (300)..(300): "n" may be a, t, c, g, other or unknown
  misc_feature (323)..(323): "n" may be a, t, c, g, other or unknown
  misc_feature (359)..(359): "n" may be a, t, c, g, other or unknown
  misc_feature (373)..(373): "n" may be a, t, c, g, other or unknown
  misc_feature (380)..(380): "n" may be a, t, c, g, other or unknown
  misc_feature (387)..(387): "n" may be a, t, c, g, other or unknown
  misc_feature (410)..(410): "n" may be a, t, c, g, other or unknown
  misc_feature (465)..(465): "n" may be a, t, c, g, other or unknown
  misc_feature (471)..(471): "n" may be a, t, c, g, other or unknown
  misc_feature (475)..(475): "n" may be a, t, c, g, other or unknown
  misc_feature (493)..(493): "n" may be a, t, c, g, other or unknown
  misc_feature (504)..(504): "n" may be a, t, c, g, other or unknown
  misc_feature (519)..(519): "n" may be a, t, c, g, other or unknown
  misc_feature (526)..(526): "n" may be a, t, c, g, other or unknown
agaggtgtcatgtttactttttatttaggagtacaaactgagacaaaatcatccttccagttagtgaggttttgagggatcatactaaagagaagacaggaaaacaccagtaatggtgaaggtcttgagaaaaggacaggacccgcagatagcganagatcagaggaggccctaatttctttcctcatttcctttccaaatatcccaaatgtgcaatgcatcacctgagacagaaggcagaaagcatcaagctctctgtttatcccaattcaatgacaaccagaacttattttttttganatggggtctcgttctgtccccangctggagtgcagtggggcattcatggctcatcgcancctccaactctcantctcaancaacccncctacttcagtgtcctgaattanctggaatacaggcatgcccaccacacttggctcatttttaaaaaatttctttttnaaacangatnttgctacattgccccagncttgaatttcntgggtgcattcccanctccccncaggctcaaaatccttggtcccaaacaatc

SEQ ID NO: 9559 - DNA, 520 bp, Homo sapiens
  misc_feature (186)..(186): "n" may be a, t, c, g, other or unknown
  misc_feature (431)..(431): "n" may be a, t, c, g, other or unknown
  misc_feature (476)..(476): "n" may be a, t, c, g, other or unknown
  misc_feature (491)..(492): "n" may be a, t, c, g, other or unknown
  misc_feature (497)..(497): "n" may be a, t, c, g, other or unknown
  misc_feature (501)..(501): "n" may be a, t, c, g, other or unknown
  misc_feature (517)..(517): "n" may be a, t, c, g, other or unknown
gttttcttattcttttctttatttgtttaaaccatagagatacaggtgacagtttaccactgaagttctcaatccttaaatttacattattttgagcataggagaatagcttacattcttagagtaaatggtattctgaggctacagcctatgtgcatatgtttatatatgtatttgttttagaanagctgactattattccttgattaattttattttgaaagttagtgctccagctatgctagtttatgtcccaggttatttgggacaccacacctcaaggatatttttgaataattttgagattctcaaccactatgagttgataagggatctagacttctcagagacatgaaattagaaaatgtgattttaaaatgatacttaatgaaaacatacagttcagaaacactgaaataatactattttanttttaaaccccaaatcatgcattcatgaaaactttgggttttacnttcaatgcccctgtnnttcanaatnaaaaaactgaaggccnaaa

SEQ ID NO: 9560 - DNA, 588 bp, Homo sapiens
  misc_feature (15)..(15): "n" may be a, t, c, g, other or unknown
  misc_feature (107)..(107): "n" may be a, t, c, g, other or unknown
  misc_feature (467)..(467): "n" may be a, t, c, g, other or unknown
  misc_feature (499)..(499): "n" may be a, t, c, g, other or unknown
  misc_feature (511)..(512): "n" may be a, t, c, g, other or unknown
  misc_feature (527)..(527): "n" may be a, t, c, g, other or unknown
  misc_feature (532)..(532): "n" may be a, t, c, g, other or unknown
  misc_feature (588)..(588): "n" may be a, t, c, g, other or unknown
aaaagttgctgttanggactttattactattctcttttaggatacatcaacatttgaattttaccagcatatgtgacttagttttcttagtttttgtcatttttaanaatcctggcaaataattttaaataatttatttgttactaaaatttgatataaccttaatgatctttcagcacattatcaaattatttagccatcctaaaatacttgatgaataaattaatagaagttaatgtttctagtttgcctcacttttctggaattattcttattttgcagattagtcttgccaactaccgatgccacagaatttaattaccaattgcaaagccattttcatagtcataattatattctaggcaatattttttggtcaggttctcctccagtctgcagtcaatgtcctctgcatcactacaaaatgatggggaacatttttcccagggtcgtctccaatgcttcanaaaacttcttcacagatctgtgtctcacaacnaactgctttgtnnaacatctccaaggantgaanccgtggttgcaaaacttttttggccatctggccatccctggtaattttgttcccan

SEQ ID NO: 9561 - DNA, 589 bp, Homo sapiens
  misc_feature (471)..(471): "n" may be a, t, c, g, other or unknown
  misc_feature (502)..(502): "n" may be a, t, c, g, other or unknown
  misc_feature (519)..(519): "n" may be a, t, c, g, other or unknown
  misc_feature (535)..(536): "n" may be a, t, c, g, other or unknown
  misc_feature (545)..(545): "n" may be a, t, c, g, other or unknown
  misc_feature (587)..(587): "n" may be a, t, c, g, other or unknown
aatgggaaactattggtgcctttttaataagttgtggtgaggagagttcaaattacagcataacagaattcgtttcgtgaattaatgcagtctgtagtaagcatatcatatagcagtattatccagttaaagaaagatacagttgaaaaacattacgttttaattctccatgagtaaagtgataagtaactataaaatcattattgggagaacatggaaacagtcaagcataacgaacttacagaaagataattatctccaaatttaggaagtacatgtacctgcctacccacctcttcaagcctatgcttaccacacgtgcaaaaatacaatacaatacaactactgcaattattactatcattttcttttgcccttaggtgaaaaacacctgacagctacatgctgagccatgctaacaaaactaaacctttcactttctttaatagtaaaattaccattactgaatcnttgtcctaaaaagtgcttccagttcttaccncttattttaaataaacnccattttgaaacatcnncttgaaaancgcctaatttttttttaaccccgatacttccattttccccgngg

SEQ ID NO: 9562 - DNA, 456 bp, Homo sapiens
  misc_feature (353)..(353): "n" may be a, t, c, g, other or unknown
  misc_feature (387)..(387): "n" may be a, t, c, g, other or unknown
  misc_feature (415)..(415): "n" may be a, t, c, g, other or unknown
  misc_feature (425)..(425): "n" may be a, t, c, g, other or unknown
  misc_feature (443)..(443): "n" may be a, t, c, g, other or unknown
  misc_feature (447)..(447): "n" may be a, t, c, g, other or unknown
  misc_feature (451)..(451): "n" may be a, t, c, g, other or unknown
  misc_feature (455)..(455): "n" may be a, t, c, g, other or unknown
ctgtcaccaggatgtagtgcagcagcatgatcatggctcactgtagcctcaaactcccaggttccagcaactctctcacctcagcctttcgaatagctgggactacaggaatgtaccaccatgcctgggtaatttttgtatatctgtatttcttgcagaggcggagtttcaccatgttgcccagactggtcttgaactcctgggctcaagaaattctccttccttaccttcccaaagtgttgggattacaggcgtgagccactgtgcctcgtttattcattttttcaatttgacttaagtaaggaccatttctctgactaatatgtatttaattttggaagttaaaaaatttnggagctaaaagtatgatctgaaagaccgaaacanatgctcctttatcgataaagatggatcnaatggtttangaaactaaattacctacnggtncagntctng

SEQ ID NO: 9563 - DNA, 427 bp, Homo sapiens
  misc_feature (18)..(18): "n" may be a, t, c, g, other or unknown
  misc_feature (59)..(59): "n" may be a, t, c, g, other or unknown
  misc_feature (63)..(63): "n" may be a, t, c, g, other or unknown
  misc_feature (141)..(141): "n" may be a, t, c, g, other or unknown
  misc_feature (145)..(145): "n" may be a, t, c, g, other or unknown
  misc_feature (210)..(210): "n" may be a, t, c, g, other or unknown
  misc_feature (341)..(341): "n" may be a, t, c, g, other or unknown
  misc_feature (346)..(346): "n" may be a, t, c, g, other or unknown
  misc_feature (365)..(365): "n" may be a, t, c, g, other or unknown
  misc_feature (380)..(380): "n" may be a, t, c, g, other or unknown
  misc_feature (383)..(383): "n" may be a, t, c, g, other or unknown
  misc_feature (395)..(395): "n" may be a, t, c, g, other or unknown
  misc_feature (419)..(419): "n" may be a, t, c, g, other or unknown
ctttaaagaaaaattgantttattaacaacaaaagttgggggtggggaaaaaacaaatnaaanggtcacaaacagaacactaaaaaatgctttgctgctcacaataatggtgtctgaaaccagccctgaatgccctgggantcantcactgtcactatcagcttcactggaatcagaactgcagcttcactgccatcctcctgggccgantgctcgctgccactgggggaaaggactggcgctgcggctgtggctccggctccgctggccacccccattgctgccgctgtctgaatcattgtcactgccaccttgggcctgtcctctgtcctcatcatcanaatcngcatcgtcctcaaaatcancatcactgccaaaanatntcctctttgtcncgggcaacccgggcctcatcctcnctgctctc

SEQ ID NO: 9564 - DNA, 590 bp, Homo sapiens
  misc_feature (1)..(590): "n" may be a, t, c, g, other or unknown
nnnnnnnnnnnnnnnnnnnnnnnnnnnnnnnnnnnnnnnnnnnnnnnnnnnnnnnnnnnnnnnnnnnnnnnnnnnnnnnnnnnnnnnnnnnnnnnnnnnnnnnnnnnnnnnnnnnnnnnnnnnnnnnnnnnnnnnnnnnnnnnnnnnnnnnnnnnnnnnnnnnnnnnnnnnnnnnnnnnnnnnnnnnnnnnnnnnnnnnnnnnnnnnnnnnnnnnnnnnnnnnnnnnnnnnnnnnnnnnnnnnnnnnnnnnnnnnnnnnnnnnnnnnnnnnnnnnnnnnnnnnnnnnnnnnnnnnnnnnnnnnnnnnnnnnnnnnnnnnnnnnnnnnnnnnnnnnnnnnnnnnnnnnnnnnnnnnnnnnnnnnnnnnnnnnnnnnnnnnnnnnnnnnnnnnnnnnnnnnnnnnnnnnnnnnnnnnnnnnnnnnnnnnnnnnnnnnnnnnnnnnnnnnnnnnnnnnnnnnnnnnnnnnnnnnnnnnnnnnnnnnnnnnnnnnnnnnnnnnnnnnnnnnnnnnnnnnnnnnnnnnnnnnnnnnnnnnnnnnnnnnnnnnnnnnnnnnnnnnnnnnnnnnnnnnnnnnnnnnnnnnnnnnnnn

SEQ ID NO: 9565 - DNA, 595 bp, Homo sapiens
  misc_feature (278)..(278): "n" may be a, t, c, g, other or unknown
  misc_feature (280)..(280): "n" may be a, t, c, g, other or unknown
  misc_feature (394)..(394): "n" may be a, t, c, g, other or unknown
  misc_feature (457)..(457): "n" may be a, t, c, g, other or unknown
  misc_feature (485)..(485): "n" may be a, t, c, g, other or unknown
  misc_feature (494)..(494): "n" may be a, t, c, g, other or unknown
  misc_feature (504)..(504): "n" may be a, t, c, g, other or unknown
  misc_feature (506)..(506): "n" may be a, t, c, g, other or unknown
  misc_feature (509)..(509): "n" may be a, t, c, g, other or unknown
  misc_feature (544)..(544): "n" may be a, t, c, g, other or unknown
  misc_feature (563)..(563): "n" may be a, t, c, g, other or unknown
agaaaagctaatttaaaatatttagaaatagctagcctatgtacagcaagttttcatgtctttttttaataaatagatttctaggagtcagtatatatttaatactcttcttccttaagaaaatagaagtttaggtcaagtgttaagctttatcactttgacactgtccttatctcacaatggaggaatttagaaaggaccttaacagtttcacaaacataaataaagccttagtcacactaaattaaaaaaaaaaaaattccttagggatatcttanantagtaaagtgacttcctcatataaatagtttgaaagggtacttaagtttttcacccaaattgtgatatacaaaaaggttattaccaagcaacctacatgtcaagaaagccccanttagggaaggagccacagcatttatcttgtttataatttctttggtacccccactgtttaaancacaggttgaacaccatgttcatctaanccttattanttaaaaaatntnttntggcaaggcaaataactattttaaaaaacattaanttccccatttgttaaaatnccgttttaaaatacctgctataccactataaa

SEQ ID NO: 9566 - DNA, 542 bp, Homo sapiens
  misc_feature (188)..(188): "n" may be a, t, c, g, other or unknown
  misc_feature (193)..(193): "n" may be a, t, c, g, other or unknown
  misc_feature (243)..(243): "n" may be a, t, c, g, other or unknown
  misc_feature (325)..(325): "n" may be a, t, c, g, other or unknown
  misc_feature (380)..(380): "n" may be a, t, c, g, other or unknown
  misc_feature (408)..(408): "n" may be a, t, c, g, other or unknown
  misc_feature (424)..(424): "n" may be a, t, c, g, other or unknown
  misc_feature (426)..(426): "n" may be a, t, c, g, other or unknown
  misc_feature (450)..(450): "n" may be a, t, c, g, other or unknown
  misc_feature (483)..(483): "n" may be a, t, c, g, other or unknown
  misc_feature (512)..(513): "n" may be a, t, c, g, other or unknown
  misc_feature (515)..(515): "n" may be a, t, c, g, other or unknown
  misc_feature (530)..(530): "n" may be a, t, c, g, other or unknown
  misc_feature (538)..(538): "n" may be a, t, c, g, other or unknown
aagagacagtgtcttgctctgcctcctaggcaggagtgcggtctcacgataacagttcactgcagcctccatctcctgggctcaagcaatccacccacctcggcctcccacgtagctggggctacaggcacgcatcaccatgcctggctcttgtcagtatgaatccctgctgtgtccccagcatctanagcanagcctggcacatggcaggcccatctttgtggagtgaactgggaacaggancgctgggatggtggagtgttctaagtgagacagccacagtgcccgtcctgtttgctcctctcgcccgaactgccactttcantgtcaggactggggaaaaacataggcaaaaaggcctgaaatccaagggaccccangctgcccactgcccaccgcccacctcancctggcccacactcananggtctcccacctcggcctggccancgcacaaaagcctcccacctcggcctggccaancccccaaagctccccctcggcctggcccnncncccaaaaggcccccncctccgcntgcc

SEQ ID NO: 9567 - DNA, 382 bp, Homo sapiens
  misc_feature (97)..(97): "n" may be a, t, c, g, other or unknown
  misc_feature (102)..(102): "n" may be a, t, c, g, other or unknown
  misc_feature (128)..(128): "n" may be a, t, c, g, other or unknown
  misc_feature (165)..(165): "n" may be a, t, c, g, other or unknown
  misc_feature (175)..(175): "n" may be a, t, c, g, other or unknown
  misc_feature (203)..(203): "n" may be a, t, c, g, other or unknown
  misc_feature (207)..(207): "n" may be a, t, c, g, other or unknown
  misc_feature (209)..(209): "n" may be a, t, c, g, other or unknown
  misc_feature (288)..(288): "n" may be a, t, c, g, other or unknown
  misc_feature (335)..(335): "n" may be a, t, c, g, other or unknown
  misc_feature (354)..(354): "n" may be a, t, c, g, other or unknown
  misc_feature (357)..(357): "n" may be a, t, c, g, other or unknown
  misc_feature (364)..(364): "n" may be a, t, c, g, other or unknown
  misc_feature (367)..(367): "n" may be a, t, c, g, other or unknown
  misc_feature (382)..(382): "n" may be a, t, c, g, other or unknown
caggattcagactttcgtgtttctctccaaatctgaagtttacaaaagtagccgagctgctcatcagggatatgcaagtctgctttctgcagcaganaacanaagtgaaagggagaaggatgagcaanaaagtctctggatttcaggagaaggaaaacagccccnagggcagganaaacacttgtgaagggtccattgaaaanacananagggggcagctctggcctctctgctgccacttccctcattcgatgcacagcggtggggctcacaccattttccactcancctcttccgcacaacctgcacatctatcgtttcttcaggggctgganctggttccaccatgcctanccnaaatcanganggggtcctggggccn

SEQ ID NO: 9568 - DNA, 553 bp, Homo sapiens
  misc_feature (7)..(7): "n" may be a, t, c, g, other or unknown
  misc_feature (25)..(25): "n" may be a, t, c, g, other or unknown
  misc_feature (312)..(312): "n" may be a, t, c, g, other or unknown
  misc_feature (322)..(322): "n" may be a, t, c, g, other or unknown
  misc_feature (363)..(363): "n" may be a, t, c, g, other or unknown
  misc_feature (391)..(391): "n" may be a, t, c, g, other or unknown
  misc_feature (416)..(416): "n" may be a, t, c, g, other or unknown
  misc_feature (419)..(419): "n" may be a, t, c, g, other or unknown
  misc_feature (443)..(443): "n" may be a, t, c, g, other or unknown
  misc_feature (461)..(461): "n" may be a, t, c, g, other or unknown
  misc_feature (473)..(473): "n" may be a, t, c, g, other or unknown
  misc_feature (495)..(495): "n" may be a, t, c, g, other or unknown
  misc_feature (523)..(523): "n" may be a, t, c, g, other or unknown
  misc_feature (535)..(535): "n" may be a, t, c, g, other or unknown
  misc_feature (537)..(537): "n" may be a, t, c, g, other or unknown
  misc_feature (547)..(547): "n" may be a, t, c, g, other or unknown
caatcanaaaaggttttattataanaaacaatgacatcaggtaaaaatgcaaaaaattgtgcaattatggcaaaatgtttaaaaatatctacacatttgcccccacaggactacagtacttactacatacctgagcactgaacattgaattccattttaaactgctttacatagggaatctgattccttcatgatcacatccatttgttctcatgaccaataaaatcagcttgatgcttaagcatcaactttgttgaacagaaaacaaagatggaaaataaagaatacaatttctactttcctataacatanttatacccantccagttttcaatgtgtgacaaatatataggaaaagtgctncatacattcttcaaatgcaaaaacaaanttaaagtggaactggcattattttnaanctacattttaattccgttttaccnttgtgccttttacttaangggtctgccccnctatgaaaatgccccttaaatntctaaattataacccccccttttcctantcctacttttcnanggacccctcngaaacc

SEQ ID NO: 9569 - DNA, 353 bp, Homo sapiens
  misc_feature (237)..(237): "n" may be a, t, c, g, other or unknown
  misc_feature (281)..(281): "n" may be a, t, c, g, other or unknown
  misc_feature (296)..(296): "n" may be a, t, c, g, other or unknown
  misc_feature (328)..(328): "n" may be a, t, c, g, other or unknown
  misc_feature (335)..(335): "n" may be a, t, c, g, other or unknown
  misc_feature (341)..(341): "n" may be a, t, c, g, other or unknown
  misc_feature (348)..(349): "n" may be a, t, c, g, other or unknown
cttttttgccctcattttagttagttgaagtttcttgtggctctgtagtgactgctctgatagaatatcccttacaactttgtggcagttaatttctggatgatcactgtgacttccatttacatgtatttggcaagattttagagtattttcttttaatggactgggttcaatctttattctggaagcttcaccgtatttttcctgattttctataaaccttatttcacctgtacngagaggctctccaaagccagtaacttctcctggactccttggtntctctaaattttctntacaacaatcagtttttttaatttcacaaggncggcganttctantttcatnnttgg

SEQ ID NO: 9570 - DNA, 566 bp, Homo sapiens
  misc_feature (511)..(511): "n" may be a, t, c, g, other or unknown
  misc_feature (519)..(519): "n" may be a, t, c, g, other or unknown
  misc_feature (523)..(523): "n" may be a, t, c, g, other or unknown
  misc_feature (527)..(527): "n" may be a, t, c, g, other or unknown
  misc_feature (529)..(529): "n" may be a, t, c, g, other or unknown
  misc_feature (538)..(538): "n" may be a, t, c, g, other or unknown
  misc_feature (558)..(558): "n" may be a, t, c, g, other or unknown
acacattaaatgtaccacagtttaatagttttgtgatagttcaataactgtcatttgctttaatctacagaattttaaaaaatctaaataaaactattacgctggccagataaaatagtaacaaaaaaagtaaagagatataaaacaaactgtacactattacaaagtagtggttctctgtatgtctatgtgtatatatgtatatataaaactatacagatacatgtgtgtatataaacatacatatgtatatatacacacatatacttaattttaaagttaatcaaatggttatcaaaaattaatatacaacaaagattcctgggaaggtaatgcttatataaaataaggccatgtttctaaaaatccctcaaatcagtccaagataagatttttaatgaaaaacataaaaggttaaagaaatccttctctccaagttagccggttttcccccactgttttcctcctgccttttcccggtggtggtccaaataaacctccttgtgccctnaaaggccncccncctntnaaatggccnccccccttatgaaaaaatcnacccccaa

SEQ ID NO: 9571 - DNA, 604 bp, Homo sapiens
  misc_feature (311)..(311): "n" may be a, t, c, g, other or unknown
  misc_feature (395)..(395): "n" may be a, t, c, g, other or unknown
  misc_feature (418)..(418): "n" may be a, t, c, g, other or unknown
  misc_feature (427)..(427): "n" may be a, t, c, g, other or unknown
  misc_feature (434)..(434): "n" may be a, t, c, g, other or unknown
  misc_feature (475)..(475): "n" may be a, t, c, g, other or unknown
  misc_feature (500)..(500): "n" may be a, t, c, g, other or unknown
  misc_feature (514)..(514): "n" may be a, t, c, g, other or unknown
  misc_feature (517)..(517): "n" may be a, t, c, g, other or unknown
  misc_feature (529)..(529): "n" may be a, t, c, g, other or unknown
  misc_feature (552)..(552): "n" may be a, t, c, g, other or unknown
  misc_feature (573)..(573): "n" may be a, t, c, g, other or unknown
  misc_feature (591)..(591): "n" may be a, t, c, g, other or unknown
  misc_feature (604)..(604): "n" may be a, t, c, g, other or unknown
ggatgagtcttccgttttattacaaaaatgaagatcagtttgatcaaaatgaaagcttgttcacaagttttacatgaatattctaaatacaaagtctcctgaaacaacatacttttgatatgattttcatttttaaagggatgcaaacattccattttctcatttataatctattccaaggcaaagtattttaataatgtatcctttctgcagttagatcacaattcacaagtataactgaaacagacaaaaccttgtcagcaaaggttaaaagtccttttttctttaaaaaaaaaaaaaaaagggaggtnaataaccagcccttatgtgttttcagaattttgtactacactgacatgatttgcagtcaggtttttcttcctaccccttaaggntacaaaattctgttgcaaatgcnttgcaaaanaatctanaacacttaatgccaaaatcaaaaaatattttccataaaaantaattttataaatggttagaaacanttctgtggttaacnacnaattgaaatttncccccattactaaaccaatcctntttccccaaaacaaggaaaanaggtttccattccacaanctttaccggttan

SEQ ID NO: 9572 - DNA, 495 bp, Homo sapiens
  misc_feature (1)..(495): "n" may be a, t, c, g, other or unknown
nnnnnnnnnnnnnnnnnnnnnnnnnnnnnnnnnnnnnnnnnnnnnnnnnnnnnnnnnnnnnnnnnnnnnnnnnnnnnnnnnnnnnnnnnnnnnnnnnnnnnnnnnnnnnnnnnnnnnnnnnnnnnnnnnnnnnnnnnnnnnnnnnnnnnnnnnnnnnnnnnnnnnnnnnnnnnnnnnnnnnnnnnnnnnnnnnnnnnnnnnnnnnnnnnnnnnnnnnnnnnnnnnnnnnnnnnnnnnnnnnnnnnnnnnnnnnnnnnnnnnnnnnnnnnnnnnnnnnnnnnnnnnnnnnnnnnnnnnnnnnnnnnnnnnnnnnnnnnnnnnnnnnnnnnnnnnnnnnnnnnnnnnnnnnnnnnnnnnnnnnnnnnnnnnnnnnnnnnnnnnnnnnnnnnnnnnnnnnnnnnnnnnnnnnnnnnnnnnnnnnnnnnnnnnnnnnnnnnnnnnnnnnnnnnnnnnnnnnnnnnnnnnnnnnnnnnnnnnnnnnnnnnnnnnnnnnnn

SEQ ID NO: 9573 - DNA, 529 bp, Homo sapiens
  misc_feature (319)..(319): "n" may be a, t, c, g, other or unknown
  misc_feature (377)..(377): "n" may be a, t, c, g, other or unknown
  misc_feature (440)..(440): "n" may be a, t, c, g, other or unknown
  misc_feature (451)..(451): "n" may be a, t, c, g, other or unknown
  misc_feature (470)..(470): "n" may be a, t, c, g, other or unknown
  misc_feature (480)..(480): "n" may be a, t, c, g, other or unknown
  misc_feature (498)..(498): "n" may be a, t, c, g, other or unknown
  misc_feature (511)..(511): "n" may be a, t, c, g, other or unknown
  misc_feature (529)..(529): "n" may be a, t, c, g, other or unknown
aggtttaataattattttaattacaaatttccaccaattcttgccagtcatattattgtggatatcacaaatgaattatataatagtatattaccttatattcatctgcatgaaacttaggagaaaggagagcagaaatgtataagtttctgagaatgacaccataaagctcatatttacagtatggtagtctgtaaacatacaggcctgccagttaaagcccactcttctatcatcacccagctgcatgaccctgagcaagtcacttttgtttgctaatttttaatatcatctatcacctgacttctctatctacganagttaactggctgcatgcaaaataccatgaaaaataccatgcacttttaagtgtgaantaccctggtaaagtgacttatatattactggcttcctatttttagagtattaatattcatacntcagttaaaantccacatgtgttggctaantgatcctttngaaaggatcctttaaaanttcctaggctcanctccctgaacaaccggtn

SEQ ID NO: 9574 - DNA, 495 bp, Homo sapiens
  misc_feature (225)..(225): "n" may be a, t, c, g, other or unknown
  misc_feature (370)..(370): "n" may be a, t, c, g, other or unknown
  misc_feature (424)..(424): "n" may be a, t, c, g, other or unknown
  misc_feature (431)..(431): "n" may be a, t, c, g, other or unknown
  misc_feature (436)..(436): "n" may be a, t, c, g, other or unknown
  misc_feature (455)..(455): "n" may be a, t, c, g, other or unknown
  misc_feature (461)..(461): "n" may be a, t, c, g, other or unknown
  misc_feature (472)..(472): "n" may be a, t, c, g, other or unknown
  misc_feature (476)..(476): "n" may be a, t, c, g, other or unknown
acttgcaaatcaataattttaattttctcactctgataaaaatcagaaagcaacatttataaaattgctaccacatcacttttcatagcagggaaccgaaatctgtacatctcatttttgcagaaaagtaggcaggcagaaagaattatacataaaagtttccaaaaggaaaaacaaagaaatatttaatctgatctcttttcttttaaaaaattaattcagtanacttctattttttcctgtgtaacatgggaattcctggctctaaaatggatgaattttcagtgtcagtgtaaaaacatcttgttactttctttaaaataaaaactgcagcgtggaaattaatggtgtattacgcatttaaactccnaataggccgggaactggaaccaagtgttaagcaatttgcttaattattgacttnccgtaanaaaantctaggggaagggggaaanaaattnctttaacctcnctcncaaaatttctccgttcatt

SEQ ID NO: 9575 - DNA, 370 bp, Homo sapiens
  misc_feature (317)..(317): "n" may be a, t, c, g, other or unknown
  misc_feature (355)..(355): "n" may be a, t, c, g, other or unknown
  misc_feature (358)..(359): "n" may be a, t, c, g, other or unknown
  misc_feature (361)..(361): "n" may be a, t, c, g, other or unknown
  misc_feature (367)..(367): "n" may be a, t, c, g, other or unknown
  misc_feature (370)..(370): "n" may be a, t, c, g, other or unknown
gcaggtagcttaccacagtgagctctggagtcaggctctctgggtttaaattccagctccaccatttaactgtgtatccttagatcatcaccccatacctcaatttcctcttttgaaagagcagttcagtaaaagagttgttacgagaataagagtttataaatgtgcttggtatataagaagtattaagcaaatatcaccatcagcagcagaacacagaatctggtagagaacaacagtctataaaatgaatctaggaggatctcagtctcatcctcttggaaactccctcatcttttttattttattttgagacngggtctcgctctgtcaccagctggaatgcaatggcatnatnncnggtcantgn

SEQ ID NO: 9576 - DNA, 604 bp, Homo sapiens
  misc_feature (453)..(453): "n" may be a, t, c, g, other or unknown
  misc_feature (496)..(496): "n" may be a, t, c, g, other or unknown
  misc_feature (500)..(500): "n" may be a, t, c, g, other or unknown
  misc_feature (539)..(539): "n" may be a, t, c, g, other or unknown
  misc_feature (584)..(584): "n" may be a, t, c, g, other or unknown
  misc_feature (593)..(593): "n" may be a, t, c, g, other or unknown
  misc_feature (600)..(600): "n" may be a, t, c, g, other or unknown
aagttaattacagcatttgaggaagaggatctaattccacacaaaatggaagactctaaaatgtacccattaaactgctaaaaaataaattgagtggtgagaataccacataagcccagtttagattctgagtgctgtcaccctgtgattacaattatacagactcttccaagcttatagctagagctcctggaagctattttatacctgatgcaaggacaaaaaaaccacaactcaggaaggaattaagtcctgaattattggcttcatcacatccaccctctccaccccaaaacagcacaaaagaaacagtgaccacaccctgtagatctttttgtgtaaaagaggtaatgaagacctgggatgggaacaagtcatgaagatctgtctttaaaaggtccctttcaggtaaatttgtacacaccatcaagcaacaagcctctcatcagttanggttaggaaaccaaggttcaattctcaggaaatcacaatttcnttcntttactccatataatttacaaggtgcctatatttatccncttccccttgcagccctttcttaataaaaaaaaaccggctccctnccgggggcnccaattnccca

SEQ ID NO: 9577 - DNA, 539 bp, Homo sapiens
  misc_feature (155)..(155): "n" may be a, t, c, g, other or unknown
  misc_feature (157)..(157): "n" may be a, t, c, g, other or unknown
  misc_feature (176)..(176): "n" may be a, t, c, g, other or unknown
  misc_feature (187)..(187): "n" may be a, t, c, g, other or unknown
  misc_feature (366)..(366): "n" may be a, t, c, g, other or unknown
  misc_feature (464)..(464): "n" may be a, t, c, g, other or unknown
  misc_feature (479)..(479): "n" may be a, t, c, g, other or unknown
  misc_feature (483)..(483): "n" may be a, t, c, g, other or unknown
  misc_feature (490)..(490): "n" may be a, t, c, g, other or unknown
  misc_feature (493)..(493): "n" may be a, t, c, g, other or unknown
  misc_feature (525)..(525): "n" may be a, t, c, g, other or unknown
  misc_feature (528)..(528): "n" may be a, t, c, g, other or unknown
ggcatcctcaaccaaatgttttgaatttattataatcgtgcttctctacaactaatgattcttgtggtttgcaaaccatgtctgcctttatttacctacacaaacacggaacagaatttccaataggagaggttcacacagctaacaaagcatanantgtgtgacctcaataaggnattcaacaaanacacacgccgtatttccctctgactgcgttcccttaggatgctctgatgttggcgtcgcattcttctaaaagtagaatcaaatcttcaatcaggctgtgttctctgccatgtgtcactctcataatatcaaaagccagtctcagattcttcattgcttggggaaacatgccttgatgtnctgcagtttgccaactttcatcacttgaaacccctctgacgggatggcttcctgggaaaaaaatcctgtttggctccatggtccgagtaccataaaanaaggctcctccacangccnaaggttnatncaggcatccatggggccattcaaacaccttcnctngtaaattttta

SEQ ID NO: 9578 - DNA, 520 bp, Homo sapiens
  misc_feature (117)..(117): "n" may be a, t, c, g, other or unknown
  misc_feature (231)..(231): "n" may be a, t, c, g, other or unknown
  misc_feature (318)..(318): "n" may be a, t, c, g, other or unknown
  misc_feature (404)..(404): "n" may be a, t, c, g, other or unknown
  misc_feature (424)..(424): "n" may be a, t, c, g, other or unknown
  misc_feature (459)..(459): "n" may be a, t, c, g, other or unknown
  misc_feature (483)..(483): "n" may be a, t, c, g, other or unknown
  misc_feature (494)..(494): "n" may be a, t, c, g, other or unknown
  misc_feature (503)..(503): "n" may be a, t, c, g, other or unknown
  misc_feature (517)..(518): "n" may be a, t, c, g, other or unknown
gaattcaatgtatttacatcaaaaaattaggtagtcattttacatttaaggaataaaaaccttaaaaaaaacaatacaaagagtgaaaggattttaaccaagtttacatttcttttngctataatttttaacaacaattcgtctcatcataacttaatgcaatgtgcaaatgcagcacccattacaatcattaaactaaatttaaggaagtacattgttaatagtgacccncggaggaaatggatttcacttctattaaaaactctatggtatataagcattacataataatgctacttaaccaccttttgtctcaanaattatcaccaaagttttctggaaataagtcccataagaattaaatatttaaaaggtgaaatgttccttattttaactttagcaanatcttttctttttcattaanaaacactttaataattttaaagcaaaagctgttanaatctaaatagctaaaactgttcnccgaattcaancttacaaanaaatcttttgttannta

SEQ ID NO: 9579 - DNA, 437 bp, Homo sapiens
  misc_feature (87)..(87): "n" may be a, t, c, g, other or unknown
  misc_feature (89)..(89): "n" may be a, t, c, g, other or unknown
  misc_feature (92)..(92): "n" may be a, t, c, g, other or unknown
  misc_feature (168)..(168): "n" may be a, t, c, g, other or unknown
  misc_feature (228)..(228): "n" may be a, t, c, g, other or unknown
  misc_feature (237)..(237): "n" may be a, t, c, g, other or unknown
  misc_feature (348)..(348): "n" may be a, t, c, g, other or unknown
  misc_feature (370)..(370): "n" may be a, t, c, g, other or unknown
  misc_feature (375)..(375): "n" may be a, t, c, g, other or unknown
  misc_feature (395)..(395): "n" may be a, t, c, g, other or unknown
  misc_feature (413)..(413): "n" may be a, t, c, g, other or unknown
  misc_feature (416)..(416): "n" may be a, t, c, g, other or unknown
  misc_feature (425)..(425): "n" may be a, t, c, g, other or unknown
gactagcttattttctttttaattgaacccaaaagaagcttctagtatggagcaagtctggtggaaaagcagcatatctcccaggananaanggaaacggagcagggccaatcatcaggtgacagtgcagtgctactcatcaccatcatgaaaaactcatgagcgtcngacgcgccacagggattcctgatcaggtaatatctgctattattatgacaagctccatanaaaaatgtntacagcagggcagaaagacattattctttataaataaaaggttcatctgtgcaatattcacattagaaaaatatacattgcttgccataaaccttctctggataaaatcanacaaatctaggatctgactccncttcnctgtgaaggctctggctccnccgtgacaaacgactccncancttctaaangaactccttcta

SEQ ID NO: 9580 - DNA, 562 bp, Homo sapiens
  misc_feature (83)..(83): "n" may be a, t, c, g, other or unknown
  misc_feature (132)..(132): "n" may be a, t, c, g, other or unknown
  misc_feature (440)..(440): "n" may be a, t, c, g, other or unknown
  misc_feature (464)..(464): "n" may be a, t, c, g, other or unknown
  misc_feature (478)..(478): "n" may be a, t, c, g, other or unknown
  misc_feature (488)..(488): "n" may be a, t, c, g, other or unknown
  misc_feature (531)..(531): "n" may be a, t, c, g, other or unknown
  misc_feature (540)..(540): "n" may be a, t, c, g, other or unknown
  misc_feature (542)..(542): "n" may be a, t, c, g, other or unknown
  misc_feature (549)..(549): "n" may be a, t, c, g, other or unknown
cacacaatatctcatttaatctttaaatcagctttatccaacataaactattaccctgatttccagatgcaggaaactgaggnataaaaacgtaaagtaacttgtatgaagtcaactggctcttgaatgaanaaattggggcttgtaagcagtctgtctaaatccaaagctctatgacctcattatttcatttaatacttaaatagtaaaacaaaataacactaattagcatctgatagcctttaaaaatagaacacggaataattcattttaataactgtacatttttaagaattatatactgaaatagttaacgtactagttgccattctttcatttcattaaaagaaatctcttcctctatttgccatttcattaacctactctagttactctggatagttaaccataaaatttaacttttaataaaaataagtccntaatccgaatatcctctactccancccaatttctgaanggttaatatnttttaataaaaagcaattatcccggttacttgtcgggaatgtntttcccccncncttttcnctcccccctccac

SEQ ID NO: 9581 - DNA, 488 bp, Homo sapiens
  misc_feature (99)..(99): "n" may be a, t, c, g, other or unknown
  misc_feature (114)..(114): "n" may be a, t, c, g, other or unknown
  misc_feature (130)..(130): "n" may be a, t, c, g, other or unknown
  misc_feature (133)..(133): "n" may be a, t, c, g, other or unknown
  misc_feature (136)..(136): "n" may be a, t, c, g, other or unknown
  misc_feature (164)..(164): "n" may be a, t, c, g, other or unknown
  misc_feature (260)..(260): "n" may be a, t, c, g, other or unknown
  misc_feature (347)..(347): "n" may be a, t, c, g, other or unknown
  misc_feature (373)..(373): "n" may be a, t, c, g, other or unknown
  misc_feature (394)..(394): "n" may be a, t, c, g, other or unknown
  misc_feature (407)..(407): "n" may be a, t, c, g, other or unknown
  misc_feature (409)..(409): "n" may be a, t, c, g, other or unknown
  misc_feature (468)..(468): "n" may be a, t, c, g, other or unknown
  misc_feature (472)..(472): "n" may be a, t, c, g, other or unknown
  misc_feature (481)..(481): "n" may be a, t, c, g, other or unknown
  misc_feature (486)..(486): "n" may be a, t, c, g, other or unknown
ctatgaactagttttatttgcatttaacatgattatacacattcatgtgtctaacaagatctgcactgttacattaaaaatacagtacaataacattcnacatgaggtacttcntatttatgtatttttnccntcntaaataatgctgtaagctactaaattcnagcacactgatgcacaagtgactacagtgtcttgaattagctgagcttatttaaacaccttaataaacaaaaaagttcagtgcaataattatgtanaaattagaccatttacttaaatactattttaggatatgcttaaagaatgtcacattagaactgctagcctaattccctttatccccngaagtgaacaacgacaaagactgccngccagatacgttggggaaaancatctacagtgtntnctgcttaataaagttgtgtttataaaataaatttgcctgctttgttaaaacaatggttnctanttttaaaanctacnaa

SEQ ID NO: 9582 - DNA, 577 bp, Homo sapiens
  misc_feature (45)..(45): "n" may be a, t, c, g, other or unknown
  misc_feature (62)..(62): "n" may be a, t, c, g, other or unknown
  misc_feature (70)..(70): "n" may be a, t, c, g, other or unknown
  misc_feature (321)..(321): "n" may be a, t, c, g, other or unknown
  misc_feature (429)..(429): "n" may be a, t, c, g, other or unknown
  misc_feature (444)..(444): "n" may be a, t, c, g, other or unknown
  misc_feature (491)..(491): "n" may be a, t, c, g, other or unknown
  misc_feature (502)..(502): "n" may be a, t, c, g, other or unknown
  misc_feature (505)..(505): "n" may be a, t, c, g, other or unknown
  misc_feature (512)..(512): "n" may be a, t, c, g, other or unknown
  misc_feature (518)..(518): "n" may be a, t, c, g, other or unknown
  misc_feature (562)..(562): "n" may be a, t, c, g, other or unknown
  misc_feature (572)..(572): "n" may be a, t, c, g, other or unknown
attatcttaaaaaatggctttatttacagtcatggaaaatgctcnagaaaatacctaaagtnagaatacnaaaataatctatattaacaagtttgcttcttgtacctgctactaagtcagtcattaaactcactgcaggtgttggaaccaccatatattgttagaacttccataagaatcaaaggagattatggcataatctaagaagaaaatgatctggctaatgtccactgtaaaccttagctacaggcttttatttttacaaagacaaaaggttttcccttaagttgattcaaagccttgaagtaggccacttaatancagactgctgactgtcacagggtgtatatggatgcagaatgttcatcagaaacttgaggtggttaccaccaccttataaacatttaataattaaggtccataaattcngctctcctaagtggncaagaattaggtcttacttgttaaaaaaaaaaaactcttccaacaangtgatgcctangtnctgaacngaatcnccaaaatcccttcctttcctttccttttaaaatctttccgggcncacttttctntttcc

SEQ ID NO: 9583 - DNA, 568 bp, Homo sapiens
  misc_feature (160)..(160): "n" may be a, t, c, g, other or unknown
  misc_feature (175)..(175): "n" may be a, t, c, g, other or unknown
  misc_feature (204)..(204): "n" may be a, t, c, g, other or unknown
  misc_feature (218)..(218): "n" may be a, t, c, g, other or unknown
  misc_feature (271)..(271): "n" may be a, t, c, g, other or unknown
  misc_feature (274)..(274): "n" may be a, t, c, g, other or unknown
  misc_feature (301)..(301): "n" may be a, t, c, g, other or unknown
  misc_feature (349)..(349): "n" may be a, t, c, g, other or unknown
  misc_feature (390)..(391): "n" may be a, t, c, g, other or unknown
  misc_feature (399)..(399): "n" may be a, t, c, g, other or unknown
  misc_feature (462)..(462): "n" may be a, t, c, g, other or unknown
  misc_feature (470)..(470): "n" may be a, t, c, g, other or unknown
  misc_feature (498)..(498): "n" may be a, t, c, g, other or unknown
  misc_feature (513)..(513): "n" may be a, t, c, g, other or unknown
  misc_feature (518)..(518): "n" may be a, t, c, g, other or unknown
  misc_feature (530)..(530): "n" may be a, t, c, g, other or unknown
  misc_feature (545)..(545): "n" may be a, t, c, g, other or unknown
  misc_feature (568)..(568): "n" may be a, t, c, g, other or unknown
aaagcacggtgcttgacaatactatattgaatgcaataaaagttggatttcattcatatgtacaacaaactactttcttcttcacttcaagattcggtacaactgttcctgaattccaactctccatacatcccaatgtcagggtccctgtagctcggancccttatccaggtanatgaactgctgcccagtgaacactatgtncaaagcaatttgancaccattctcttttctggcagtgaggtaaaatcaggtctttttggaagggganaanccacattgcatctctgctacacacaanattactctgtcattgcctttgaatctttcacgctcccttcttctgaancatcagtttttatggaaacttatcacacctgtcttgtgggnncatcttgntccatccctcctctcttcctattgtccgttttccggtattgaattagggaaaattttcaggtntcccgttnttcccgaaagaagggtgtttttctttcnaaaaaaagaaaagtnggggnctctgaaaaatnatcctcctggcttgngggaacaaaacccaaaggaattn

SEQ ID NO: 9584 - DNA, 530 bp, Homo sapiens
  misc_feature (145)..(145): "n" may be a, t, c, g, other or unknown
  misc_feature (197)..(197): "n" may be a, t, c, g, other or unknown
  misc_feature (217)..(217): "n" may be a, t, c, g, other or unknown
  misc_feature (226)..(226): "n" may be a, t, c, g, other or unknown
  misc_feature (248)..(248): "n" may be a, t, c, g, other or unknown
  misc_feature (299)..(299): "n" may be a, t, c, g, other or unknown
  misc_feature (318)..(318): "n" may be a, t, c, g, other or unknown
  misc_feature (325)..(325): "n" may be a, t, c, g, other or unknown
  misc_feature (327)..(327): "n" may be a, t, c, g, other or unknown
  misc_feature (380)..(380): "n" may be a, t, c, g, other or unknown
  misc_feature (401)..(401): "n" may be a, t, c, g, other or unknown
  misc_feature (462)..(462): "n" may be a, t, c, g, other or unknown
  misc_feature (484)..(484): "n" may be a, t, c, g, other or unknown
  misc_feature (487)..(487): "n" may be a, t, c, g, other or unknown
  misc_feature (489)..(489): "n" may be a, t, c, g, other or unknown
  misc_feature (495)..(495): "n" may be a, t, c, g, other or unknown
  misc_feature (522)..(522): "n" may be a, t, c, g, other or unknown
  misc_feature (526)..(526): "n" may be a, t, c, g, other or unknown
gacattttaaacactttaattacttaaacaacaagaaaagaaacatttataaagcatataccaaggctgtctcaggttttaggatgtggagaagccaatggtaggctggatactctctggctacttaaagccttacccatttaanaacatttgtgggatcccactgactatggtcatggtactcctttgcttaagangagtgcaagatcattcaganaacacaganaagcatgctccacttactccancgtggacactggttttgaaccctggttttgaaaaacacatctctttgctcngcataactccctgcagtcnaaacatnanccccctgcctcaaaagcttttaatgccccaatctattatccactgcttctgangtccgcagcctcacctgaaantctgtgtccctaattctctgggaccaggtccatggggaagaaaaattccccttctctcccncctggcatgaaaggtgctacanccncngcatcntgaaggttcccccccggttagaaccanccanaatt

SEQ ID NO: 9585 - DNA, 591 bp, Homo sapiens
  misc_feature (360)..(360): "n" may be a, t, c, g, other or unknown
  misc_feature (382)..(382): "n" may be a, t, c, g, other or unknown
  misc_feature (457)..(457): "n" may be a, t, c, g, other or unknown
  misc_feature (461)..(461): "n" may be a, t, c, g, other or unknown
  misc_feature (464)..(464): "n" may be a, t, c, g, other or unknown
  misc_feature (483)..(483): "n" may be a, t, c, g, other or unknown
  misc_feature (525)..(525): "n" may be a, t, c, g, other or unknown
  misc_feature (541)..(541): "n" may be a, t, c, g, other or unknown
  misc_feature (553)..(553): "n" may be a, t, c, g, other or unknown
  misc_feature (560)..(560): "n" may be a, t, c, g, other or unknown
  misc_feature (562)..(562): "n" may be a, t, c, g, other or unknown
  misc_feature (591)..(591): "n" may be a, t, c, g, other or unknown
gttgctgttgttttttttttaaataaacatcatcatctatgtgtaatcaaattcccatattttcttcctataaagaatttgctttagtttttcaataaggcatttttttgtcatccaaacatctcttccttttaaaattttcttagagttaaaaccataaataagaggatttaaaccactaaaatgacacgtgccaacatcttcattcagccagacctggtaaattctatcaaaactagacagttaaataagaaccacgttataaaaatattagccaaaaaaagactattagataattctgcaaactcaaatatgaaactgtactaaacaaaatatgtgcaaaggtacacaagcataaanccacgttgggggttatgctcanattaattttaaagctcgctctagtggatttaattcaagaattgtccacggtggtggtgtttactttgaactcccnccantcnaagaaaaataaaatatgcncaaccacttcccccaaaagttcttatggaaccgggcctcacntgttcacacccagaangcctggggtttnccaaggncngggggtgggaaagaaaaaaaaaggccctn

SEQ ID NO: 9586 - DNA, 588 bp, Homo sapiens
  misc_feature (108)..(108): "n" may be a, t, c, g, other or unknown
  misc_feature (170)..(170): "n" may be a, t, c, g, other or unknown
  misc_feature (479)..(479): "n" may be a, t, c, g, other or unknown
  misc_feature (518)..(518): "n" may be a, t, c, g, other or unknown
  misc_feature (549)..(549): "n" may be a, t, c, g, other or unknown
  misc_feature (562)..(562): "n" may be a, t, c, g, other or unknown
  misc_feature (585)..(585): "n" may be a, t, c, g, other or unknown
gagacagagtcttgctctgtcgcccaggctggagtgcagtggcgcaatcttggctcactgcaacctccgcctccagggttcatgccattctcctgcctcagcctccanagtagctgggactacaagcgcccgccaccatgcctacctaattttttgtatttttagtaaangtggggtttaactgtgttggccaggatggtcttgctctcctgacctgtgatctgcccgcctcagcctcctgaagtgctgggattataggcgtgagccaccgcacccagccttacgagttctttgtatattttggataacaacagtttatcaactatgtcttttgcagatattttcttgcatccttggcttgtcttctcattctgttaacagggtctttcacagaacagaacttttaaaattttaatgaaatcccagcttatcaattatttatttcatgggttgtgcctttggtgtttcatgtaaaaaantctccaccataactaatacccaatacccaatgtccacanatttccccttgttgtctcccaggattctatnatttgcctttacnttgggccataaccctttgaattnatt

SEQ ID NO: 9587 - DNA, 588 bp, Homo sapiens
  misc_feature (34)..(34): "n" may be a, t, c, g, other or unknown
  misc_feature (169)..(169): "n" may be a, t, c, g, other or unknown
  misc_feature (382)..(382): "n" may be a, t, c, g, other or unknown
  misc_feature (405)..(405): "n" may be a, t, c, g, other or unknown
  misc_feature (410)..(410): "n" may be a, t, c, g, other or unknown
  misc_feature (413)..(413): "n" may be a, t, c, g, other or unknown
  misc_feature (465)..(465): "n" may be a, t, c, g, other or unknown
  misc_feature (470)..(470): "n" may be a, t, c, g, other or unknown
  misc_feature (527)..(527): "n" may be a, t, c, g, other or unknown
  misc_feature (542)..(542): "n" may be a, t, c, g, other or unknown
  misc_feature (548)..(548): "n" may be a, t, c, g, other or unknown
  misc_feature (573)..(573): "n" may be a, t, c, g, other or unknown
  misc_feature (587)..(587): "n" may be a, t, c, g, other or unknown
gagacggagtctcactttgcttcccaaggtggantgcggtggtgtgatctcggctcactgcaacctctgccccccgagttcaagtgattctcctgcctcagcctcccaagtagttgagattacaggcaactgctactgcgcccagctaatttttgtatttttagtaaanatggggtttcaccatcttggccaagctggtcttgaactcctgacctcaggtgatccactggcctcggcctcccaaagtgctgggattacaggcgtgagccacagcgcctgtccaatcacaggattttaaattgtataatcagagtccaagtctctggttggttgtttttatgcagattgtttgaactgagtctcagtttacatctaagtgaanccagtacttgcctgattgtatanggtancantatgcaaactaaattttggaattgtcagtaatgaacattatttaacacacanggcantgatattgggtatattttttatgtctccccttgttccctaacttattccccatgccnaacttaagtttacantaggtnccaataatatatgttgaatattccncccggaatttagang

SEQ ID NO: 9588 - DNA, 430 bp, Homo sapiens
  misc_feature (133)..(133): "n" may be a, t, c, g, other or unknown
  misc_feature (163)..(163): "n" may be a, t, c, g, other or unknown
  misc_feature (208)..(208): "n" may be a, t, c, g, other or unknown
  misc_feature (211)..(211): "n" may be a, t, c, g, other or unknown
  misc_feature (227)..(227): "n" may be a, t, c, g, other or unknown
  misc_feature (233)..(233): "n" may be a, t, c, g, other or unknown
  misc_feature (339)..(339): "n" may be a, t, c, g, other or unknown
  misc_feature (370)..(370): "n" may be a, t, c, g, other or unknown
  misc_feature (392)..(392): "n" may be a, t, c, g, other or unknown
  misc_feature (417)..(417): "n" may be a, t, c, g, other or unknown
  misc_feature (424)..(426): "n" may be a, t, c, g, other or unknown
gtccgggtctacacacagtgactttattactctatggatgctggtgaactgccctccccaaccagcttcacgggggcaggcatctctgtccatcccatgcctttgggtcacagggggcagcaagaccaagaanaccacagccaggccctgggttcagcttcanaaccatcacccgctgcctcccccaacccccaatctcctgaggganganaattcctagggacaanacccanacccctttccttcagcctctgcttcaccaagggggcctggcctgcgcccaaactcctcctggcctgcccctcaagggtccaagttctcactctgctcttcaggcangaaaaaggcagggaaaaaagaattgaagaangaaaaaggaagcttggccccangaaaaaaaaaaagggggaaaagaanaaatttnnnaaaa

SEQ ID NO: 9589 - DNA, 561 bp, Homo sapiens
  misc_feature (139)..(139): "n" may be a, t, c, g, other or unknown
  misc_feature (203)..(203): "n" may be a, t, c, g, other or unknown
  misc_feature (466)..(466): "n" may be a, t, c, g, other or unknown
  misc_feature (484)..(484): "n" may be a, t, c, g, other or unknown
  misc_feature (487)..(487): "n" may be a, t, c, g, other or unknown
  misc_feature (496)..(496): "n" may be a, t, c, g, other or unknown
  misc_feature (511)..(511): "n" may be a, t, c, g, other or unknown
  misc_feature (551)..(551): "n" may be a, t, c, g, other or unknown
  misc_feature (556)..(556): "n" may be a, t, c, g, other or unknown
ccattcctcacagcacatttatttcagtaattctgttatgtcggttcttagcatgagcatagtgttacacgattttcgtacatataatcacatccaaaacaagttctaaaatttaaattgtaaacattctcatatgtanaaatattttaattggtgtattaagttttgctaactgatcaaatttggaagataatataaatganaacgtctattctaaactgtgtagtgagcattgtttattaattacatttctacaatgttaaataaagtaagaggcaaacctgtcctgtaagcatgtcaaattttaggtaaaacattaaaaagaaacaaacctgttaacaaaagaatgtcttgcaataaagaacattagatttttaaaatctattatgatacaaaaatgtaaagggtaaatagcatctttgttgacaaagtaggaagtacatggatgcccactttattgtctganaaatgcactggaattaanaanattccctancccaaataattcccnaactatgttcatatttcctttaaaaaaacctgttttaacnaatcnccccc

SEQ ID NO: 9590 - DNA, 489 bp, Homo sapiens
  misc_feature (466)..(466): "n" may be a, t, c, g, other or unknown
  misc_feature (468)..(468): "n" may be a, t, c, g, other or unknown
  misc_feature (481)..(481): "n" may be a, t, c, g, other or unknown
  misc_feature (483)..(483): "n" may be a, t, c, g, other or unknown
  misc_feature (485)..(486): "n" may be a, t, c, g, other or unknown
  misc_feature (489)..(489): "n" may be a, t, c, g, other or unknown
gaacaaaataaagctttatttgaactccctcccctacagatcattcaagatgcccgggaccatgtccaggttcctctcagcaacatggaaagctaagccatttcacaaacgcacaactgtagctacactacagccccccatgcccagggcacagctttgttgctaagcctgtaacaaaagaccaccactcagtatttgtgtaccctgcagccaacaccacctcctgggcttcacaggttcactcacccaagaggccagcacaaccacgaccgagtgggtactcagtggcccagacaccccccgaacactggcactgccacaaggccctgaagggtagactgtggggcaaagaggacaaactctccctcccctaagggacccggctcactgggcctccttcccctgccaaccgccagcccctgcatgcctagcagggaggtaagcacccactggcgtcgtgatttcnantatcttgctaatntnannacn

SEQ ID NO: 9591 - DNA, 431 bp, Homo sapiens
  misc_feature (5)..(5): "n" may be a, t, c, g, other or unknown
  misc_feature (82)..(82): "n" may be a, t, c, g, other or unknown
  misc_feature (100)..(100): "n" may be a, t, c, g, other or unknown
  misc_feature (143)..(143): "n" may be a, t, c, g, other or unknown
  misc_feature (275)..(275): "n" may be a, t, c, g, other or unknown
  misc_feature (281)..(281): "n" may be a, t, c, g, other or unknown
  misc_feature (288)..(288): "n" may be a, t, c, g, other or unknown
  misc_feature (315)..(315): "n" may be a, t, c, g, other or unknown
  misc_feature (320)..(320): "n" may be a, t, c, g, other or unknown
  misc_feature (333)..(333): "n" may be a, t, c, g, other or unknown
  misc_feature (336)..(336): "n" may be a, t, c, g, other or unknown
  misc_feature (391)..(391): "n" may be a, t, c, g, other or unknown
  misc_feature (412)..(412): "n" may be a, t, c, g, other or unknown
  misc_feature (420)..(420): "n" may be a, t, c, g, other or unknown
  misc_feature (422)..(422): "n" may be a, t, c, g, other or unknown
  misc_feature (429)..(429): "n" may be a, t, c, g, other or unknown
gaaantatgggggtgggtggcttttgggaaggaaaaacggggggaattgaaaaacttctcaagtgtccactctgtttttganacagtaattaagattcanaaagctccttattaatagctcataatttgggggggcacttcanggactccaattacaaagttcaaaataaatcactgcacgtcccctcccccctcccccaaaaaaagaaaaaaggactaattttagataacagaaatcattctacaaagaactggattatgagggggcaagggantaatanccaccangttataaggaaccctaaaacatcacanaaaanttcactgacttangangcccaaaatgcaagctccagtaacaacataaagctgctcaaatgccttctgaaancataaacactgttgtcttcantgggggtntnggggggntg

SEQ ID NO: 9592 - DNA, 534 bp, Homo sapiens
  misc_feature (11)..(11): "n" may be a, t, c, g, other or unknown
  misc_feature (238)..(238): "n" may be a, t, c, g, other or unknown
  misc_feature (246)..(246): "n" may be a, t, c, g, other or unknown
  misc_feature (279)..(279): "n" may be a, t, c, g, other or unknown
  misc_feature (341)..(341): "n" may be a, t, c, g, other or unknown
  misc_feature (383)..(383): "n" may be a, t, c, g, other or unknown
  misc_feature (436)..(436): "n" may be a, t, c, g, other or unknown
  misc_feature (448)..(448): "n" may be a, t, c, g, other or unknown
  misc_feature (455)..(455): "n" may be a, t, c, g, other or unknown
  misc_feature (458)..(458): "n" may be a, t, c, g, other or unknown
  misc_feature (519)..(519): "n" may be a, t, c, g, other or unknown
  misc_feature (521)..(521): "n" may be a, t, c, g, other or unknown
  misc_feature (528)..(528): "n" may be a, t, c, g, other or unknown
cttttttgtanagacggggtttcaccatgttgtccaagctggtctcaaactcctggactcaagcgatccccctccttggactcccaaagtgctgggattacagatgtgagccaccgcgcccggcttaaacattttttgttgttgctctccggctttccctaaatataagataaaatgtaatttatttgcagatataaaatataaagcccagctcagggccatacgccacttttcccangggagcangagctcgggctctggctggggagaataacttanatccgtgcaataaataaacagtggggaggggcagtgtggacagtgttgggggagggactganactgggcttcccacgagaatgacaatcaaaggcaggggtcancccccaccccacagtggacactgacaggggttgaggtgggaccttcttcttangacccactccanactgtantangactgcaggtctgtctccttgtctccctatttgccacacaatccatgggcccccttctctnantgggcancccccg

SEQ ID NO: 9593 - DNA, 493 bp, Homo sapiens
  misc_feature (29)..(29): "n" may be a, t, c, g, other or unknown
  misc_feature (31)..(31): "n" may be a, t, c, g, other or unknown
  misc_feature (144)..(144): "n" may be a, t, c, g, other or unknown
  misc_feature (305)..(305): "n" may be a, t, c, g, other or unknown
  misc_feature (417)..(417): "n" may be a, t, c, g, other or unknown
  misc_feature (455)..(455): "n" may be a, t, c, g, other or unknown
  misc_feature (458)..(458): "n" may be a, t, c, g, other or unknown
  misc_feature (471)..(471): "n" may be a, t, c, g, other or unknown
  misc_feature (477)..(477): "n" may be a, t, c, g, other or unknown
  misc_feature (480)..(480): "n" may be a, t, c, g, other or unknown
  misc_feature (483)..(483): "n" may be a, t, c, g, other or unknown
acatgcacacatatttttatttaacttangncctgattattagtatataaaacagaaaaaccaagtgccttggtaatttacatatcttctccaaatctttaaagaaccaagctctaaaaaacacacgtaaagatatttaagtcntaaaacacacacacacacacacacacacacacacacacactcaaactttaatgaccttcaggaaccataatccaataatatatttaataggtaagatctcattcatcaatatacaaaaaaaaaaaaacaaaccagaaaacaaaaaactaactttgattaanacatgtgcccttagtaagggcacttacaattagaaaggtttatcggtagcactttgaggtagcatattttgtaaagtccagggctgctctgcagtttctcctggatacaaangtagaaggcatcacccttgccccggaaaaagaaaattnaantttctgttctccntggccnttnttncctgaaaacc

SEQ ID NO: 9594 - DNA, 518 bp, Homo sapiens
  misc_feature (267)..(267): "n" may be a, t, c, g, other or unknown
  misc_feature (275)..(275): "n" may be a, t, c, g, other or unknown
  misc_feature (313)..(313): "n" may be a, t, c, g, other or unknown
  misc_feature (323)..(323): "n" may be a, t, c, g, other or unknown
  misc_feature (330)..(330): "n" may be a, t, c, g, other or unknown
  misc_feature (339)..(339): "n" may be a, t, c, g, other or unknown
  misc_feature (345)..(345): "n" may be a, t, c, g, other or unknown
  misc_feature (395)..(395): "n" may be a, t, c, g, other or unknown
  misc_feature (451)..(452): "n" may be a, t, c, g, other or unknown
  misc_feature (466)..(466): "n" may be a, t, c, g, other or unknown
  misc_feature (473)..(473): "n" may be a, t, c, g, other or unknown
  misc_feature (477)..(477): "n" may be a, t, c, g, other or unknown
  misc_feature (484)..(484): "n" may be a, t, c, g, other or unknown
  misc_feature (515)..(515): "n" may be a, t, c, g, other or unknown
aaaatttactgtttatttctttgttacacaaaggtggtccaagacatcttagtccatctcctatgtccttttggccataattacacacacaataatggcaagctagattaggagtctagctcagggtcaagtttttccactttaatgactatctctggagctaaagcggcagcaccagcttgttggttctctgcctctgactccgacaacacttcttcctttatttttacaggcttattactggcctcctcctcttcatctgaaaantcatcganctcccattcatcatctatgtccatttcaaatactctcncatgaaaaanaattganctttacacncagganacttttcgaaaaccattcccagcaacatactgtgctttcatactttccantaatctccattgcttctccaaatgcatggtacgggtgggaatacactaccttttcnnctacccttttaaanaattccngtgnaatgaantcccccaaatctccctgttttttctaaaaanaaa

SEQ ID NO: 9595 - DNA, 496 bp, Homo sapiens
  misc_feature (68)..(68): "n" may be a, t, c, g, other or unknown
  misc_feature (119)..(119): "n" may be a, t, c, g, other or unknown
  misc_feature (195)..(195): "n" may be a, t, c, g, other or unknown
  misc_feature (268)..(268): "n" may be a, t, c, g, other or unknown
  misc_feature (274)..(274): "n" may be a, t, c, g, other or unknown
  misc_feature (276)..(276): "n" may be a, t, c, g, other or unknown
  misc_feature (316)..(316): "n" may be a, t, c, g, other or unknown
  misc_feature (318)..(318): "n" may be a, t, c, g, other or unknown
  misc_feature (366)..(366): "n" may be a, t, c, g, other or unknown
  misc_feature (404)..(404): "n" may be a, t, c, g, other or unknown
  misc_feature (425)..(425): "n" may be a, t, c, g, other or unknown
  misc_feature (438)..(438): "n" may be a, t, c, g, other or unknown
  misc_feature (444)..(444): "n" may be a, t, c, g, other or unknown
  misc_feature (447)..(447): "n" may be a, t, c, g, other or unknown
  misc_feature (487)..(487): "n" may be a, t, c, g, other or unknown
  misc_feature (495)..(495): "n" may be a, t, c, g, other or unknown
aaaatgtcaataacaagttttatttacaaagtaatcgtcctctcacatcacatttggggttacatgtntcactgttgtacgctggtagcatggctatttgaaaaattataatttatganctattactcagtgggatttttgcaataaggtacttcatgaaacaaaatggaaaaaggaaaattaaattaaaatgcncaactaatatttatctactacagacataatatttctcagttgtgaactaattactatgcttggaaaatgctancatccncntaaatattttggttctattgggatacaaaatctgatttcncnaactttgcaaaggcacattttggctgggcacaatggctcaaggctgtnttcccaacactttgggaagcaaaagcgggcggatcatnaaggtccggaaatcaaaaacntcccggctacacnataaanccntctttctaaaaataccaaaaaattaccccgccttgttgcnggaacctnt

SEQ ID NO: 9596 - DNA, 547 bp, Homo sapiens
  misc_feature (123)..(123): "n" may be a, t, c, g, other or unknown
  misc_feature (130)..(130): "n" may be a, t, c, g, other or unknown
  misc_feature (132)..(132): "n" may be a, t, c, g, other or unknown
  misc_feature (179)..(179): "n" may be a, t, c, g, other or unknown
  misc_feature (205)..(205): "n" may be a, t, c, g, other or unknown
  misc_feature (264)..(264): "n" may be a, t, c, g, other or unknown
  misc_feature (287)..(288): "n" may be a, t, c, g, other or unknown
  misc_feature (292)..(292): "n" may be a, t, c, g, other or unknown
  misc_feature (311)..(311): "n" may be a, t, c, g, other or unknown
  misc_feature (317)..(317): "n" may be a, t, c, g, other or unknown
  misc_feature (335)..(335): "n" may be a, t, c, g, other or unknown
  misc_feature (408)..(408): "n" may be a, t, c, g, other or unknown
  misc_feature (424)..(425): "n" may be a, t, c, g, other or unknown
  misc_feature (473)..(473): "n" may be a, t, c, g, other or unknown
  misc_feature (486)..(486): "n" may be a, t, c, g, other or unknown
  misc_feature (506)..(506): "n" may be a, t, c, g, other or unknown
  misc_feature (521)..(521): "n" may be a, t, c, g, other or unknown
  misc_feature (526)..(526): "n" may be a, t, c, g, other or unknown
  misc_feature (532)..(532): "n" may be a, t, c, g, other or unknown
  misc_feature (539)..(539): "n" may be a, t, c, g, other or unknown
gatggctcaatgtttctgggatataaactcatcaggcatgggaaggatttccaaattttggcaatacactcaagttatggtataaaaataacattttgttttctctcttttttctcattttanacctaananttttttgttataaaacaccccagttaagaaatattgaaacataaganacttgaccatcaagggagaaaagaanccaagagtgaaaaatgctatgaaagtaactccaaacctgggcggggcgggaggtatgangaataaggagaaaaggaggcatnnttgnaaaggccaggggcctgtcntctcancagctccgaaacttgtcntgtttgaaagtgcaaatgtctatggattttgaccatcttgaggttgtgatcttttaaaaagctcctgaatgangaaatccattccttcnnatgcaaaataactggctttctggctggaagtttgtttggtctggggtnttctccccatctnctcctctcccaccccacccnttcccaaaaaaagtncaaanggttcnttccccnctttccct

SEQ ID NO: 9597 - DNA, 571 bp, Homo sapiens
  misc_feature (226)..(226): "n" may be a, t, c, g, other or unknown
  misc_feature (268)..(268): "n" may be a, t, c, g, other or unknown
  misc_feature (378)..(378): "n" may be a, t, c, g, other or unknown
  misc_feature (434)..(434): "n" may be a, t, c, g, other or unknown
  misc_feature (437)..(437): "n" may be a, t, c, g, other or unknown
  misc_feature (468)..(468): "n" may be a, t, c, g, other or unknown
  misc_feature (474)..(474): "n" may be a, t, c, g, other or unknown
  misc_feature (493)..(493): "n" may be a, t, c, g, other or unknown
  misc_feature (542)..(542): "n" may be a, t, c, g, other or unknown
  misc_feature (544)..(544): "n" may be a, t, c, g, other or unknown
  misc_feature (553)..(553): "n" may be a, t, c, g, other or unknown
  misc_feature (561)..(561): "n" may be a, t, c, g, other or unknown
aaaacatactagtttttattgcattttagggattatagattattgaaaattatttaggacacggaaaatatctaaaacatgaaacctttcttaacaaaagcatcatagtctattttggtgtgactgttcattacctacagaccccaaatagttcttcctcttttgaaggttacacttgtaaatctacactcttggttcaatttatcactgtccaaataaggtgganaagctgttcaaactgatccacagaatgcagtatgcctggaanaggcaaaacaagtattttcaagacataacaggccattacatcttaatatgctgccccaaattcaaatatattgttgacaataacaaatacagatgaagacattttgtgtnaagctcaaacctttagcatctaacaagtgcactctagttccagcatctatgaaaanatnactcctccattaacaaatacacatgagttantgcccncccccccgcttccataaanctctctggaactgttattaccttatgccaatcttggaaaaactgctccncntctcattantccaccanctccagctcc

SEQ ID NO: 9598 - DNA, 518 bp, Homo sapiens
  misc_feature (21)..(21): "n" may be a, t, c, g, other or unknown
  misc_feature (82)..(82): "n" may be a, t, c, g, other or unknown
  misc_feature (140)..(140): "n" may be a, t, c, g, other or unknown
  misc_feature (165)..(165): "n" may be a, t, c, g, other or unknown
  misc_feature (240)..(240): "n" may be a, t, c, g, other or unknown
  misc_feature (254)..(254): "n" may be a, t, c, g, other or unknown
  misc_feature (259)..(259): "n" may be a, t, c, g, other or unknown
  misc_feature (261)..(261): "n" may be a, t, c, g, other or unknown
  misc_feature (267)..(267): "n" may be a, t, c, g, other or unknown
  misc_feature (318)..(318): "n" may be a, t, c, g, other or unknown
  misc_feature (326)..(326): "n" may be a, t, c, g, other or unknown
  misc_feature (381)..(381): "n" may be a, t, c, g, other or unknown
  misc_feature (416)..(416): "n" may be a, t, c, g, other or unknown
  misc_feature (427)..(427): "n" may be a, t, c, g, other or unknown
  misc_feature (455)..(455): "n" may be a, t, c, g, other or unknown
  misc_feature (475)..(475): "n" may be a, t, c, g, other or unknown
  misc_feature (481)..(481): "n" may be a, t, c, g, other or unknown
  misc_feature (494)..(494): "n" may be a, t, c, g, other or unknown
  misc_feature (496)..(496): "n" may be a, t, c, g, other or unknown
  misc_feature (517)..(517): "n" may be a, t, c, g, other or unknown
gaaatggggtctgttgcccangctggaatgcaatggtgcaatctcagctcactgcaacctccgcctcctgggttcaagtgantatcctgcctcagcctcccgaatagctgggattacaggcgccagccaccatgcccggntaattttcatgttttcagtggaaanagggtttcaccatgttggtcaggatggtccccaactcctgacctcaggtgatccacccgcctcggcctcccaaantgctgggattatangtgtnanccaccntgtctggcctattgataatttttaataaggtttcacccaaagggtggtcanaaaattanaaaccccctttctctgggctgaacctggaaaatgggccataactgccaccatgtnatatcctagcaaccctgaatcccttcctaatttancaacacttcanctcctaactgcataactcttaataattnaaacagttgggttgtgccanctcccnctctggtggtgananggctgaaatctaatgaactgna

SEQ ID NO: 9599 - DNA, 567 bp, Homo sapiens
  misc_feature (46)..(46): "n" may be a, t, c, g, other or unknown
  misc_feature (82)..(82): "n" may be a, t, c, g, other or unknown
  misc_feature (87)..(87): "n" may be a, t, c, g, other or unknown
  misc_feature (226)..(226): "n" may be a, t, c, g, other or unknown
  misc_feature (267)..(267): "n" may be a, t, c, g, other or unknown
  misc_feature (309)..(309): "n" may be a, t, c, g, other or unknown
  misc_feature (344)..(344): "n" may be a, t, c, g, other or unknown
  misc_feature (382)..(382): "n" may be a, t, c, g, other or unknown
  misc_feature (442)..(442): "n" may be a, t, c, g, other or unknown
  misc_feature (453)..(453): "n" may be a, t, c, g, other or unknown
  misc_feature (472)..(472): "n" may be a, t, c, g, other or unknown
  misc_feature (502)..(502): "n" may be a, t, c, g, other or unknown
  misc_feature (546)..(546): "n" may be a, t, c, g, other or unknown
  misc_feature (562)..(562): "n" may be a, t, c, g, other or unknown
ctctttattgactgttttattaagcatgcccctctgctccactcanaactgaggagtctacaaaaactgtgggcaatccaanaaggntggttattttcctgctttctgccaacccaaagcaaactgctctgccatgtctgtttgtatttcctgaatcctgagccctcaaaacactgctttatgaagtcaacaatgccaaaactgaaatttgcatttctattctaanatatagctgacaaaatgtccttttctcctgcatcctctcanaaaacacttaataacatctaagtttattttctaaggatcaanaaaacaaagttttctcatgaattgctgaatgatantttttcttgccaagggctaaaaattcaggatacccccnaatcaaattttcctaaaacaaaatatattacaggtgatttgctgcaatcatgaaacacanccttccgaaanttcatattccatctaattngttcgaaacatctaaaatgaatccatttcnttacaaaaagttggttgtgcaatcccttccaaaaaaaccaattnttaaaaaatccttaantttat

SEQ ID NO: 9600 - DNA, 476 bp, Homo sapiens
  misc_feature (183)..(183): "n" may be a, t, c, g, other or unknown
  misc_feature (296)..(296): "n" may be a, t, c, g, other or unknown
  misc_feature (348)..(348): "n" may be a, t, c, g, other or unknown
  misc_feature (401)..(401): "n" may be a, t, c, g, other or unknown
  misc_feature (415)..(415): "n" may be a, t, c, g, other or unknown
  misc_feature (417)..(417): "n" may be a, t, c, g, other or unknown
  misc_feature (454)..(454): "n" may be a, t, c, g, other or unknown
  misc_feature (461)..(461): "n" may be a, t, c, g, other or unknown
  misc_feature (474)..(475): "n" may be a, t, c, g, other or unknown
ggagcttggaagtcatttaatctggaaacattattcaatatatatgcttaaatcacaaacaacagttcacaagtgtatatatattgtttcctggataacacaccgaagagtcaaaagtgataagaagcacatttagagcaatatccctagaattaaaattaattctagaacaatgccaaaganccaaaattatattactgtgcttaacaatgcaaaaagtgtaggttttctccattcagttgggcattgattatatattacccatatagtatttcaatcagaatcaaaattttcanatgcattaccactaataacgggaaaagttcttaaaccttgttcccctccggntctaagttggtacaaatgttctttcatgttgctgaaaaaatatgggaaattcncccttctatgccangntactgcaattactgctgatggcttatctgatcctccnccaaggntgttaataatganna

SEQ ID NO: 9601 - DNA, 584 bp, Homo sapiens
  misc_feature (94)..(94): "n" may be a, t, c, g, other or unknown
  misc_feature (264)..(264): "n" may be a, t, c, g, other or unknown
  misc_feature (266)..(266): "n" may be a, t, c, g, other or unknown
  misc_feature (298)..(298): "n" may be a, t, c, g, other or unknown
  misc_feature (510)..(510): "n" may be a, t, c, g, other or unknown
ccagtttcaaagaaatttaattattatttacacagttaaggaacaggtgatacattttcatttgttagaaactgatctttctgtaataaaatanattttcaattcagtgtatgtcattattactgctaaggaaatcttagcccttgtctgccttaaaggaatctttatttaatttactgtaattattgctgtgtagtcactacttttgttaatttctcaaatcacttaaatgatggtcttgttttccacttagtaggtatacananctttgacgttcctattatttcctatataaganaaatttaaaacattttttgttctttctgtcttaggggaataaaaaaacactaaccacacatttggttaaactgcttaggagaagacataataaagatccccaatctatacttaacagccataaacctgagttacaggctcagttactccaaataaataattcttataggtacttaattaattaggcctgggtatctaaataacaaaataatntccccaataaataaaaagaaggggccccataccttgtttgccctttggtgacacctaaggacctgccattcctc

SEQ ID NO: 9602 - DNA, 482 bp, Homo sapiens
  misc_feature (58)..(58): "n" may be a, t, c, g, other or unknown
  misc_feature (62)..(62): "n" may be a, t, c, g, other or unknown
  misc_feature (91)..(91): "n" may be a, t, c, g, other or unknown
  misc_feature (100)..(100): "n" may be a, t, c, g, other or unknown
  misc_feature (134)..(134): "n" may be a, t, c, g, other or unknown
  misc_feature (387)..(387): "n" may be a, t, c, g, other or unknown
  misc_feature (402)..(403): "n" may be a, t, c, g, other or unknown
  misc_feature (408)..(408): "n" may be a, t, c, g, other or unknown
  misc_feature (413)..(413): "n" may be a, t, c, g, other or unknown
  misc_feature (426)..(426): "n" may be a, t, c, g, other or unknown
  misc_feature (481)..(481): "n" may be a, t, c, g, other or unknown
gtggtgtctctgccaggttttggtatcaggatgatgctggcctcataaagtgagttanaaangacccctctttttctattgtttggaatantttcagaangaatggtaccagctcctctttgtacctgtggcanaatttggctgtgaatccatctggtcctgggctttttttggttggtaggctattaattactgcctcaatttcagaaaaatatggaatgcttcacgaatttgtgtgtcatcctcgcacaggggtcatgctaatcttctctataaggttccaattttagtgtatgtgctgctgaagtgagcacgggtctataatttttaaacgcggggcttgtgctgcaagggtggtggtcagggtccaccaagcagtttcatcanggcttaaacttcccnnccccnaaatnaaaaaccaaaatnaaatgccctacttaaaaatacttacttaattataccttaaaaattaaacacttanc

SEQ ID NO: 9603 - DNA, 594 bp, Homo sapiens
  misc_feature (66)..(66): "n" may be a, t, c, g, other or unknown
  misc_feature (73)..(73): "n" may be a, t, c, g, other or unknown
  misc_feature (82)..(82): "n" may be a, t, c, g, other or unknown
  misc_feature (305)..(305): "n" may be a, t, c, g, other or unknown
  misc_feature (317)..(317): "n" may be a, t, c, g, other or unknown
  misc_feature (432)..(432): "n" may be a, t, c, g, other or unknown
  misc_feature (490)..(490): "n" may be a, t, c, g, other or unknown
  misc_feature (510)..(510): "n" may be a, t, c, g, other or unknown
  misc_feature (555)..(555): "n" may be a, t, c, g, other or unknown
  misc_feature (561)..(561): "n" may be a, t, c, g, other or unknown
  misc_feature (563)..(563): "n" may be a, t, c, g, other or unknown
  misc_feature (570)..(570): "n" may be a, t, c, g, other or unknown
  misc_feature (586)..(586): "n" may be a, t, c, g, other or unknown
cttttttgtttcttgttttgaattttaaaaagcggtttcagctattgggaacctgaggttgattanctttgangcttcgganggctcttcttgctgctgcagatttggcaatcctgtaacttcgaccaacacctttaaatttcccctttcctactacttccacagtgactctgaccttcccgtcgtaagttctctcagccgggctaaatttggcagtttctggttccatttcaagcaattctcgcacaggggaacggggtacatttgcagaaaacttttctattagtggccgcatcatgggatantacacctgccanactgtctccagtgacatcccactatccatgtaaatggcaccagcaagcgactcaaaaatatcccccatggcctttggaacttcaatatcctcttctttctcttcatcctcctcanatctcctaagctcagaatccattccttgcatttcattcttctcaagctgaaatgcacnaaatctccatgacttggaanaactcaggaaaaaaaactttgaattattgttgtatcgactttacnccaccnanccaaaantgttttttaacagggncaaacccg

SEQ ID NO: 9604 - DNA, 409 bp, Homo sapiens
  misc_feature (356)..(356): "n" may be a, t, c, g, other or unknown
  misc_feature (359)..(359): "n" may be a, t, c, g, other or unknown
  misc_feature (384)..(384): "n" may be a, t, c, g, other or unknown
  misc_feature (392)..(392): "n" may be a, t, c, g, other or unknown
  misc_feature (396)..(396): "n" may be a, t, c, g, other or unknown
  misc_feature (399)..(399): "n" may be a, t, c, g, other or unknown
  misc_feature (403)..(403): "n" may be a, t, c, g, other or unknown
aaacagggtcttggcctgtcacccagaatggagtgcggtggcatgatcacgatcatggttcactacagccttgatcttctgggctcagctatcctcccacctcagcctctcaagtagctgggactacggtgcatgccaccacaccttgctaatttctgtattttttgtagggacagagtttggccatgttacccaggctggtctccaatgcctgggctcaagcaatcctccaccttggcctctcaaaatgctggaattacaggcatgagccacagtgtctgactacaaattgtaatactttaaaaattctctcaatattagagtaaagtcactcaatcatgattaataaatgagtnaanccacacctaaacaatgtatgatctnagaactcntttngtngganaaaatc

SEQ ID NO: 9605 - DNA, 593 bp, Homo sapiens
  misc_feature (496)..(496): "n" may be a, t, c, g, other or unknown
  misc_feature (514)..(514): "n" may be a, t, c, g, other or unknown
  misc_feature (535)..(535): "n" may be a, t, c, g, other or unknown
  misc_feature (541)..(541): "n" may be a, t, c, g, other or unknown
  misc_feature (551)..(551): "n" may be a, t, c, g, other or unknown
  misc_feature (557)..(557): "n" may be a, t, c, g, other or unknown
  misc_feature (561)..(561): "n" may be a, t, c, g, other or unknown
aagactaactgctttatactagcatttaatgattcatatttttatataccatagctggtaaatacaagctacgtactttatttggtgagctactaaactataatctgttccaactctagagggaaaactggttatgttggagttatagagaagtggtgcaaaggcaccatcctaaaggaatttcaacattccctttataatctatgacttttgctttatctatgatctacaacactaacctagactatataatgcccttgggcctacataaaatctgccattcatctttttctaattatagtagttgctatgtcactactactaatatagtaatttgatagcatctagcaccacagagtgtgactaatattgactagatgctagcatacacacaagtttctccagttgcatttggggaaaaaaggcaggagtagatggatataaaacaaaagatctgttatttgttataaaaaaaacacaatcttttacagtccancaatgactttattttttntccaaaaattttacattttcncccaantttatttttntaactncctnccctgcccttaaataatcaccccttctattac

SEQ ID NO: 9606 - DNA, 422 bp, Homo sapiens
  misc_feature (32)..(32): "n" may be a, t, c, g, other or unknown
  misc_feature (34)..(34): "n" may be a, t, c, g, other or unknown
  misc_feature (72)..(72): "n" may be a, t, c, g, other or unknown
  misc_feature (140)..(140): "n" may be a, t, c, g, other or unknown
  misc_feature (317)..(317): "n" may be a, t, c, g, other or unknown
  misc_feature (368)..(368): "n" may be a, t, c, g, other or unknown
  misc_feature (370)..(370): "n" may be a, t, c, g, other or unknown
  misc_feature (379)..(379): "n" may be a, t, c, g, other or unknown
  misc_feature (381)..(381): "n" may be a, t, c, g, other or unknown
  misc_feature (388)..(388): "n" may be a, t, c, g, other or unknown
  misc_feature (401)..(401): "n" may be a, t, c, g, other or unknown
  misc_feature (417)..(417): "n" may be a, t, c, g, other or unknown
ctttttttttaattttttttttttttggacananttttactcttgtcacccaggctggagtgcaatggcacnatctcagctcactgcaacttccgcctcctgggttcaagcaaatctcctgcctcagcctcccaagtggntgggattacaggcatgcaccaccacactcagctaatttttgtatttttaataaaaacggggtttcaccacattggccaggctggtctcaaactcctgacctcaggtgatccgcccgccttggcctcccaaagtgctgggattacaggcgtgagccaccacacccagccaacatacanaattctagcgctattcacttgccccaaatttgcaacttctaacttgctgananttagacaananataagtnatatgtgaatcantgatatgggtggtganataaa

SEQ ID NO: 9607 - DNA, 555 bp, Homo sapiens
  misc_feature (408)..(408): "n" may be a, t, c, g, other or unknown
  misc_feature (468)..(468): "n" may be a, t, c, g, other or unknown
  misc_feature (478)..(478): "n" may be a, t, c, g, other or unknown
  misc_feature (494)..(494): "n" may be a, t, c, g, other or unknown
  misc_feature (513)..(513): "n" may be a, t, c, g, other or unknown
  misc_feature (524)..(524): "n" may be a, t, c, g, other or unknown
  misc_feature (540)..(540): "n" may be a, t, c, g, other or unknown
  misc_feature (544)..(544): "n" may be a, t, c, g, other or unknown
aaaaatacagtggctttatttccattgtttatagtccccagtatcccatctgataagaaccttcaattctataaacaaaaatatctcaagaaagtatgttacacaatagtacatataagtaatagtttggcagaattttaaactctagtagttcatacccccaaaaaacaaattttaaaattcaaaaataacagttttatttaacatatgttacaccttaacatttaaaatatcatgctctagttaaatatttcatcaacaacactgtatacaaataaaatattacataaaatatatttaagaaaatgttttggtctttgatctgaacaataaataaaaacacaggccttctacatagacaggggaaacagttactactcaataataatcttggtataagcagcatgntgaaaatatggcaataacaaattcctggaattttaactgacaaaccatctatgccaaaantctgtaactncacctttccacccagnttcaaaatacatatgcctncccggtccatntggaaaatccctaccncaanatggttgttac

SEQ ID NO: 9608 - DNA, 526 bp, Homo sapiens
  misc_feature (5)..(5): "n" may be a, t, c, g, other or unknown
  misc_feature (63)..(63): "n" may be a, t, c, g, other or unknown
  misc_feature (416)..(416): "n" may be a, t, c, g, other or unknown
  misc_feature (455)..(455): "n" may be a, t, c, g, other or unknown
  misc_feature (459)..(459): "n" may be a, t, c, g, other or unknown
  misc_feature (475)..(475): "n" may be a, t, c, g, other or unknown
  misc_feature (503)..(503): "n" may be a, t, c, g, other or unknown
  misc_feature (511)..(511): "n" may be a, t, c, g, other or unknown
  misc_feature (517)..(517): "n" may be a, t, c, g, other or unknown
  misc_feature (522)..(522): "n" may be a, t, c, g, other or unknown
gtttngatatgtattttttatttccctgcagttttcacttatcaagaacaagtaacagggaangttgtctgaactagtgcataaacaaacattctgaaacaccactacacgtatctaatttacaagaaccgtataaaaaaagtcactaaaacactacactatgaaggtgtccaacgcttacagtcagactttttccaacccgttacttgccttgtagccacaggaaaactctccaaaattgaaaagacaatcttgccacaaccctccccccgcccaacacctgggatggctcgatatctagacttccaataattattgcaatgatataatgcaatacatacctggtaaagtatcttttatgtgatgtgttacagttttaaagccagttaaaatatgcagccttcagataaaatgtnatcctcgaaaaattttcatatttgcacagtttaaatgtnctanatgcataatttttccnattccaatttttccgtgttattaattanaaattggnttcctnaatanaaat

SEQ ID NO: 9609 - DNA, 576 bp, Homo sapiens
  misc_feature (415)..(415): "n" may be a, t, c, g, other or unknown
  misc_feature (429)..(429): "n" may be a, t, c, g, other or unknown
  misc_feature (432)..(432): "n" may be a, t, c, g, other or unknown
  misc_feature (438)..(438): "n" may be a, t, c, g, other or unknown
  misc_feature (446)..(446): "n" may be a, t, c, g, other or unknown
  misc_feature (482)..(482): "n" may be a, t, c, g, other or unknown
  misc_feature (486)..(486): "n" may be a, t, c, g, other or unknown
  misc_feature (528)..(528): "n" may be a, t, c, g, other or unknown
  misc_feature (530)..(530): "n" may be a, t, c, g, other or unknown
  misc_feature (544)..(544): "n" may be a, t, c, g, other or unknown
  misc_feature (561)..(561): "n" may be a, t, c, g, other or unknown
  misc_feature (566)..(566): "n" may be a, t, c, g, other or unknown
gaaaacacttattttactgtcttcaacaacaacaacaaacagataggcaggggaagtccagaggactcagaattgaagcagctctatacaataatgaaggtggtacaatgatgtgactgcaaagaaaatgactaaaacaaaactttacaaacatcttcatgtttgtaatgtattaatgcacaaaatatcaaaaatagaaagtctgagtttcttccccgcaggtttatgataaactatcaaccttctatttaatgcatttcctttttttttatttatagagatggagtctcgctatgttgcccaggctggtcttgaactcatgagctcaagcaatcctcccacctcggcctcccaaagtgctgggattaccggtgtgagccactgcacttggccttaatgcatttacttttataanccttctctgtttanaantacacnctaccaantacatacatgctggcattttaccatgaaaattttantttncgtctcaaactaatgactgcctttttacccatacttataccntnttataccttcccantggtacatttaaacaanatatntttttaaatc

SEQ ID NO: 9610 - DNA, 382 bp, Homo sapiens
  misc_feature (3)..(3): "n" may be a, t, c, g, other or unknown
  misc_feature (35)..(35): "n" may be a, t, c, g, other or unknown
  misc_feature (50)..(50): "n" may be a, t, c, g, other or unknown
  misc_feature (97)..(97): "n" may be a, t, c, g, other or unknown
  misc_feature (123)..(123): "n" may be a, t, c, g, other or unknown
  misc_feature (144)..(144): "n" may be a, t, c, g, other or unknown
  misc_feature (211)..(211): "n" may be a, t, c, g, other or unknown
  misc_feature (255)..(255): "n" may be a, t, c, g, other or unknown
  misc_feature (318)..(318): "n" may be a, t, c, g, other or unknown
  misc_feature (344)..(344): "n" may be a, t, c, g, other or unknown
  misc_feature (347)..(347): "n" may be a, t, c, g, other or unknown
  misc_feature (362)..(363): "n" may be a, t, c, g, other or unknown
  misc_feature (365)..(365): "n" may be a, t, c, g, other or unknown
  misc_feature (370)..(370): "n" may be a, t, c, g, other or unknown
ganaagaagttcccctttattcaaatcctttccangtgacccgggtgggncataagcccattcactttccctgcaaacccccacttcctgtggtgangggaaccttcgccttggcccacccanaacccggggcagtctgttgangtctctatatattcagcagggaccccatcccttcctgtccccaggcctgtgtctcctcaggactcanaactggttctctggctcaggctccatgtccttccccatccccanggctgggggcttcagggacgctccatcaacccacaggagcagctcccagaggaacctaagaanccacatctgctttgtggtcgatccancantaaatgtttgtgtcnnantgtancaattcctaaga

SEQ ID NO: 9611 - DNA, 527 bp, Homo sapiens
  misc_feature (5)..(6): "n" may be a, t, c, g, other or unknown
  misc_feature (67)..(67): "n" may be a, t, c, g, other or unknown
  misc_feature (292)..(292): "n" may be a, t, c, g, other or unknown
  misc_feature (447)..(447): "n" may be a, t, c, g, other or unknown
  misc_feature (450)..(450): "n" may be a, t, c, g, other or unknown
  misc_feature (465)..(465): "n" may be a, t, c, g, other or unknown
  misc_feature (500)..(500): "n" may be a, t, c, g, other or unknown
  misc_feature (503)..(503): "n" may be a, t, c, g, other or unknown
  misc_feature (510)..(510): "n" may be a, t, c, g, other or unknown
  misc_feature (512)..(512): "n" may be a, t, c, g, other or unknown
gtttnngtcaatttatttagaaaaaaattaacatgggcaaatgagatacctcagtgttacaacagantatagaaatgtctagcaatagtcaaataacttgatctttaaatacaaataaccacatgaacacctaatatacaggtttcatctgaatacatatttattagataaatattagaggttgtcacatcatctaactacatacagctttgcaagactagaaatcacaattagttttttgaccagtttaaagtatgaaatgattgcattgtacatacgatgtacaaagacnatgatggtttctgtgggagttacttcaggctgcactggtgggtgtgtttatgtgtgtacgtgtgaatcacctgtgatcatgatatcaaaaattatacaaagtatgaatttggttacaattttctcctgaaacccccgttcctttccattattccntanccccctaaaataccnaggtggcaggacaattaccctgaaaccaaatatanttnttggttnantaaaaccaaacaaaa

SEQ ID NO: 9612 - DNA, 604 bp, Homo sapiens
  misc_feature (206)..(206): "n" may be a, t, c, g, other or unknown
  misc_feature (438)..(438): "n" may be a, t, c, g, other or unknown
  misc_feature (457)..(457): "n" may be a, t, c, g, other or unknown
  misc_feature (484)..(484): "n" may be a, t, c, g, other or unknown
  misc_feature (486)..(486): "n" may be a, t, c, g, other or unknown
  misc_feature (488)..(488): "n" may be a, t, c, g, other or unknown
  misc_feature (553)..(553): "n" may be a, t, c, g, other or unknown
  misc_feature (566)..(566): "n" may be a, t, c, g, other or unknown
  misc_feature (577)..(577): "n" may be a, t, c, g, other or unknown
  misc_feature (579)..(579): "n" may be a, t, c, g, other or unknown
  misc_feature (597)..(597): "n" may be a, t, c, g, other or unknown
  misc_feature (600)..(600): "n" may be a, t, c, g, other or unknown
  misc_feature (604)..(604): "n" may be a, t, c, g, other or unknown
gagtgagatagcaaagaaattttattttaaccgagacttcataaaactatcagctttttgtttacttgctaactccaaaattttaagtaaaccaaatgcaatgattctgctgttacttttacattgcatacaagtacatgcgtgcacacatgcagacacacacacagacacacatgtttaagcaacaaattcaaagaagggtgtcnacacaattaaaatccataatgttaaacaataactgtgcttgttagttatacaaggtaatttgcatttgatataaacttaacttacattagtactttttagaaactaaaattattccaaacgtattaaatgcttagaaaattcatttctttcctaaacagattagaaccataattcaatatgttaacctttatatagaattatatgtaactcaaattatattcaattaattcnaatatataatttaaatacngaaaaaagaaaactacctgatgtgttntnangatgtttatttccctccaaaaaagaaactccgccagacaatgatttttatcccccatttcccgcncccctatcccttnaaaaaaatttntnttttggaaacaaaccctncanttcn

SEQ ID NO: 9613 - DNA, 597 bp, Homo sapiens
  misc_feature (77)..(77): "n" may be a, t, c, g, other or unknown
  misc_feature (117)..(117): "n" may be a, t, c, g, other or unknown
  misc_feature (128)..(128): "n" may be a, t, c, g, other or unknown
  misc_feature (153)..(153): "n" may be a, t, c, g, other or unknown
  misc_feature (189)..(189): "n" may be a, t, c, g, other or unknown
  misc_feature (399)..(399): "n" may be a, t, c, g, other or unknown
  misc_feature (459)..(459): "n" may be a, t, c, g, other or unknown
  misc_feature (535)..(535): "n" may be a, t, c, g, other or unknown
  misc_feature (556)..(556): "n" may be a, t, c, g, other or unknown
  misc_feature (565)..(565): "n" may be a, t, c, g, other or unknown
  misc_feature (574)..(574): "n" may be a, t, c, g, other or unknown
  misc_feature (597)..(597): "n" may be a, t, c, g, other or unknown
gagagggaaaaataaacatgcacgattatttaattcttttggaaaaactgcatgtaagtgaagttctctttcacaanacacaagcatcggtaacttgacaaaaaatgtaagcttcanatttttatgancctttacaaattgctgccagactcnagatttaaaaaaagaaggaaaatcccatatctgaanataaatttgctaattctggataaacgccatgtgtctcagtacatttctggcacttacctacacatctgcaagatgggaaatcatattgagtcttgacaggtgtatccaataaattttttataggagtatctagtaatttggaaggtgactctataaaattattgagaacagaagcagctgttcttttggttggtgtcttttctgaagaanttgtttgctgctctaaagctggggtgtggctatcaagttctgcagcaatggtttgtctantcaaaactgtgactggcccgacattccacttttacttgctccgtgatttgaaaaataaaaacctatggtcaatacnacttggcttaactgctccaanccgcccccnggccccaanaaacccttgccgccatacccacn

SEQ ID NO: 9614 - DNA, 561 bp, Homo sapiens
  misc_feature (31)..(31): "n" may be a, t, c, g, other or unknown
  misc_feature (33)..(33): "n" may be a, t, c, g, other or unknown
  misc_feature (264)..(264): "n" may be a, t, c, g, other or unknown
  misc_feature (311)..(311): "n" may be a, t, c, g, other or unknown
  misc_feature (315)..(315): "n" may be a, t, c, g, other or unknown
  misc_feature (363)..(363): "n" may be a, t, c, g, other or unknown
  misc_feature (418)..(418): "n" may be a, t, c, g, other or unknown
  misc_feature (424)..(424): "n" may be a, t, c, g, other or unknown
  misc_feature (481)..(481): "n" may be a, t, c, g, other or unknown
  misc_feature (489)..(489): "n" may be a, t, c, g, other or unknown
  misc_feature (500)..(500): "n" may be a, t, c, g, other or unknown
  misc_feature (502)..(502): "n" may be a, t, c, g, other or unknown
  misc_feature (529)..(529): "n" may be a, t, c, g, other or unknown
  misc_feature (532)..(532): "n" may be a, t, c, g, other or unknown
  misc_feature (547)..(547): "n" may be a, t, c, g, other or unknown
gagatggagtctcgctgtgtcaccagactanantgctgtggcgcaatctcagctcactgcaacctccaactccctggttcaagggattctcctccctccgcctcccaagtagctgggattacaggcatgcgccaccatgcccggctaacttttgtatttttagtaaaaatggggtttcactatgttggccaggatggtctcgatctcctgacctcgtgatccgcccacctcggcctcccaaagtgctgggattacaggcatganccaccgcgcctggccaatatacagtgtttataagtctacagtagtanatantgatgtcctaggctttcacattcactaaccactcactgattcacccanatccacagccactttccatcctgcaagctccattcatggtaagtgccttatacangtgttncaggtgttccatttttttcccctcctaataataataattattattattttgaaaatngggtctcnctcttttcccnanctggaattcaaaagatgatctcactcncancaacctttgcccccnagtttcaaacaatc

SEQ ID NO: 9615 - DNA, 350 bp, Homo sapiens
  misc_feature (286)..(286): "n" may be a, t, c, g, other or unknown
  misc_feature (290)..(290): "n" may be a, t, c, g, other or unknown
  misc_feature (309)..(309): "n" may be a, t, c, g, other or unknown
  misc_feature (317)..(317): "n" may be a, t, c, g, other or unknown
  misc_feature (328)..(328): "n" may be a, t, c, g, other or unknown
  misc_feature (331)..(331): "n" may be a, t, c, g, other or unknown
  misc_feature (336)..(336): "n" may be a, t, c, g, other or unknown
ccaatctgtaaaaaatattttcattatgtttattataaaaatataaatgtttccactacaaatcattttacattagtaagaggccatctacattgtacaacataaactgagtaatattttgaaaagacaagtttaaagtaaacacatattgccaatcatatcacatttatacatggcttgattgatatttagcacagcataaactgagtgagttaccagaaataaataatatatgttaatccaatttaagataccaaacagatcatatggtacataacatcctgtnaganttgtggctttatgtttacngaaagtcnatgcagttccngtncaaanaaaagggcggtagc

SEQ ID NO: 9616 - DNA, 551 bp, Homo sapiens
  misc_feature (317)..(317): "n" may be a, t, c, g, other or unknown
  misc_feature (374)..(375): "n" may be a, t, c, g, other or unknown
  misc_feature (432)..(432): "n" may be a, t, c, g, other or unknown
  misc_feature (469)..(469): "n" may be a, t, c, g, other or unknown
  misc_feature (475)..(476): "n" may be a, t, c, g, other or unknown
  misc_feature (504)..(504): "n" may be a, t, c, g, other or unknown
  misc_feature (506)..(506): "n" may be a, t, c, g, other or unknown
  misc_feature (523)..(523): "n" may be a, t, c, g, other or unknown
  misc_feature (543)..(543): "n" may be a, t, c, g, other or unknown
ggaagtaaaggtctttcagtttattgcttaagaaacaacagattaaagaaaacttttagttttagtctctgatgttacagattcagatgattcctataggttatttaaagaattcattttatcattttataagcaccctaaatttataaagctaaccacaaaagttgcctgtacattttttctatacctagtttcttgcaaattctacaatctgacttaagggataattaacggggaatacagtgtattactagacatgaaagtagtcctatccttagaaagctgtagttgaatataccaaaataagtcagttgaanaaatctgtgattctagtagtaataccatatcacttaggaccatcaaaaaaatgtgtnnctttctccaaacgacaactgatgcctttctttatgtaagcttttcccgtgttttggnacatattccattgcatttcaataaaaatgtttatgcnttatcnntaaataaaaaaattctatttaaactatncncgttcctaatggctccnatattttccctggaaaatanggaatttc

SEQ ID NO: 9617 - DNA, 600 bp, Homo sapiens
  misc_feature (73)..(73): "n" may be a, t, c, g, other or unknown
  misc_feature (417)..(417): "n" may be a, t, c, g, other or unknown
  misc_feature (422)..(422): "n" may be a, t, c, g, other or unknown
  misc_feature (457)..(457): "n" may be a, t, c, g, other or unknown
  misc_feature (467)..(467): "n" may be a, t, c, g, other or unknown
  misc_feature (474)..(474): "n" may be a, t, c, g, other or unknown
  misc_feature (482)..(482): "n" may be a, t, c, g, other or unknown
  misc_feature (511)..(511): "n" may be a, t, c, g, other or unknown
  misc_feature (525)..(525): "n" may be a, t, c, g, other or unknown
  misc_feature (571)..(571): "n" may be a, t, c, g, other or unknown
  misc_feature (586)..(586): "n" may be a, t, c, g, other or unknown
agtaagtatatacattcctttattagggtagcccttgcacttataaagaaaccttcctcaaaaaggaaatgtncaaaatgatgaagataccatagtttatttcaacatactaagccaaaaaaataagaaaacaactaatttatttgaaaaaaaaacaaattctgtacatgcaggcttggcttgattgaccataatgtatttcagcaaaaaaaatttagatacaccacacataataaagctttctatgtacacagtaaatagtaaataactttgctaaatggccagacatttgaaaaaatgaaaacacagttgtaaaacaaagtatgtaagaatattgtgaccttatttaactgtacaaaaagcaatcattctctccagccttccatcttcacttacatttttttaaacaagattaanccccnaattgaagggattaaatcctttctccctaatgccncgggaatatnaaattcnctttcaantctttaactttttacaaaggaaccaaacncttaaagggaaatngtgggaaacaaaaaatttcaatcctgtgccatcccccaaatccgcnggggaaaattcccantccctaccattccc

SEQ ID NO: 9618 - DNA, 374 bp, Homo sapiens
  misc_feature (3)..(3): "n" may be a, t, c, g, other or unknown
  misc_feature (329)..(329): "n" may be a, t, c, g, other or unknown
  misc_feature (337)..(337): "n" may be a, t, c, g, other or unknown
  misc_feature (344)..(344): "n" may be a, t, c, g, other or unknown
  misc_feature (347)..(347): "n" may be a, t, c, g, other or unknown
  misc_feature (350)..(351): "n" may be a, t, c, g, other or unknown
  misc_feature (371)..(371): "n" may be a, t, c, g, other or unknown
ganatggagatctcactctgtcatccaggctggagggcagtggtgccaccaaagctcattgcagcctcaaactcacaggctctccttcctcagcctcctgagtaggtgggactacatgcgtgcaccaccacacccagctaattttggtattttttggtggagatgggatccagctaaattgcacaggctggtcttgaactccaggcctcaagcgcttctcctgccttggcctcccaaagtgctgggatgacaggtgtgagccaccgcacccagccagagggctccttctaaaatggttgtcatctgctcccactcctgccctcccagangtgcctanaaaagtnaanaannaagctccactgaagaatgcncca

SEQ ID NO: 9619 - DNA, 544 bp, Homo sapiens
  misc_feature (59)..(59): "n" may be a, t, c, g, other or unknown
  misc_feature (72)..(72): "n" may be a, t, c, g, other or unknown
  misc_feature (283)..(283): "n" may be a, t, c, g, other or unknown
  misc_feature (285)..(285): "n" may be a, t, c, g, other or unknown
  misc_feature (326)..(326): "n" may be a, t, c, g, other or unknown
  misc_feature (416)..(416): "n" may be a, t, c, g, other or unknown
  misc_feature (462)..(462): "n" may be a, t, c, g, other or unknown
  misc_feature (498)..(498): "n" may be a, t, c, g, other or unknown
  misc_feature (514)..(515): "n" may be a, t, c, g, other or unknown
  misc_feature (520)..(520): "n" may be a, t, c, g, other or unknown
  misc_feature (527)..(527): "n" may be a, t, c, g, other or unknown
  misc_feature (530)..(530): "n" may be a, t, c, g, other or unknown
aaagaaaaataatttttattatactttaaattctgggatacatgtgcaaaaacatgcangtttgttacatangtatacatgtgccatggtggtttgctgcacctgtcaaccatctacattaggtatttctctgaatgctatccctccctttgcccccacccagcaacaggccctggtgtgtgatcttcccctccctgtgtccatgtgttctcattgttcaactcccacttataagtgagaacatgcagcgtttggttttctgttcctgtgttagtttgctganantgatggtttccaacttcatccatgtccctgcaaaggacaanaactcatccttttttatggctgcataatattccatggtgtatatgtgccacattttctttatccagtttatcattgataaactggttggnttccaattcttgttattgcaaataatgccgttataaacatactttncctgttttcttaaaataaaaataattaaaacccttngggttatacccattannggaanggcgggntcnaaagggaatcccgg

SEQ ID NO: 9620 - DNA, 431 bp, Homo sapiens
  misc_feature (2)..(2): "n" may be a, t, c, g, other or unknown
  misc_feature (30)..(30): "n" may be a, t, c, g, other or unknown
  misc_feature (41)..(41): "n" may be a, t, c, g, other or unknown
  misc_feature (89)..(89): "n" may be a, t, c, g, other or unknown
  misc_feature (97)..(97): "n" may be a, t, c, g, other or unknown
  misc_feature (137)..(137): "n" may be a, t, c, g, other or unknown
  misc_feature (159)..(159): "n" may be a, t, c, g, other or unknown
  misc_feature (187)..(187): "n" may be a, t, c, g, other or unknown
  misc_feature (199)..(199): "n" may be a, t, c, g, other or unknown
  misc_feature (310)..(310): "n" may be a, t, c, g, other or unknown
  misc_feature (360)..(360): "n" may be a, t, c, g, other or unknown
  misc_feature (365)..(365): "n" may be a, t, c, g, other or unknown
  misc_feature (368)..(368): "n" may be a, t, c, g, other or unknown
  misc_feature (371)..(371): "n" may be a, t, c, g, other or unknown
  misc_feature (386)..(386): "n" may be a, t, c, g, other or unknown
  misc_feature (425)..(425): "n" may be a, t, c, g, other or unknown
  misc_feature (429)..(429): "n" may be a, t, c, g, other or unknown
cnaaaatctgaattcttttaattacctgtntcagatgaatnaaaaaaaactccggaaataatgaatgctttcttaacacaacagaaacncctacacncatgaacaggaatggttcaggggaacccggtttgggtgtnaaactggggctgggctccccangtggaacctgctcttaaaaacacaccanaaagctgggaangctctattgggggccgcttgcacacgcaacagtacagttttacttttttcctggacagtgcagacagtgccatcagctctagccttgcaggagggcacagtcattcttcanacttgcactcctggctctggtgctgcatcctggaaaggacgcgctcgtanaacancangtntgcgctggaggacangacctcctgcaggctggccttgcggacagtgtctcgganaccnca

SEQ ID NO: 9621 - DNA, 498 bp, Homo sapiens
  misc_feature (77)..(77): "n" may be a, t, c, g, other or unknown
  misc_feature (335)..(335): "n" may be a, t, c, g, other or unknown
  misc_feature (341)..(341): "n" may be a, t, c, g, other or unknown
  misc_feature (422)..(422): "n" may be a, t, c, g, other or unknown
  misc_feature (432)..(432): "n" may be a, t, c, g, other or unknown
  misc_feature (447)..(447): "n" may be a, t, c, g, other or unknown
  misc_feature (465)..(465): "n" may be a, t, c, g, other or unknown
  misc_feature (479)..(479): "n" may be a, t, c, g, other or unknown
  misc_feature (483)..(483): "n" may be a, t, c, g, other or unknown
  misc_feature (490)..(490): "n" may be a, t, c, g, other or unknown
aatgacagttaatggcaaaagggaaatttttagctataaggatctggaaaggcctgtgggaaataatgtgagcgaanaataggacttgtctctgttttcacttataattttcaaaagtcatgaagtactaggcaaagtttccaaaatgcttctacttaatttaacctgattctccccgccacaccagcaaaatgctttttatgttggtacagtaagtttgcaaggtaatgatgaatacctgaattgcagaaattaggcctaaactctgatgacccttaatgtaaaccacattttaacgtgttgagggtcattatttgtatggcacaggtatatcnggaaanaagatggatatactacccctgggaagccattcagtctctcccttacaaatgcctcctatcacatgacaggcattttcaaanccctgttttncccttgtctcaaatnatcatggtttatatttcnccttttgtgggcancccnaatgttntttttacc

SEQ ID NO: 9622 - DNA, 549 bp, Homo sapiens
  misc_feature (408)..(408): "n" may be a, t, c, g, other or unknown
  misc_feature (411)..(411): "n" may be a, t, c, g, other or unknown
  misc_feature (423)..(423): "n" may be a, t, c, g, other or unknown
  misc_feature (460)..(460): "n" may be a, t, c, g, other or unknown
  misc_feature (468)..(468): "n" may be a, t, c, g, other or unknown
  misc_feature (479)..(479): "n" may be a, t, c, g, other or unknown
  misc_feature (483)..(483): "n" may be a, t, c, g, other or unknown
  misc_feature (511)..(511): "n" may be a, t, c, g, other or unknown
  misc_feature (525)..(525): "n" may be a, t, c, g, other or unknown
  misc_feature (542)..(542): "n" may be a, t, c, g, other or unknown
gcatattcaactgaagaaatttatttacttttttctaggtacatagatgacataattatagacaagttttgatacataggaaaacccttccgtccacctctctttatgctaaatgaatcatcacaataatttttacaatttttaaaacaatacacagctttcttgggctgaagcaattgcaagaacatattggtactggtatattacagctacttacaatgtttttaagaacagcaatggagaaaaataagttatttaaatattgatttcatatacagaaagtgcaatgttgttagttgttatataacttgctcgacagtttcttttctctatcaattttaaatcaagataacttggactccaactattatatttttttctgaaaataatacagtacacacatggcancantgacttggcaanttgaccttttttgctgcagttatgaaagccaactttnctatttcnggaactgattnccantaaattattatttcccatttcccccctncctggggggttcangaaaaaaaaaagggccnctgaata

SEQ ID NO: 9623 - DNA, 598 bp, Homo sapiens
  misc_feature (109)..(109): "n" may be a, t, c, g, other or unknown
  misc_feature (126)..(126): "n" may be a, t, c, g, other or unknown
  misc_feature (148)..(148): "n" may be a, t, c, g, other or unknown
  misc_feature (190)..(190): "n" may be a, t, c, g, other or unknown
  misc_feature (192)..(192): "n" may be a, t, c, g, other or unknown
  misc_feature (249)..(249): "n" may be a, t, c, g, other or unknown
  misc_feature (327)..(327): "n" may be a, t, c, g, other or unknown
  misc_feature (336)..(336): "n" may be a, t, c, g, other or unknown
  misc_feature (359)..(359): "n" may be a, t, c, g, other or unknown
  misc_feature (405)..(405): "n" may be a, t, c, g, other or unknown
  misc_feature (414)..(414): "n" may be a, t, c, g, other or unknown
  misc_feature (432)..(432): "n" may be a, t, c, g, other or unknown
  misc_feature (455)..(455): "n" may be a, t, c, g, other or unknown
  misc_feature (470)..(470): "n" may be a, t, c, g, other or unknown
  misc_feature (525)..(525): "n" may be a, t, c, g, other or unknown
  misc_feature (528)..(528): "n" may be a, t, c, g, other or unknown
  misc_feature (531)..(531): "n" may be a, t, c, g, other or unknown
  misc_feature (542)..(542): "n" may be a, t, c, g, other or unknown
  misc_feature (544)..(544): "n" may be a, t, c, g, other or unknown
  misc_feature (558)..(558): "n" may be a, t, c, g, other or unknown
  misc_feature (579)..(579): "n" may be a, t, c, g, other or unknown
aaagtggtagcacattttattcacagagcaatgaaaattattcctataaattaatgtgagctgaacaaattcaccttccaatgtgcatacagaaagtggggatgtgaanacagcaaggtgggtganacacaagttatgaagtaatgantaccttctcctcgtggtttttactttaaaagcacatgctaananctggatgcagtggctcacgcctgtactctcagcactttgggaggccaaggcgggcanatcacttgaggtcaggagttccagaccagcctggccaacatagtgaaaccccgtctctaccaaaaatacaaaaattanccgtgtgtngtggtgcgtgcctgtaatcccanccactcaggaagctgaagcatgaaaacgcttaaacccaccaggcanaagttgcantgatccaaaatcgcagcnttggactccaccctggacaacanaacaaaactaccccnccataaatatttgttgggtgaaattaaaaattgaaggtgaattgttaaaaatccnctnggnccccccccccntnaaaaaccccccacncaaaacccccccgaacttaanccttccaacatccggtgaa

SEQ ID NO: 9624 - DNA, 466 bp, Homo sapiens
  misc_feature (428)..(428): "n" may be a, t, c, g, other or unknown
  misc_feature (431)..(431): "n" may be a, t, c, g, other or unknown
  misc_feature (437)..(437): "n" may be a, t, c, g, other or unknown
  misc_feature (457)..(457): "n" may be a, t, c, g, other or unknown
  misc_feature (460)..(460): "n" may be a, t, c, g, other or unknown
  misc_feature (463)..(463): "n" may be a, t, c, g, other or unknown
  misc_feature (465)..(465): "n" may be a, t, c, g, other or unknown
gagacagagtcttgctctgttgcccaggctggagtgcagtggcatgatcttggctcactgcaacctctgcctcctgagttccagcgatctcctgcctcagcctcccgagtagctgggattacaggtgtgcaccagcatgcctggctaatttttgtatttttagtagagatggagtttcaccatgttggccaggctgttctcaaactcctgatctcaggtgatctgcccgtctcagcctcccaaagtgctgggattacaggcgtaagccactgcgcctggcccaatgtgtggttgttattagctatgccctttaccgaactccttttcttgacctcctatacctacacctgttgtaaagaaacaaatacaaaacaggatttcagcaaaacactaaaagaagagcgttctagttttttaaaaaatttaanttncttgtnggcacataacaatgaactcntgnttncnc

SEQ ID NO: 9625 - DNA, 500 bp, Homo sapiens
  misc_feature (1)..(500): "n" may be a, t, c, g, other or unknown
nnnnnnnnnnnnnnnnnnnnnnnnnnnnnnnnnnnnnnnnnnnnnnnnnnnnnnnnnnnnnnnnnnnnnnnnnnnnnnnnnnnnnnnnnnnnnnnnnnnnnnnnnnnnnnnnnnnnnnnnnnnnnnnnnnnnnnnnnnnnnnnnnnnnnnnnnnnnnnnnnnnnnnnnnnnnnnnnnnnnnnnnnnnnnnnnnnnnnnnnnnnnnnnnnnnnnnnnnnnnnnnnnnnnnnnnnnnnnnnnnnnnnnnnnnnnnnnnnnnnnnnnnnnnnnnnnnnnnnnnnnnnnnnnnnnnnnnnnnnnnnnnnnnnnnnnnnnnnnnnnnnnnnnnnnnnnnnnnnnnnnnnnnnnnnnnnnnnnnnnnnnnnnnnnnnnnnnnnnnnnnnnnnnnnnnnnnnnnnnnnnnnnnnnnnnnnnnnnnnnnnnnnnnnnnnnnnnnnnnnnnnnnnnnnnnnnnnnnnnnnnnnnnnnnnnnnnnnnnnnnnnnnnnnnnnnnnnnnnnn

SEQ ID NO: 9626 - DNA, 584 bp, Homo sapiens
  misc_feature (5)..(5): "n" may be a, t, c, g, other or unknown
  misc_feature (7)..(7): "n" may be a, t, c, g, other or unknown
  misc_feature (28)..(28): "n" may be a, t, c, g, other or unknown
  misc_feature (192)..(192): "n" may be a, t, c, g, other or unknown
  misc_feature (341)..(341): "n" may be a, t, c, g, other or unknown
  misc_feature (358)..(358): "n" may be a, t, c, g, other or unknown
  misc_feature (365)..(365): "n" may be a, t, c, g, other or unknown
  misc_feature (491)..(491): "n" may be a, t, c, g, other or unknown
  misc_feature (498)..(498): "n" may be a, t, c, g, other or unknown
  misc_feature (524)..(524): "n" may be a, t, c, g, other or unknown
  misc_feature (529)..(529): "n" may be a, t, c, g, other or unknown
  misc_feature (536)..(536): "n" may be a, t, c, g, other or unknown
  misc_feature (563)..(563): "n" may be a, t, c, g, other or unknown
  misc_feature (584)..(584): "n" may be a, t, c, g, other or unknown
agtananacagtgttttgccatgttgancaggctggtctcaaattcctagcctcaagttatccacccacctcagcctcccaaactgctgggattacaggcgtgagccaccatgcccagcctgatattactattaaatagctatgagctaggctttccgtaaagtatcccctggatggcaaaccagtaagaanagcttataaacttcacttcttctgggttacaatctcttatctttctggaacggtaaagcacaatggttgaaattagaccccttaaaaaaaaatccaatgctgtatatttgctttatcataacatgtatccctacatggcacttctcaanaatggcatggcaggganggatgtnatatcttaagcatgttttctcattatgcacttgtacactgtgcattggtttatacttaatttgttacattttccctaaaataattattctctgctccttcctcacaacaatcccaattcccccccnccccccnctattatgaagaagcttaattggacnaaaanaattttngaggaaggtataccaggaagaacaatnttttgaatggggatccctttn

SEQ ID NO: 9627 - DNA, 573 bp, Homo sapiens
  misc_feature (159)..(159): "n" may be a, t, c, g, other or unknown
  misc_feature (180)..(180): "n" may be a, t, c, g, other or unknown
  misc_feature (191)..(191): "n" may be a, t, c, g, other or unknown
  misc_feature (312)..(312): "n" may be a, t, c, g, other or unknown
  misc_feature (411)..(411): "n" may be a, t, c, g, other or unknown
  misc_feature (498)..(498): "n" may be a, t, c, g, other or unknown
  misc_feature (545)..(545): "n" may be a, t, c, g, other or unknown
  misc_feature (547)..(547): "n" may be a, t, c, g, other or unknown
  misc_feature (556)..(556): "n" may be a, t, c, g, other or unknown
  misc_feature (558)..(558): "n" may be a, t, c, g, other or unknown
aacacacacccttccttttatattttcagtatattaaaaaggaacagtacaaatgctgtggtattaaaaaggatccttatttttcaacaaatgaacttttataaacaattctgtaatgaaatgaaaacagtatcttaatacaagcttttgttaaacaanattttaaaattttaaaattanaaaacgttaanattaaactctttcaaaggttcaaacaaaaaaacaacctgtacaatctccattacatgtgtctttgtacacagtctgggcactttgaaaatgttaaagtttttaacgtttgactgacagaancagcacttaaaggcttcatgaatctattttccaaaaaagtatgctttcagtaaaacattttaccattttatctaactatgcactgacatttttgttctncctgaaaaggggatttatgctaacactgtatttttaatgtaaaaatatacttttaaaaatattttaacttcctgagtgacttatccnccaatgggatttaatgaacaatttctaaatttaaaaagaaaaatttntnttatccacncntttttttccactagg

SEQ ID NO: 9628 - DNA, 351 bp, Homo sapiens
  misc_feature (7)..(7): "n" may be a, t, c, g, other or unknown
  misc_feature (269)..(269): "n" may be a, t, c, g, other or unknown
  misc_feature (282)..(282): "n" may be a, t, c, g, other or unknown
  misc_feature (297)..(297): "n" may be a, t, c, g, other or unknown
  misc_feature (319)..(319): "n" may be a, t, c, g, other or unknown
  misc_feature (327)..(327): "n" may be a, t, c, g, other or unknown
  misc_feature (333)..(333): "n" may be a, t, c, g, other or unknown
  misc_feature (350)..(350): "n" may be a, t, c, g, other or unknown
acactanaaaaatcaagttttttattttaaaatattttcaaaggctaaggccatagcaaaacaacccaagggtggttgaatcaaactcagggaattagaggagcatcagccaatgcaagcaggtctatataaaatacacatcatttataaatgcacacagcagaaagcacagtggccccagaggaccaggcagggggacaacagagagaaacagagcactatctggagggacaggcacacccgcaacactcaaagccctgggccccaantgcacctccaaantcacctacgctgcancatggctcttgccctttctgancctgggtntacctnaaaaccaatttcaccanc

SEQ ID NO: 9629 - DNA, 581 bp, Homo sapiens
  misc_feature (62)..(62): "n" may be a, t, c, g, other or unknown
  misc_feature (238)..(238): "n" may be a, t, c, g, other or unknown
  misc_feature (261)..(261): "n" may be a, t, c, g, other or unknown
  misc_feature (271)..(271): "n" may be a, t, c, g, other or unknown
  misc_feature (286)..(286): "n" may be a, t, c, g, other or unknown
  misc_feature (310)..(310): "n" may be a, t, c, g, other or unknown
  misc_feature (394)..(394): "n" may be a, t, c, g, other or unknown
  misc_feature (397)..(397): "n" may be a, t, c, g, other or unknown
  misc_feature (413)..(413): "n" may be a, t, c, g, other or unknown
  misc_feature (487)..(487): "n" may be a, t, c, g, other or unknown
  misc_feature (498)..(498): "n" may be a, t, c, g, other or unknown
  misc_feature (511)..(511): "n" may be a, t, c, g, other or unknown
  misc_feature (514)..(514): "n" may be a, t, c, g, other or unknown
  misc_feature (552)..(552): "n" may be a, t, c, g, other or unknown
  misc_feature (556)..(556): "n" may be a, t, c, g, other or unknown
  misc_feature (561)..(561): "n" may be a, t, c, g, other or unknown
acaaatttaaattaaatttcttttttagagatgggaccttgctatgttgcctaggctggcanatttgcactcttgggctaagtgaccctcctacttcagccgccccagcagctgggattatagtagtgcgccaccctgcctggcttaatttcagttttcttaaaaaaaaaaaacaaaaaaaactagcatgcctgtcattttattttgcctactggaaaccaccagttaaaacaagaanaaaacaggaaacctccagttaanagggttttanaaaagtgtatttcanaaaaaaaaattgtacattcaaaanagtggttgtttcctttaaattgttactgataacctacaatctcactttagcaacatatctgtgtgtatttatgtacgtgaatanacntgtgtatgtatgtatnatgttatgcacattttctcaatgatgaaaaatttttgttctctgaaaaaggactttactggcgaaaatccaaanccttatgaacnaaaatgggttaanaantttaaattggcaaaataacttgaaataaacaaaatttnggcnacaanaaaaaaatggcctttttaaa

SEQ ID NO: 9630 - DNA, 608 bp, Homo sapiens
  misc_feature (1)..(608): "n" may be a, t, c, g, other or unknown
nnnnnnnnnnnnnnnnnnnnnnnnnnnnnnnnnnnnnnnnnnnnnnnnnnnnnnnnnnnnnnnnnnnnnnnnnnnnnnnnnnnnnnnnnnnnnnnnnnnnnnnnnnnnnnnnnnnnnnnnnnnnnnnnnnnnnnnnnnnnnnnnnnnnnnnnnnnnnnnnnnnnnnnnnnnnnnnnnnnnnnnnnnnnnnnnnnnnnnnnnnnnnnnnnnnnnnnnnnnnnnnnnnnnnnnnnnnnnnnnnnnnnnnnnnnnnnnnnnnnnnnnnnnnnnnnnnnnnnnnnnnnnnnnnnnnnnnnnnnnnnnnnnnnnnnnnnnnnnnnnnnnnnnnnnnnnnnnnnnnnnnnnnnnnnnnnnnnnnnnnnnnnnnnnnnnnnnnnnnnnnnnnnnnnnnnnnnnnnnnnnnnnnnnnnnnnnnnnnnnnnnnnnnnnnnnnnnnnnnnnnnnnnnnnnnnnnnnnnnnnnnnnnnnnnnnnnnnnnnnnnnnnnnnnnnnnnnnnnnnnnnnnnnnnnnnnnnnnnnnnnnnnnnnnnnnnnnnnnnnnnnnnnnnnnnnnnnnnnnnnnnnnnnnnnnnnnnnnnnnnnnnnnnnnnnnnnnnnnnnnnnnnnnn

SEQ ID NO: 9631 - DNA, 552 bp, Homo sapiens
  misc_feature (546)..(552): "n" may be a, t, c, g, other or unknown
gggcggggacggagtctcactcttgtcgcccaggctggagtgcagtggtgcgatctcggctcactgcaatctctgcctcccagattcaagcaattcgcctgcctcagcctcccaagtagttggattacaggagtgcgccaccatgcccggctaaattttgtgtttttagtagagacagggtttcaccacgttggccaggctggtctcgaactcctgacctcaggtgatccgcccacctcggcctcccaaagtgctgggattacaggtgtgagccaccatgcccagccaatttctttcttttaaagctctattaagtcattagtataaagttaaaaaggcactcaaaaagcaatggtatttgcctgctttatattgtatattaaaataagtgatagtagcatttcattattactgtatccctgtcagttatgatttctgtattcattatgtacttttttactgaaagattttaaaagttggcacaattataaactgcactagtgctttaatataaaagagagatgggtctgccaccagttaagttcnnnnnnn

SEQ ID NO: 9632 - DNA, 590 bp, Homo sapiens
  misc_feature (3)..(3): "n" may be a, t, c, g, other or unknown
  misc_feature (8)..(8): "n" may be a, t, c, g, other or unknown
  misc_feature (128)..(128): "n" may be a, t, c, g, other or unknown
  misc_feature (142)..(142): "n" may be a, t, c, g, other or unknown
  misc_feature (175)..(175): "n" may be a, t, c, g, other or unknown
  misc_feature (188)..(188): "n" may be a, t, c, g, other or unknown
  misc_feature (256)..(256): "n" may be a, t, c, g, other or unknown
  misc_feature (291)..(291): "n" may be a, t, c, g, other or unknown
  misc_feature (423)..(423): "n" may be a, t, c, g, other or unknown
  misc_feature (443)..(443): "n" may be a, t, c, g, other or unknown
  misc_feature (460)..(460): "n" may be a, t, c, g, other or unknown
  misc_feature (515)..(515): "n" may be a, t, c, g, other or unknown
  misc_feature (536)..(536): "n" may be a, t, c, g, other or unknown
  misc_feature (553)..(553): "n" may be a, t, c, g, other or unknown
  misc_feature (555)..(555): "n" may be a, t, c, g, other or unknown
  misc_feature (562)..(562): "n" may be a, t, c, g, other or unknown
  misc_feature (579)..(579): "n" may be a, t, c, g, other or unknown
  misc_feature (583)..(583): "n" may be a, t, c, g, other or unknown
ganaaggnctcactctgtcaccaaactggaattgcagtgggcgtgatctccactcactgtaacctctgcctcaattcaagcgaatcccctgcctcagcctgaataactgggaatacaatggggcgccnggctaatttttgtntttttagtaaaaaaagggtctcaccgtgttggncaagctggtctcnaactcctggcctcaagtgatccacccaccttgctcagcctcccaaagtgctgggattacaggcctganccaccgtgcccggccatgttgcttttataattganatatttcatttgttttgggggttaggcaaatttaatttgccattcctcaaactcagtaacttcaaatataaacaatgcctaaaatgaatatggttcctcattatttctatcaaactactacaaatactgaanaatccccaaattattttccncagaagcaaaaaaacanttcaagggttgaaaatctccatattaataaccccgggaaattccaatggccttcntatttccagggttatgccatntgaaacccaattccctntnttttgtnccccaaaatttcttcantccnttttccc

SEQ ID NO: 9633 - DNA, 516 bp, Homo sapiens
  misc_feature (472)..(472): "n" may be a, t, c, g, other or unknown
  misc_feature (511)..(516): "n" may be a, t, c, g, other or unknown
agatgaaagagggtttatttattaatatatgatagccttggctcaaaaaagacaaatgagggctcaaaaaggaattacagtaactttaaaaaatatattaaacatatccaagatcctaaatatattattctccccaaaagctagctgcttccaaacttgatttgatattttgcatgttttccctacgttgcttggtaaatatatttgcttctcctttctgcaatcgacgtctgacagctgatttttgctgttttgtcaactgacgtttcaccttctgtttcaccagttctggaggaattgttgaacagcttacagcactgcctgaagaagtgatactcagagttcttgttctatactgattcatagctcccacattttcttcatctctgaaaggcctgaattctctatttaatgacaacaaggcaattagatgagggcatcatcttcatactcgtcagaagccacaggggantcctcctgaactctctgaacatctgcctgttgtaatttnnnnnn

SEQ ID NO: 9634 - DNA, 572 bp, Homo sapiens
  misc_feature (257)..(257): "n" may be a, t, c, g, other or unknown
  misc_feature (348)..(348): "n" may be a, t, c, g, other or unknown
  misc_feature (397)..(397): "n" may be a, t, c, g, other or unknown
  misc_feature (400)..(400): "n" may be a, t, c, g, other or unknown
  misc_feature (418)..(418): "n" may be a, t, c, g, other or unknown
  misc_feature (421)..(421): "n" may be a, t, c, g, other or unknown
  misc_feature (434)..(434): "n" may be a, t, c, g, other or unknown
  misc_feature (451)..(451): "n" may be a, t, c, g, other or unknown
  misc_feature (455)..(455): "n" may be a, t, c, g, other or unknown
  misc_feature (501)..(501): "n" may be a, t, c, g, other or unknown
  misc_feature (528)..(528): "n" may be a, t, c, g, other or unknown
  misc_feature (546)..(546): "n" may be a, t, c, g, other or unknown
  misc_feature (549)..(549): "n" may be a, t, c, g, other or unknown
  misc_feature (555)..(555): "n" may be a, t, c, g, other or unknown
  misc_feature (558)..(559): "n" may be a, t, c, g, other or unknown
gttttatccaaatttattctcaggggaaaaagaaagtagtggctctacgcaactttttcattcaccaaccacctttccatgcatcagaacctatgctgtgattgttagctgaacttcaatagtttccacctacttaagagagatgcctcaaacaaattaactttattttcagacaacaggtccaagaagacttcacagctcaatcatgacgaacatgtggctgtttcctcacagccaggaaccctcggtattagaanaaaactccaaccccccacaccatcatctagcctcttttctcactgtgaagaactgatgagacagaattcctgagaagggaacatttaggtnatctgggataaaagggcatggaaaggactggacaaactaaccctccccntgnaaggaagggaaaagaatnttnccaaacagactancagaaaaacaagaaccntcantttcttcaggataaacaaaaaggccctctaaatgctctgattaaanggttgtccatgcctacagtgggcggangataattctaaaaaacanaantttttnccnncccaatgctccat

SEQ ID NO: 9635 - DNA, 465 bp, Homo sapiens
  misc_feature (85)..(85): "n" may be a, t, c, g, other or unknown
  misc_feature (108)..(108): "n" may be a, t, c, g, other or unknown
  misc_feature (163)..(163): "n" may be a, t, c, g, other or unknown
  misc_feature (188)..(188): "n" may be a, t, c, g, other or unknown
  misc_feature (200)..(200): "n" may be a, t, c, g, other or unknown
  misc_feature (223)..(223): "n" may be a, t, c, g, other or unknown
  misc_feature (353)..(353): "n" may be a, t, c, g, other or unknown
  misc_feature (377)..(377): "n" may be a, t, c, g, other or unknown
  misc_feature (387)..(387): "n" may be a, t, c, g, other or unknown
  misc_feature (401)..(401): "n" may be a, t, c, g, other or unknown
  misc_feature (414)..(414): "n" may be a, t, c, g, other or unknown
  misc_feature (438)..(438): "n" may be a, t, c, g, other or unknown
  misc_feature (448)..(448): "n" may be a, t, c, g, other or unknown
  misc_feature (464)..(464): "n" may be a, t, c, g, other or unknown
gaatacgcaagtatttattacgcccttgaaccaatggctttgacatgttgtaaacaggaacactgaaagacctcatcttgaccangccatagaacaccaggtcatgangatcctctttttttgaaaacccaggccagacatgcttgatcccttgcacagggangccctctggtccctctgggatgaancattcatggaangcccatctttctgggttttccantctggttagtgggcagttgttcacccacagaacacaggggtctgtgcacacttgagccttgggcctgaggactgaccatgccaggggacttccattccagggagaccccttcagggtaaggagaactgancatttgcttgcatctcgctgtcanctggaatgancgcactgggaagtncaaaaaacccatngctgggttttgggcactggctttnttattactcntagggcaaaactggcnc

SEQ ID NO: 9636 - DNA, 594 bp, Homo sapiens
  misc_feature (38)..(38): "n" may be a, t, c, g, other or unknown
  misc_feature (76)..(76): "n" may be a, t, c, g, other or unknown
  misc_feature (118)..(118): "n" may be a, t, c, g, other or unknown
  misc_feature (122)..(122): "n" may be a, t, c, g, other or unknown
  misc_feature (139)..(139): "n" may be a, t, c, g, other or unknown
  misc_feature (146)..(146): "n" may be a, t, c, g, other or unknown
  misc_feature (198)..(198): "n" may be a, t, c, g, other or unknown
  misc_feature (232)..(232): "n" may be a, t, c, g, other or unknown
  misc_feature (318)..(318): "n" may be a, t, c, g, other or unknown
  misc_feature (341)..(341): "n" may be a, t, c, g, other or unknown
  misc_feature (422)..(422): "n" may be a, t, c, g, other or unknown
  misc_feature (425)..(425): "n" may be a, t, c, g, other or unknown
  misc_feature (442)..(442): "n" may be a, t, c, g, other or unknown
  misc_feature (469)..(469): "n" may be a, t, c, g, other or unknown
  misc_feature (507)..(507): "n" may be a, t, c, g, other or unknown
  misc_feature (520)..(520): "n" may be a, t, c, g, other or unknown
  misc_feature (554)..(554): "n" may be a, t, c, g, other or unknown
  misc_feature (562)..(562): "n" may be a, t, c, g, other or unknown
  misc_feature (573)..(574): "n" may be a, t, c, g, other or unknown
  misc_feature (578)..(578): "n" may be a, t, c, g, other or unknown
aaattttacagagtttaattgagcaaagaatgattcangaatcagggaaccctcaaaccaaaataagctcagaaanacccagtgccactgtgtggccaaagacttacggacagaaaanggantgaggcacaaaaagcanaagtgangcctgcaaacagcagggtggctacagctcgtgtctggcttattgaaacagantttgaagtgctgctgcctgtgactgattcaagantaagttacagtgtccacacatccaattagatgactgttcactacgtatggagaaacctataggctaaacttacagtatgtaaggangcggcttcaggctacagctgaantaatgtgtccttacagttggaaccaggagttcatgggaattcttcatcatccagtggtctgtaaatgttcccatgctgaantantctgtccttacagtgtnaaaccaagggttcatgggaattctccncatccagtaatctttaatgttgcccctcctaattattnttcctaccgggtnaaccagggttcttgggaatcccccccccccccgnccgttatntttcccccctnntttnttccccgttccctttt

SEQ ID NO: 9637 - DNA, 588 bp, Homo sapiens
  misc_feature (209)..(209): "n" may be a, t, c, g, other or unknown
  misc_feature (285)..(285): "n" may be a, t, c, g, other or unknown
  misc_feature (375)..(375): "n" may be a, t, c, g, other or unknown
  misc_feature (403)..(403): "n" may be a, t, c, g, other or unknown
  misc_feature (425)..(425): "n" may be a, t, c, g, other or unknown
  misc_feature (469)..(469): "n" may be a, t, c, g, other or unknown
  misc_feature (535)..(535): "n" may be a, t, c, g, other or unknown
  misc_feature (540)..(540): "n" may be a, t, c, g, other or unknown
  misc_feature (549)..(550): "n" may be a, t, c, g, other or unknown
  misc_feature (566)..(566): "n" may be a, t, c, g, other or unknown
  misc_feature (570)..(570): "n" may be a, t, c, g, other or unknown
  misc_feature (572)..(572): "n" may be a, t, c, g, other or unknown
attattctggctagtgatctatctattttgttaatctcttcaaaaaaccaggtcctggattcattgatttttttgaagggtttttcatgtctctatctccttcagttctgctctgatcttagttatttcttgtcttctggtagcttttgaatttgtttgctcttgcttctctagttcttttaattgtgatgttagggtgttgactttanatctttcctgctttctcctgtgggcatttagtgctatacatttctctccaaacattgctttagctgtgtcccacanattctggtacattgtgtctttgttctcattggtttcaaaaaacttatttatttctgccttaatttcgttatttacccagtaatcattcangaacaaggttgttcagtttccatgttanttgtgcggttttgaataatttncttaatcctgaattctaatttgattgcactgtggtctgaaaaantgttgtaatttccgttctttgcattccggtgtgtattgtttacttccaattaatttggtcaatttnaaaanaatttcaanntgtgccgccaaaaaantttntnccgttaaattaaaatg

SEQ ID NO: 9638 - DNA, 547 bp, Homo sapiens
  misc_feature (323)..(323): "n" may be a, t, c, g, other or unknown
  misc_feature (348)..(348): "n" may be a, t, c, g, other or unknown
  misc_feature (369)..(369): "n" may be a, t, c, g, other or unknown
  misc_feature (428)..(428): "n" may be a, t, c, g, other or unknown
  misc_feature (483)..(483): "n" may be a, t, c, g, other or unknown
  misc_feature (498)..(498): "n" may be a, t, c, g, other or unknown
  misc_feature (504)..(504): "n" may be a, t, c, g, other or unknown
  misc_feature (517)..(517): "n" may be a, t, c, g, other or unknown
  misc_feature (533)..(533): "n" may be a, t, c, g, other or unknown
  misc_feature (538)..(538): "n" may be a, t, c, g, other or unknown
  misc_feature (544)..(544): "n" may be a, t, c, g, other or unknown
aacaatacatgtgatttttatttagtgaacacagtatctgcaagaagctctgacagccatccaccctccaatcttacttcactttacaaccaagtatcaatagaggctgttccttcatgcgagctgtgggagtatatacatcattgaataacagacactccagaaatcaacagatgtacattatttacatattactatatttaccgcaaatagaaatattttctaagaaaaaaagtcaatttgtggtttctggtctaccacagacctaacttctcagcaaagcatatctatgtagatatctgcgtttgtaactttaaaaatangcattgctttctatgaagcactaantgctgctccatctataaatanctcctattttcagtttggtaccacattaaactgccccaaaatgttctgtgaccccaaanacacaaagttgctgcttatctgggtccagggtcagtacaattaaactcaaatatnaaccaggggggccancaaaanaggctggaaaggntgtggcatcccccccnccccngggggnccc

SEQ ID NO: 9639 - DNA, 553 bp, Homo sapiens
  misc_feature (118)..(118): "n" may be a, t, c, g, other or unknown
  misc_feature (139)..(139): "n" may be a, t, c, g, other or unknown
  misc_feature (142)..(142): "n" may be a, t, c, g, other or unknown
  misc_feature (276)..(276): "n" may be a, t, c, g, other or unknown
  misc_feature (313)..(313): "n" may be a, t, c, g, other or unknown
  misc_feature (346)..(346): "n" may be a, t, c, g, other or unknown
  misc_feature (354)..(354): "n" may be a, t, c, g, other or unknown
  misc_feature (373)..(373): "n" may be a, t, c, g, other or unknown
  misc_feature (398)..(398): "n" may be a, t, c, g, other or unknown
  misc_feature (411)..(411): "n" may be a, t, c, g, other or unknown
  misc_feature (431)..(431): "n" may be a, t, c, g, other or unknown
  misc_feature (444)..(444): "n" may be a, t, c, g, other or unknown
  misc_feature (456)..(456): "n" may be a, t, c, g, other or unknown
  misc_feature (492)..(492): "n" may be a, t, c, g, other or unknown
  misc_feature (500)..(500): "n" may be a, t, c, g, other or unknown
  misc_feature (512)..(512): "n" may be a, t, c, g, other or unknown
  misc_feature (526)..(526): "n" may be a, t, c, g, other or unknown
  misc_feature (549)..(549): "n" may be a, t, c, g, other or unknown
  misc_feature (553)..(553): "n" may be a, t, c, g, other or unknown
aaaaatacatacattttattacctattacagtatttactcttctacacacttctcagttcatgtatatacgggagctttcttacatcctgcatggatgcctgaggttccaccactaangagtcttgtccctaagtgaanaantcattaaagctgtttatgtaaagcctgtgtcttggagacagggtgttatctctttatcagtcacatgcattgggtatgaaatggccgattggattggctggcgtgcctgtcactccacactgccctgggaccanacagctttggtgaccgagctggagaggggctccacanctggactgaccctgagaaagctccacctcagancagcacangggaggagatgaggccccnctggtttccctggggccaggcctcntgtctaattgcanaaacagcctgagggacaganccatggaaaactnaagaaaaggcangcttgtccattccaacttccatctctgcctctgaancacatctnttgaatcagggngtgaaccaaaaccnctggaatttctccctgctctatncccn

SEQ ID NO: 9640 - DNA, 380 bp, Homo sapiens
  misc_feature (43)..(43): "n" may be a, t, c, g, other or unknown
  misc_feature (55)..(55): "n" may be a, t, c, g, other or unknown
  misc_feature (60)..(60): "n" may be a, t, c, g, other or unknown
  misc_feature (70)..(70): "n" may be a, t, c, g, other or unknown
  misc_feature (80)..(80): "n" may be a, t, c, g, other or unknown
  misc_feature (83)..(83): "n" may be a, t, c, g, other or unknown
  misc_feature (89)..(89): "n" may be a, t, c, g, other or unknown
  misc_feature (182)..(182): "n" may be a, t, c, g, other or unknown
  misc_feature (235)..(235): "n" may be a, t, c, g, other or unknown
  misc_feature (279)..(279): "n" may be a, t, c, g, other or unknown
  misc_feature (287)..(287): "n" may be a, t, c, g, other or unknown
  misc_feature (314)..(314): "n" may be a, t, c, g, other or unknown
  misc_feature (321)..(321): "n" may be a, t, c, g, other or unknown
  misc_feature (340)..(340): "n" may be a, t, c, g, other or unknown
  misc_feature (356)..(356): "n" may be a, t, c, g, other or unknown
  misc_feature (360)..(360): "n" may be a, t, c, g, other or unknown
  misc_feature (380)..(380): "n" may be a, t, c, g, other or unknown
aactgggaaagtataccaatttcactttattagcctaatttangaataagatgangaaancggggttgangtcacgcatnaangaaaanggtaaaaacttgtgatggttaagatcccttcagaactctggtgcagtccccaatcactgcagctttactgtcagtcagtggagctgcaatccnaaagacggaaaatcgactcctgttttccatttctgtgtccagtgactcttcanttacagtgtgatgaggtctaccaggttgcctttaggaggagtcntgctgtcnggaaagaaatttactaaggtgtctaanaactganttctttgagcataggtgtnatccacatcagaaaancccncagctgttaaatctgaaccn

SEQ ID NO: 9641 - DNA, 513 bp, Homo sapiens
  misc_feature (364)..(364): "n" may be a, t, c, g, other or unknown
  misc_feature (392)..(392): "n" may be a, t, c, g, other or unknown
  misc_feature (418)..(418): "n" may be a, t, c, g, other or unknown
  misc_feature (452)..(452): "n" may be a, t, c, g, other or unknown
  misc_feature (476)..(476): "n" may be a, t, c, g, other or unknown
  misc_feature (479)..(479): "n" may be a, t, c, g, other or unknown
  misc_feature (481)..(481): "n" may be a, t, c, g, other or unknown
  misc_feature (488)..(488): "n" may be a, t, c, g, other or unknown
  misc_feature (513)..(513): "n" may be a, t, c, g, other or unknown
cagttttaacattttattgtaattttatatacaaagaatgcttaacattaacagagcttagaacaacagcaacatttacagaaaactggattacagatgtttaacaactaatttgtttgaacccaaacattgttttacaaatacctgtagtttaaaaaaacaaaaaaaaaaaaccaatcccccaaaccgccccaactcctccccacaaagaaacaatggtaggaatagaccaaaaactcaaatatggtccttacagtacataagaataaaaacagtaaactataaacttctaagtgttaactctatactaaaccactttgcattagaaaaattataaaataggatggctttagtccactttatnttttaaaataatcaattttaatgcttantttccccaaaacaggagcttaaaaancaatttgttactaggacattttgtcgggatacantctaggggaaaggacataacaaanccnanaaacaanatagggacgcactaatggaaacccn

SEQ ID NO: 9642 - DNA, 519 bp, Homo sapiens
  misc_feature (213)..(213): "n" may be a, t, c, g, other or unknown
  misc_feature (242)..(242): "n" may be a, t, c, g, other or unknown
  misc_feature (334)..(334): "n" may be a, t, c, g, other or unknown
  misc_feature (366)..(366): "n" may be a, t, c, g, other or unknown
  misc_feature (378)..(378): "n" may be a, t, c, g, other or unknown
  misc_feature (443)..(443): "n" may be a, t, c, g, other or unknown
  misc_feature (462)..(462): "n" may be a, t, c, g, other or unknown
  misc_feature (466)..(466): "n" may be a, t, c, g, other or unknown
  misc_feature (471)..(471): "n" may be a, t, c, g, other or unknown
  misc_feature (497)..(497): "n" may be a, t, c, g, other or unknown
  misc_feature (501)..(501): "n" may be a, t, c, g, other or unknown
  misc_feature (507)..(507): "n" may be a, t, c, g, other or unknown
gagcaaggaagaagaaaggtttatttagccaaagagaatctgagaatcttgatactaagaattgctaattcatataatggcttagaatagttttacttcatactgtgatcaataatggattagctactttatccttatctaggacagattccaagcataggcagctacagtctgaaaagaattattataagctagaatttttctaagaaaaanatttgttctcaggaatacgaaaatagatncaaggaactgacccagacatgacaataagtctaacaaagttaacactagtaataatgtgtcagataaaaggtagaactgagctaaaaactcnaactttaaaaatgttcagcaaatcaatacccngaagttaaagantcttgaatgttctagttcattcttctctccattttaggtactctcttaatggcatttttatggtnagttgaattacctcagaanctgncgtgnccctcctggatgcccccggaaatccnaatngggaangacctctccccc

SEQ ID NO: 9643 - DNA, 535 bp, Homo sapiens
  misc_feature (78)..(78): "n" may be a, t, c, g, other or unknown
  misc_feature (343)..(343): "n" may be a, t, c, g, other or unknown
  misc_feature (390)..(390): "n" may be a, t, c, g, other or unknown
  misc_feature (443)..(443): "n" may be a, t, c, g, other or unknown
  misc_feature (469)..(469): "n" may be a, t, c, g, other or unknown
  misc_feature (501)..(501): "n" may be a, t, c, g, other or unknown
  misc_feature (507)..(507): "n" may be a, t, c, g, other or unknown
  misc_feature (515)..(515): "n" may be a, t, c, g, other or unknown
  misc_feature (522)..(522): "n" may be a, t, c, g, other or unknown
  misc_feature (526)..(526): "n" may be a, t, c, g, other or unknown
aggatgattcaactttatgatttttcaactttttgatggtataaaagcgatacataatcagtacaaaccatatacatnccaccatttttcagtacagtactcattacatgtgtcaacactttattataagataggttttatgttagatgataacaccagcatcttgctcaataaattgaagccagctttttcaacagagaacattattagaatgaaactagatgcaagaacaggaaagtaaacacctgtgtcatgttcaacaagactgaactacggagcaaagaatcacacagtgttgcaagatcttgaactgactagatgataggattaccaaaaccacacngctattgctggaaaattatgtcatgcagaagaacagactggcacgantacatatgtgggtttgtcctacacaaatcaaacctttaagtgaaacaagtctntccaaccatcttcccataaaacctantttctatgggaaaacaatcaattaagcctaancccccnccttttanatttttnttcntttataaaa

SEQ ID NO: 9644 - DNA, 597 bp, Homo sapiens
  misc_feature (13)..(13): "n" may be a, t, c, g, other or unknown
  misc_feature (100)..(100): "n" may be a, t, c, g, other or unknown
  misc_feature (122)..(122): "n" may be a, t, c, g, other or unknown
  misc_feature (232)..(232): "n" may be a, t, c, g, other or unknown
  misc_feature (373)..(373): "n" may be a, t, c, g, other or unknown
  misc_feature (433)..(433): "n" may be a, t, c, g, other or unknown
  misc_feature (450)..(450): "n" may be a, t, c, g, other or unknown
  misc_feature (455)..(455): "n" may be a, t, c, g, other or unknown
  misc_feature (527)..(527): "n" may be a, t, c, g, other or unknown
  misc_feature (533)..(533): "n" may be a, t, c, g, other or unknown
  misc_feature (546)..(546): "n" may be a, t, c, g, other or unknown
  misc_feature (567)..(567): "n" may be a, t, c, g, other or unknown
  misc_feature (569)..(569): "n" may be a, t, c, g, other or unknown
  misc_feature (593)..(593): "n" may be a, t, c, g, other or unknown
  misc_feature (597)..(597): "n" may be a, t, c, g, other or unknown
attggttaaaggnaatttattttgaaatgttgctttggttgtttgctttctggaaacatattgggaacacttgtttttcataagctgtcctgacagtggnacaatcccatccatcttcaggncttttaataaggtcattatgaaatctgaatttctattaatactctggtgcattcatttcatctgcaaaagcaactggcacaaccactccttgccggtgcagctctcgganaacatctaatattgagtctagttctgtgcggaacttctccagctcacgattctttaactgtgccagtcttttccatttttcaacttctttgttttgctcagtttctactacttggtgtgtttgctgtattatctgttgaanttcctgttctctttgtgcatgtctcatttccatctgcttaattttcttttctaacccacnaaattttccaccccggngtttnggtttccttgggctccccccaatcctccaaaaaatttggtaacccttccggtaaaaatccccccaaactccnaaaatncaaaaaaacctgnttaccccgccccccattaaantnaaattgggaaatttttaaaaattncccn

SEQ ID NO: 9645 - DNA, 557 bp, Homo sapiens
  misc_feature (110)..(110): "n" may be a, t, c, g, other or unknown
  misc_feature (168)..(168): "n" may be a, t, c, g, other or unknown
  misc_feature (203)..(203): "n" may be a, t, c, g, other or unknown
  misc_feature (206)..(206): "n" may be a, t, c, g, other or unknown
  misc_feature (323)..(323): "n" may be a, t, c, g, other or unknown
  misc_feature (422)..(422): "n" may be a, t, c, g, other or unknown
  misc_feature (431)..(431): "n" may be a, t, c, g, other or unknown
  misc_feature (466)..(466): "n" may be a, t, c, g, other or unknown
  misc_feature (477)..(477): "n" may be a, t, c, g, other or unknown
  misc_feature (506)..(506): "n" may be a, t, c, g, other or unknown
  misc_feature (513)..(513): "n" may be a, t, c, g, other or unknown
  misc_feature (525)..(525): "n" may be a, t, c, g, other or unknown
  misc_feature (551)..(551): "n" may be a, t, c, g, other or unknown
  misc_feature (556)..(556): "n" may be a, t, c, g, other or unknown
caaggccagtatgtttctttttttattatttttgtgtttgacttaaatggttgaaatgttttcatttttcatttataagcattacattaatttccatgcaaaaacccaanatcgcatatgtctgatttcaattggccaaaatccaacccttgagtttggacattcaanaccaaaatgaacacgttacttgccctttctatgantanacatcatgggtgtcctttgaaaaatcagcaggcctcctgacctcttaaacaccagcttgccatgagtccacaccaaaacagggagccaataccttccagcacctaatcaggcaagtnacttcactcatgaaaaacaggacacctctataccaaggctgccacccacagatatttcctgggtgctgctctataacaatacctgcttttgaacaaacntggtatctnctatttggggattataatttctcccgccagttttnctcaaaactcncaggaaaaattaaaaatttggcaaaaaancttaccnctttgacccccnaaaaaataattccaaaaacccccccnccccna

SEQ ID NO: 9646 - DNA, 459 bp, Homo sapiens
  misc_feature (11)..(11): "n" may be a, t, c, g, other or unknown
  misc_feature (24)..(24): "n" may be a, t, c, g, other or unknown
  misc_feature (57)..(57): "n" may be a, t, c, g, other or unknown
  misc_feature (151)..(151): "n" may be a, t, c, g, other or unknown
  misc_feature (280)..(280): "n" may be a, t, c, g, other or unknown
  misc_feature (282)..(282): "n" may be a, t, c, g, other or unknown
  misc_feature (287)..(287): "n" may be a, t, c, g, other or unknown
  misc_feature (334)..(334): "n" may be a, t, c, g, other or unknown
  misc_feature (362)..(362): "n" may be a, t, c, g, other or unknown
  misc_feature (377)..(377): "n" may be a, t, c, g, other or unknown
  misc_feature (410)..(410): "n" may be a, t, c, g, other or unknown
  misc_feature (416)..(416): "n" may be a, t, c, g, other or unknown
  misc_feature (444)..(444): "n" may be a, t, c, g, other or unknown
  misc_feature (455)..(456): "n" may be a, t, c, g, other or unknown
acaggctccanatgtgtttattangctatttaaataaaacatgtgaccatttctgtnggttaaaggacaaagaaaaattaccaacactttgggtctttcccgaattctctcccctttctctggtcaactccacccaccttcactctcaaangaaaagcacagggggaaagaaatgagtgagggggctcaaaaaaatctgtgtggctcctaccaccccaaacatattctggtttcccgaaaataaaaagcaaggcttgctctgatctttcccagttctcanantccancaggccgctgtgctggacacatacatggatccaccaacatacatcantccttctgtgttctctcctgcatggtanaagctggaacctaanaactatattcccccaaaattcccgcccacccangaattngctttaaattccctaatgaaaaggcctnctaaaaaaccnnaat

SEQ ID NO: 9647 - DNA, 508 bp, Homo sapiens
  misc_feature (23)..(23): "n" may be a, t, c, g, other or unknown
  misc_feature (43)..(43): "n" may be a, t, c, g, other or unknown
  misc_feature (50)..(50): "n" may be a, t, c, g, other or unknown
  misc_feature (130)..(130): "n" may be a, t, c, g, other or unknown
  misc_feature (168)..(168): "n" may be a, t, c, g, other or unknown
  misc_feature (234)..(234): "n" may be a, t, c, g, other or unknown
  misc_feature (278)..(278): "n" may be a, t, c, g, other or unknown
  misc_feature (318)..(318): "n" may be a, t, c, g, other or unknown
  misc_feature (321)..(321): "n" may be a, t, c, g, other or unknown
  misc_feature (361)..(361): "n" may be a, t, c, g, other or unknown
  misc_feature (375)..(375): "n" may be a, t, c, g, other or unknown
  misc_feature (419)..(419): "n" may be a, t, c, g, other or unknown
  misc_feature (430)..(430): "n" may be a, t, c, g, other or unknown
  misc_feature (467)..(467): "n" may be a, t, c, g, other or unknown
  misc_feature (475)..(475): "n" may be a, t, c, g, other or unknown
  misc_feature (481)..(481): "n" may be a, t, c, g, other or unknown
  misc_feature (502)..(502): "n" may be a, t, c, g, other or unknown
  misc_feature (507)..(507): "n" may be a, t, c, g, other or unknown
gccagtgcagaaacgtttaatanaaataaaaaggtctgcatanagccgangctcggagccacccctctgccgcacatccagtacagagaggattctataaagttcacactttttcattaagtagtaatanaaatacggtgaggccctgaaactggcctggtgagcgangaaaggccgctgggcgcttccactctgcaggccggggctgaaataacccgagttccgttctcacanaaaggtgcggctgccacctcttgacacaaaagccggatgggcangtttcctccatggccaagccgtatcagggtacaaccgcancantgcaaggggcttcctcaaggacaaatggctaaaaatgtcncggtgaaaatgtcntccccaaaaaattcgttctccctaaacccgtgggggcaacccanccttcaccgtnacactggccatctgcaaattccaactgttcttcctcnaacccttnattacnttcccttcctcccttttggtnctttng

SEQ ID NO: 9648 - DNA, 542 bp, Homo sapiens
  misc_feature (99)..(99): "n" may be a, t, c, g, other or unknown
  misc_feature (104)..(104): "n" may be a, t, c, g, other or unknown
  misc_feature (149)..(149): "n" may be a, t, c, g, other or unknown
  misc_feature (161)..(161): "n" may be a, t, c, g, other or unknown
  misc_feature (163)..(163): "n" may be a, t, c, g, other or unknown
  misc_feature (182)..(182): "n" may be a, t, c, g, other or unknown
  misc_feature (257)..(257): "n" may be a, t, c, g, other or unknown
  misc_feature (263)..(263): "n" may be a, t, c, g, other or unknown
  misc_feature (284)..(284): "n" may be a, t, c, g, other or unknown
  misc_feature (287)..(287): "n" may be a, t, c, g, other or unknown
  misc_feature (308)..(308): "n" may be a, t, c, g, other or unknown
  misc_feature (401)..(401): "n" may be a, t, c, g, other or unknown
  misc_feature (411)..(411): "n" may be a, t, c, g, other or unknown
  misc_feature (436)..(436): "n" may be a, t, c, g, other or unknown
  misc_feature (458)..(458): "n" may be a, t, c, g, other or unknown
  misc_feature (493)..(493): "n" may be a, t, c, g, other or unknown
  misc_feature (503)..(504): "n" may be a, t, c, g, other or unknown
  misc_feature (518)..(518): "n" may be a, t, c, g, other or unknown
  misc_feature (526)..(526): "n" may be a, t, c, g, other or unknown
  misc_feature (539)..(539): "n" may be a, t, c, g, other or unknown
ggcaaaaagaaacatctaataatgagggggaaagggcagaaaggtgcaatccaggcaggcaggttgagggcaggacatgccgccttctagggtctccanaaaanctgtgtcaacggaagacgtgggccggggaaggcccaaggctgcancacatctacacnangggtcagcaaaacttccancggtttccacactcgttgcaaacaacaaaggtggtcatgggctcatcaaaactgcgggtctgcacctgtgtgtangtgcanttctttttcctgcacttgccncangtgaacaagtctgtctgcgtnccgccagtgcgggccatctggtgctctcggatggcctccttggtcatggccttacggatctccttcaactcatcactggccatctcctctgangtcatcacancaatctgctggggttttatggcccncacaacacattccccccccagntcagggttccttggcatccctccaggtttggaaanacaaaccctnncccggtcctaaacntccctttnttttttcccactnccc

SEQ ID NO: 9649 - DNA, 604 bp, Homo sapiens
  misc_feature (151)..(151): "n" may be a, t, c, g, other or unknown
  misc_feature (202)..(202): "n" may be a, t, c, g, other or unknown
  misc_feature (353)..(353): "n" may be a, t, c, g, other or unknown
  misc_feature (375)..(375): "n" may be a, t, c, g, other or unknown
  misc_feature (471)..(471): "n" may be a, t, c, g, other or unknown
  misc_feature (512)..(512): "n" may be a, t, c, g, other or unknown
  misc_feature (520)..(520): "n" may be a, t, c, g, other or unknown
  misc_feature (525)..(525): "n" may be a, t, c, g, other or unknown
  misc_feature (544)..(544): "n" may be a, t, c, g, other or unknown
  misc_feature (564)..(564): "n" may be a, t, c, g, other or unknown
  misc_feature (598)..(598): "n" may be a, t, c, g, other or unknown
  misc_feature (602)..(602): "n" may be a, t, c, g, other or unknown
aactttattattattatactttaaattttagggtacatgtgcacaacgtgcaggagtgattttatttttatatggaatccaagtttcagtttcatcacattcaggtcagtgtggctcaggacaaagccagcatgttttgctggaggcaganattatggtactaagtgtaagccccctgggacttagccgacttctctggganaaatgtgggctttctcacgcaatggtgcatgtcatgctgcgtctaaggaactccattcacatcgaagtctatgtgaatggccttctttagaggtatattaggtacaacctgagcaactgaatgtgacagccctggaactcaggcattaaangacatttcgcctcaatctgaangaatggggagatctcccttcttcaccctcctagctaatattctggtgcacgttatatttatatatatttataaacctctatgtctaaggttctaangtcctaagggttctatgatcctacagttctctgactccaanaacctaanaattntatccggttctataattcnatggcaccaaaaacccccanctaatgctatcctgcctgctatacctcccaggcntgtncc

SEQ ID NO: 9650 - DNA, 603 bp, Homo sapiens
  misc_feature (111)..(111): "n" may be a, t, c, g, other or unknown
  misc_feature (113)..(113): "n" may be a, t, c, g, other or unknown
  misc_feature (248)..(248): "n" may be a, t, c, g, other or unknown
  misc_feature (366)..(366): "n" may be a, t, c, g, other or unknown
  misc_feature (393)..(393): "n" may be a, t, c, g, other or unknown
  misc_feature (440)..(440): "n" may be a, t, c, g, other or unknown
  misc_feature (463)..(463): "n" may be a, t, c, g, other or unknown
  misc_feature (486)..(486): "n" may be a, t, c, g, other or unknown
  misc_feature (495)..(495): "n" may be a, t, c, g, other or unknown
  misc_feature (531)..(531): "n" may be a, t, c, g, other or unknown
  misc_feature (561)..(561): "n" may be a, t, c, g, other or unknown
  misc_feature (573)..(573): "n" may be a, t, c, g, other or unknown
  misc_feature (589)..(589): "n" may be a, t, c, g, other or unknown
  misc_feature (594)..(594): "n" may be a, t, c, g, other or unknown
gccaagagggaaaaaatacttcatttgctagattacccaaatgtgtagcttcatttaattaccaaggtaagaatcatccccaaccacttttcagctgagaacacttgccananaatgtctctggatgggaatagatgtggtaccagctaggccactggactacccgagttcagctgccaggaaatcagagccacctcaaatattgggcatgctctgattcagcagtggcagtgccctataactttcanatgattatctccatgtgctatgttaaccaaaataggcaaattatttacgaaaccatttttttctgttaagcaaaataaatatatacaattcaagattcttttctcttctaaaaaggtncagatagtgtgagctgaacatcagtangaaaattatttcagaatctggatgtttaataaataaacattattgtntatcatgttttccaagttctaanaaaaccggaacccccaaacatanaatttgatngggttaaaaatgaatggttaaaattctgggaaattnaatgtttgaaattgaaaaaaaaatccccanccccaattgatnccatcttggagggctnaaccnttttaaccc

SEQ ID NO: 9651 - DNA, 605 bp, Homo sapiens
  misc_feature (14)..(14): "n" may be a, t, c, g, other or unknown
  misc_feature (256)..(256): "n" may be a, t, c, g, other or unknown
  misc_feature (392)..(392): "n" may be a, t, c, g, other or unknown
  misc_feature (400)..(400): "n" may be a, t, c, g, other or unknown
  misc_feature (410)..(410): "n" may be a, t, c, g, other or unknown
  misc_feature (450)..(450): "n" may be a, t, c, g, other or unknown
  misc_feature (541)..(541): "n" may be a, t, c, g, other or unknown
  misc_feature (553)..(553): "n" may be a, t, c, g, other or unknown
  misc_feature (564)..(564): "n" may be a, t, c, g, other or unknown
  misc_feature (593)..(593): "n" may be a, t, c, g, other or unknown
  misc_feature (603)..(603): "n" may be a, t, c, g, other or unknown
catgtttccactanaaactttactacttgattatcttaaaaagtcatgttgtaccatcacccaatcctgtttaaaacagcactcaggccgtttatgtagctgatcttggattagcccttgttgcacagggatgatttaccactggattccttggaatccgctttcgacggtctctgaatgctgcacctgattgtagggcttctagaaaattatccatcacaccagtctcatcaccctctttgtttatatcaatganttgtttctttttcttctggcgttctaacttttcttgttcagctttctcttttgcaagttttgccctcctggtcttctcttccatttctcttctcttattgttttctctcactgcttccaaaaacaaagttcggaanttgttganatcaccaaanaactcttctatgctcactgtctttgaatcaaaaatgaaantattctccaagatctcataaaacttcatcatgttgttgtgcatggtggaaaaattttccatactgttcctcgggcatctttgttaaactgntctcttttcccnaacttatcgtnttgaatttctgcctgggggaaatcctganttcctttccnaa

SEQ ID NO: 9652 - DNA, 497 bp, Homo sapiens
  misc_feature (64)..(64): "n" may be a, t, c, g, other or unknown
  misc_feature (168)..(168): "n" may be a, t, c, g, other or unknown
  misc_feature (171)..(171): "n" may be a, t, c, g, other or unknown
  misc_feature (177)..(177): "n" may be a, t, c, g, other or unknown
  misc_feature (237)..(237): "n" may be a, t, c, g, other or unknown
  misc_feature (294)..(294): "n" may be a, t, c, g, other or unknown
  misc_feature (381)..(381): "n" may be a, t, c, g, other or unknown
  misc_feature (405)..(405): "n" may be a, t, c, g, other or unknown
  misc_feature (412)..(412): "n" may be a, t, c, g, other or unknown
  misc_feature (415)..(415): "n" may be a, t, c, g, other or unknown
  misc_feature (465)..(465): "n" may be a, t, c, g, other or unknown
  misc_feature (471)..(471): "n" may be a, t, c, g, other or unknown
  misc_feature (483)..(483): "n" may be a, t, c, g, other or unknown
  misc_feature (486)..(486): "n" may be a, t, c, g, other or unknown
gagggtaaaatcacacagccagtgcttttaattcaaaacgaaaaatatgtcatccaggctagantgctcacattcatctgacagcaacttctctccctgcaaataaaggaaagctgtgatgactttatctccgaagcctgcctggtgggaacgggcttggcacaaaanganctgcanaatcctgctgctgattggcagatgcatttctgaactcagcgggggctggacactgagcangaccttgttgataatactgcctaagtgggcacaaagccaggggctgtggcctgccancatgcaggcacagctcctccaccctcaggggagtctgagaccccttttgtgtttcgatgactgtgggattttttttttttttttganatggaatctcactctgttgcccangctgganttnaattgccactctcgctcactgcaaaatctgccccccagttccaattaatncccctnaatccccccctnacnactaggaatac

SEQ ID NO: 9653 - DNA, 538 bp, Homo sapiens
  misc_feature (173)..(173): "n" may be a, t, c, g, other or unknown
  misc_feature (240)..(240): "n" may be a, t, c, g, other or unknown
  misc_feature (419)..(419): "n" may be a, t, c, g, other or unknown
  misc_feature (461)..(461): "n" may be a, t, c, g, other or unknown
  misc_feature (476)..(476): "n" may be a, t, c, g, other or unknown
  misc_feature (482)..(482): "n" may be a, t, c, g, other or unknown
  misc_feature (496)..(496): "n" may be a, t, c, g, other or unknown
  misc_feature (506)..(506): "n" may be a, t, c, g, other or unknown
  misc_feature (517)..(517): "n" may be a, t, c, g, other or unknown
  misc_feature (538)..(538): "n" may be a, t, c, g, other or unknown
gagacagggtctccctctgttgcccagttaggaatgcagtggtgtaatcacagctcactgaagccttgaattcctgggcctcaagcaatcctcccactttagcctcctgagtagctgggactacaaccacgcaccaccatgcctgcctaatttccacttttatttttgtaganatggggtcttcctgtgttgccctggcttgtctcaaactcctaggctcaagaaatccttccacctcanactcccaaagtgctggattataggcgtgagccactgtacccagccagtttcttaaattgatatataataatatgtattttagaatgcatttagattcttgcttatttgctgaaattgaaatgctataaagaatgaaattcctaaccatctggaaaagaaatattctatgaaaagcatancaatggccaattaaaatgggccaacttggttatggaaatttnccatggcaagggttnaaattnttttttaacaaacnaactttattnacccctgaaantttaattggacggttaatcan

SEQ ID NO: 9654 - DNA, 563 bp, Homo sapiens
  misc_feature (61)..(61): "n" may be a, t, c, g, other or unknown
  misc_feature (77)..(77): "n" may be a, t, c, g, other or unknown
  misc_feature (407)..(407): "n" may be a, t, c, g, other or unknown
  misc_feature (435)..(435): "n" may be a, t, c, g, other or unknown
  misc_feature (513)..(513): "n" may be a, t, c, g, other or unknown
  misc_feature (534)..(534): "n" may be a, t, c, g, other or unknown
  misc_feature (539)..(539): "n" may be a, t, c, g, other or unknown
  misc_feature (551)..(552): "n" may be a, t, c, g, other or unknown
  misc_feature (556)..(557): "n" may be a, t, c, g, other or unknown
gcagaagaacagtttttaatttttttaatgtatctatttaatgggaataagttgatcatanatttgtaaaccaaaangtaattcctcaagtatttggaaataaggaaaagcctccctaccaccaaccttttggtcatctttctcattctcttacaatcatcctaatcccctagtacacccttaccatatatcaataagggcaccataatattatgcaaagaacagatatatatgcctgatctcttattagacttgcaccagagactgttgaaccactccaggcatgaactccaaagctgaggcacactgaccaagcccctgggcatctacagaagcaaaggcgttctcgctccagctggctgctccttctggaagagccctttaatctgggttaatcggccatagancctctctctcaatggaagaatgtggtanctaaggtccaaaatgtttgtcctccgcgctctctctcttgcttccataacttgttttggttggggagggaaaaaaggncccccctctccctccaaatcnttacnttttccccttannccanntgcccc

SEQ ID NO: 9655 - DNA, 574 bp, Homo sapiens
  misc_feature (9)..(9): "n" may be a, t, c, g, other or unknown
  misc_feature (34)..(34): "n" may be a, t, c, g, other or unknown
  misc_feature (137)..(137): "n" may be a, t, c, g, other or unknown
  misc_feature (139)..(139): "n" may be a, t, c, g, other or unknown
  misc_feature (158)..(158): "n" may be a, t, c, g, other or unknown
  misc_feature (170)..(170): "n" may be a, t, c, g, other or unknown
  misc_feature (453)..(453): "n" may be a, t, c, g, other or unknown
  misc_feature (495)..(495): "n" may be a, t, c, g, other or unknown
  misc_feature (500)..(500): "n" may be a, t, c, g, other or unknown
  misc_feature (503)..(503): "n" may be a, t, c, g, other or unknown
  misc_feature (523)..(523): "n" may be a, t, c, g, other or unknown
  misc_feature (530)..(530): "n" may be a, t, c, g, other or unknown
  misc_feature (540)..(540): "n" may be a, t, c, g, other or unknown
  misc_feature (567)..(567): "n" may be a, t, c, g, other or unknown
gagacggantctcactctgttgcccaggctggantgcaatggcgcgatctcggctcactgcaagctccgcctcccaggttcacgccattctcctgcctcagcctcctgagtagctgggacttcaggcgcccgccacnangcccggctaattttttgtntttttagtgganacagggtttcaccgtgttagccaggatggtcttgatctcctgacctcatgatccacctgcctcggcctcccaaagtgctgggattacaggcgtgcgccaccgtgcctggcccaccatgaactacattttcaaatccaggtatatgtgggctctaaaaccacaaattagccaaaataaaacagttcttcaatagcaactaaaaactatctttaaataagaaattataacttttctctgatttattgcaatataaaaaatcctctggaactaatttttaccctcncttaatatttctggtgaaaatatttttaactgttaccaattnattgnaanttttttgaataattcccttncgttaancccccccaanaaatgccaccttccccaaaaattcccntaccccg

SEQ ID NO: 9656 - DNA, 474 bp, Homo sapiens
  misc_feature (113)..(113): "n" may be a, t, c, g, other or unknown
  misc_feature (190)..(190): "n" may be a, t, c, g, other or unknown
  misc_feature (226)..(226): "n" may be a, t, c, g, other or unknown
  misc_feature (288)..(288): "n" may be a, t, c, g, other or unknown
  misc_feature (293)..(293): "n" may be a, t, c, g, other or unknown
  misc_feature (314)..(314): "n" may be a, t, c, g, other or unknown
  misc_feature (317)..(317): "n" may be a, t, c, g, other or unknown
  misc_feature (329)..(329): "n" may be a, t, c, g, other or unknown
  misc_feature (369)..(369): "n" may be a, t, c, g, other or unknown
  misc_feature (393)..(393): "n" may be a, t, c, g, other or unknown
  misc_feature (397)..(397): "n" may be a, t, c, g, other or unknown
  misc_feature (409)..(409): "n" may be a, t, c, g, other or unknown
  misc_feature (441)..(441): "n" may be a, t, c, g, other or unknown
  misc_feature (443)..(443): "n" may be a, t, c, g, other or unknown
  misc_feature (454)..(454): "n" may be a, t, c, g, other or unknown
  misc_feature (469)..(469): "n" may be a, t, c, g, other or unknown
gtttgtattgttttctgctagttattaaattgcagtgaatgacatttgtgtaaaatatctatagtcccagcttgagctcattcaatcaacagcaacaacataagctaatgtanaccgagttcttttgtgccaggtactattcttatgctgaacttacctcatttcattccatcccatcaacagccttgtnaagtaagaaaaatgaaacttgctcagcaagaatgtnaaaccaggctgtcaagctccagggcccaagcatttaaccaccattccgtgctgccaacctantgtcnatttcatttccagcacaagtnatncaatctgaaaanccacttgcttggaacaatgttgctttccttcttcaacacnaattaccccccaagaataatgacnttcnaccccatttctnttaaaaaggaaacaggacaattggtgggtccncnctgtggggganatcaatgctactttntacct

SEQ ID NO: 9657 - DNA, 586 bp, Homo sapiens
  misc_feature (93)..(93): "n" may be a, t, c, g, other or unknown
  misc_feature (110)..(110): "n" may be a, t, c, g, other or unknown
  misc_feature (112)..(112): "n" may be a, t, c, g, other or unknown
  misc_feature (141)..(141): "n" may be a, t, c, g, other or unknown
  misc_feature (175)..(175): "n" may be a, t, c, g, other or unknown
  misc_feature (289)..(289): "n" may be a, t, c, g, other or unknown
  misc_feature (311)..(311): "n" may be a, t, c, g, other or unknown
  misc_feature (335)..(335): "n" may be a, t, c, g, other or unknown
  misc_feature (351)..(351): "n" may be a, t, c, g, other or unknown
  misc_feature (396)..(396): "n" may be a, t, c, g, other or unknown
  misc_feature (407)..(407): "n" may be a, t, c, g, other or unknown
  misc_feature (467)..(467): "n" may be a, t, c, g, other or unknown
  misc_feature (481)..(481): "n" may be a, t, c, g, other or unknown
  misc_feature (535)..(535): "n" may be a, t, c, g, other or unknown
  misc_feature (538)..(538): "n" may be a, t, c, g, other or unknown
  misc_feature (558)..(558): "n" may be a, t, c, g, other or unknown
  misc_feature (562)..(562): "n" may be a, t, c, g, other or unknown
  misc_feature (582)..(582): "n" may be a, t, c, g, other or unknown
  misc_feature (585)..(586): "n" may be a, t, c, g, other or unknown
gaccaactaaatggcataggtaagcatggctgtggccacccatacacatacacacacctcatatttagagtgtgaatatctatcattgcatanattccaccacgtggaananctctatgcctgtgggtgtatataccctanagatcagaatggatggttttccagaattaatganactttgaatgatgcagatgttggcctttccccaaaataaaaggtttttaaattaatagagcaacaggatgcaaatactgggcaaattataagaaatcataaagttgaatctcanaaagcatatgttcagttttgtnactgaaggctgttgaaaatttctnctctctctctttgaanaatgaaatgcaaatgccttttagcaatggcagcattcaaatcccncaaaaaatcangcaggggccccttaaggaatactccattggccaaactgtaaaacctgctggggttaattnaaattgaacaaatnctcacaattcttcccctctcaaatttccgaaactggatttggaaggtccgatanccnccctttccggaatgcccggncccnggggtttaaagatttggacnccnn

SEQ ID NO: 9658 - DNA, 621 bp, Homo sapiens
  misc_feature (100)..(100): "n" may be a, t, c, g, other or unknown
  misc_feature (142)..(142): "n" may be a, t, c, g, other or unknown
  misc_feature (147)..(147): "n" may be a, t, c, g, other or unknown
  misc_feature (149)..(149): "n" may be a, t, c, g, other or unknown
  misc_feature (280)..(280): "n" may be a, t, c, g, other or unknown
  misc_feature (287)..(287): "n" may be a, t, c, g, other or unknown
  misc_feature (289)..(289): "n" may be a, t, c, g, other or unknown
  misc_feature (326)..(326): "n" may be a, t, c, g, other or unknown
  misc_feature (386)..(386): "n" may be a, t, c, g, other or unknown
  misc_feature (437)..(437): "n" may be a, t, c, g, other or unknown
  misc_feature (455)..(455): "n" may be a, t, c, g, other or unknown
  misc_feature (489)..(489): "n" may be a, t, c, g, other or unknown
  misc_feature (497)..(497): "n" may be a, t, c, g, other or unknown
  misc_feature (506)..(506): "n" may be a, t, c, g, other or unknown
  misc_feature (544)..(544): "n" may be a, t, c, g, other or unknown
  misc_feature (548)..(548): "n" may be a, t, c, g, other or unknown
  misc_feature (586)..(586): "n" may be a, t, c, g, other or unknown
  misc_feature (605)..(605): "n" may be a, t, c, g, other or unknown
  misc_feature (621)..(621): "n" may be a, t, c, g, other or unknown
cctactctggagtcctatgccccagtccgagtatttgccgttgttatgtctgccaatcatgtttgaaactattcctaaccctaggagcatgggaagtgcntagtacaacatgtatttccaacactgaatttgtccatctcanaacananccccattagtaccctggagggtccccaagctgctggtccggggcgtggcagtcacagtggaggaggaggggacagactggagcacagctggatccacgatgcaaacctttggccccacagaagggttaacntgcccanangacacacagcaaggtgccccgtcactgctgctcgganatcttcttggccacagcacctgccctctgtcccattcaattcaattcctccgcaacctcnaggagaaacagctgagctagaagcagacctccatcctgctctgcatctcanggacagatgaagtgggancgcaggaacccttaaaaaacgggccccaagtaanaatcaaantgctttacnaacaaatctgggcctttgttaaaaactttgggttgcangatnttttaactaccaaaaaactattgctccccccccaaggngaacccaaccctaaacttntcccccaaaaaaaatn

SEQ ID NO: 9659 - DNA, 367 bp, Homo sapiens
  misc_feature (5)..(5): "n" may be a, t, c, g, other or unknown
  misc_feature (58)..(58): "n" may be a, t, c, g, other or unknown
  misc_feature (67)..(67): "n" may be a, t, c, g, other or unknown
  misc_feature (107)..(107): "n" may be a, t, c, g, other or unknown
  misc_feature (117)..(117): "n" may be a, t, c, g, other or unknown
  misc_feature (121)..(121): "n" may be a, t, c, g, other or unknown
  misc_feature (129)..(129): "n" may be a, t, c, g, other or unknown
  misc_feature (163)..(163): "n" may be a, t, c, g, other or unknown
  misc_feature (182)..(182): "n" may be a, t, c, g, other or unknown
  misc_feature (210)..(210): "n" may be a, t, c, g, other or unknown
  misc_feature (271)..(271): "n" may be a, t, c, g, other or unknown
  misc_feature (297)..(297): "n" may be a, t, c, g, other or unknown
  misc_feature (329)..(329): "n" may be a, t, c, g, other or unknown
  misc_feature (336)..(336): "n" may be a, t, c, g, other or unknown
  misc_feature (346)..(346): "n" may be a, t, c, g, other or unknown
  misc_feature (350)..(350): "n" may be a, t, c, g, other or unknown
  misc_feature (353)..(353): "n" may be a, t, c, g, other or unknown
acgcnagttagcaatttattatgataactctgcaatcttttcagccactctttaaggntcctggtcntccattctgggcacagtgtgacatttacctgaacagaaangaaaatggcnctanaaaatganggaaatttgggtgcctaaaaattactacaaacangcaggggcgcaatggctcncgcatgttatcccacactttgggaagcnaagtgggtgcatcaccaagtcaggagtttgagatctgcctggccaacatggtgaaaccccntctctactaaaaatacaaaacattanctgggtgtggtggcaggcacctgtaatcccanctactcnggaggctgangcanganaattgcttgaactc

SEQ ID NO: 9660 - DNA, 489 bp, Homo sapiens
  misc_feature (395)..(395): "n" may be a, t, c, g, other or unknown
  misc_feature (403)..(403): "n" may be a, t, c, g, other or unknown
  misc_feature (418)..(418): "n" may be a, t, c, g, other or unknown
  misc_feature (420)..(420): "n" may be a, t, c, g, other or unknown
  misc_feature (439)..(439): "n" may be a, t, c, g, other or unknown
  misc_feature (447)..(447): "n" may be a, t, c, g, other or unknown
  misc_feature (471)..(471): "n" may be a, t, c, g, other or unknown
aaagaagttatagcacagtttattaagctagaaatgaattttaacagccctgtctcagtctgaatgaggcaaatttaggcccacatcattaggtatttcacaacttaacacctaaaatttaacataaatttacaaaaataaggcttattttaaagtcatctggagaaactgttttacaggtatcttaactttatttagctctctgtagaattaacatctttgcaaatatattattcaaccaagcatttgccataaagataagcatcaactttcccattggacaagtgatagtgttcaagctacttgacttgtgaaaaacaaaaaaccaccatgacttctcaacaaatacattttaaaatgaaatatgctcaggctgataaacaaacaaaatattnaaatgganactgacattgaactncntagtcccttgaaaaacccnaaaaacantgccctataaaatgatattttatnggctttacaaaaacatac

SEQ ID NO: 9661 - DNA, 534 bp, Homo sapiens
  misc_feature (178)..(178): "n" may be a, t, c, g, other or unknown
  misc_feature (208)..(208): "n" may be a, t, c, g, other or unknown
  misc_feature (282)..(282): "n" may be a, t, c, g, other or unknown
  misc_feature (301)..(301): "n" may be a, t, c, g, other or unknown
  misc_feature (313)..(313): "n" may be a, t, c, g, other or unknown
  misc_feature (345)..(345): "n" may be a, t, c, g, other or unknown
  misc_feature (391)..(391): "n" may be a, t, c, g, other or unknown
  misc_feature (395)..(395): "n" may be a, t, c, g, other or unknown
  misc_feature (402)..(402): "n" may be a, t, c, g, other or unknown
  misc_feature (441)..(441): "n" may be a, t, c, g, other or unknown
  misc_feature (445)..(445): "n" may be a, t, c, g, other or unknown
  misc_feature (474)..(474): "n" may be a, t, c, g, other or unknown
  misc_feature (482)..(482): "n" may be a, t, c, g, other or unknown
  misc_feature (500)..(500): "n" may be a, t, c, g, other or unknown
  misc_feature (505)..(505): "n" may be a, t, c, g, other or unknown
  misc_feature (523)..(523): "n" may be a, t, c, g, other or unknown
gtttttaaccttaactttttttataatacatacatacataaaaactgcacaaagtatgtgtcaacaaaatacagtctttaaaacttaaatatcatttaaacagacttaattgcatacattttatatacgcacaaagtcaggatttttacatggcagggaaatactgtggaatgatgangtctgcaggagacagatgctatcaaatgangactctggggtggtattttctaaaaatggggttctgaaataaatttttattgtatgtagcttattttacttctnagaaggaacaaaagatacntttgggcagccnaagtatttctacttcctgcttaaaacatttcnggcgaatgaaatgattataataattaggtaagccaccctattaatncccncggtctncagtttcttatctttctaaatacctaaaaaatttattcnttcntttctcccctacccccccctgcctttctnaaattatnttttgacattttataatntttgnaaaataaccaaaaatttnttttaaaaaaa

SEQ ID NO: 9662 - DNA, 481 bp, Homo sapiens
  misc_feature (316)..(316): "n" may be a, t, c, g, other or unknown
  misc_feature (406)..(406): "n" may be a, t, c, g, other or unknown
  misc_feature (444)..(444): "n" may be a, t, c, g, other or unknown
  misc_feature (453)..(453): "n" may be a, t, c, g, other or unknown
  misc_feature (455)..(455): "n" may be a, t, c, g, other or unknown
  misc_feature (457)..(457): "n" may be a, t, c, g, other or unknown
  misc_feature (466)..(466): "n" may be a, t, c, g, other or unknown
  misc_feature (477)..(477): "n" may be a, t, c, g, other or unknown
aagattttcaaaatatttttatatagaaattttttacaaagattttacaacatagcaaatcattatgtcatactgtagaaagatgaagcaaaggattaaactccaaggataaagaaagtgctcatagcaacgtattgcagtctccatgaaagtgcatataaacggttaaggcaaagtaccatcttggtacagacatgttgcaaactgacttttaaaacaattttttaaaatatatacaaactttttttcttctattcttctcaaaggcatttgaaagggatacttttatgaatattcttgctgtagaacaatgtanaaataacttctgggtataaaacagtaaaaataaaaatattctacctgagtgtgttaaatcaagtgatttgtaaaacaaaacctccacaantgtgggctttctacatgttacttgccaggctgaaaggnttacccccncntnttctcaacncaaatccctantgaa

SEQ ID NO: 9663 - DNA, 504 bp, Homo sapiens
  misc_feature (486)..(486): "n" may be a, t, c, g, other or unknown
  misc_feature (488)..(488): "n" may be a, t, c, g, other or unknown
  misc_feature (492)..(493): "n" may be a, t, c, g, other or unknown
  misc_feature (495)..(495): "n" may be a, t, c, g, other or unknown
  misc_feature (497)..(497): "n" may be a, t, c, g, other or unknown
  misc_feature (501)..(501): "n" may be a, t, c, g, other or unknown
ggaaatgtgcttttattttcaaactcaggtatgtgacactctacagttcaatgctagcacacctgtgtgaggcttaacaacatgaggaactgatagccagtgatacacaaatccagcacttcctctccatttactctgtcaggctgtatatggggagcaacacatatggctttgtggcagccagaaagtgaaggtctttttaggaggtgacatcaacaatgacacaaacacatcactctgcaactgaaggcagggaaccagactcctagggctaagcagagatgtcagacttcagaggcatttgggggactcttcagatccacatcctcactgaaaatccagggcctgtttctctccagttcactaccgcttgggcagcagctcccactgcttcaggctggtctttgctttccagaaaagatggactcatgagcactttttcagcccctgtatatatggctattcttatgctcccttttggagatntntttnncncnaacnccc

SEQ ID NO: 9664 - DNA, 594 bp, Homo sapiens
  misc_feature (529)..(529): "n" may be a, t, c, g, other or unknown
  misc_feature (554)..(554): "n" may be a, t, c, g, other or unknown
  misc_feature (566)..(566): "n" may be a, t, c, g, other or unknown
  misc_feature (583)..(583): "n" may be a, t, c, g, other or unknown
  misc_feature (589)..(589): "n" may be a, t, c, g, other or unknown
  misc_feature (592)..(592): "n" may be a, t, c, g, other or unknown
  misc_feature (594)..(594): "n" may be a, t, c, g, other or unknown
agcattaatacatttgtcatttattaaataatggcaaaccatagcatcataaagtattaagactgaagggctactaacctacctattcattttaaagatgaggaaacaaatgccagagacagtaataacttgtcaggagtttccagaattcaattctccttttttagattaataaattagaccagatttcttccccatggttactgtctgaggagattaactaatatgcgatacatgatgtcttgggttctttcatgtttaattcagtttgttgtgatttctaaaaatgtatctctttaaaacaattgctgctgtgcaacagtgtgatggcaagggaacagaaaacaacaaaaaaacttgattgaatacttcaatcaaagtgcttcttttttatgtgaggataaatcatactgaattaaggggaaatttaagaatattttttaagaaataacaatttcaggtaggcaattgtgaggaaaataacaatcatacagccaaggccacttaatcctccccaacccccagggtnaaaaatcaagcccgccttaccaatntcccccccgttnttttgccttatttacangaatgnttncn

SEQ ID NO: 9665 - DNA, 587 bp, Homo sapiens
  misc_feature (77)..(77): "n" may be a, t, c, g, other or unknown
  misc_feature (97)..(97): "n" may be a, t, c, g, other or unknown
  misc_feature (226)..(226): "n" may be a, t, c, g, other or unknown
  misc_feature (307)..(307): "n" may be a, t, c, g, other or unknown
  misc_feature (489)..(489): "n" may be a, t, c, g, other or unknown
  misc_feature (516)..(516): "n" may be a, t, c, g, other or unknown
  misc_feature (551)..(551): "n" may be a, t, c, g, other or unknown
  misc_feature (568)..(568): "n" may be a, t, c, g, other or unknown
  misc_feature (574)..(575): "n" may be a, t, c, g, other or unknown
  misc_feature (587)..(587): "n" may be a, t, c, g, other or unknown
agtaattcttatggtattgctgggtctctcaggaatatgtatcatttgattttgagcatgtggggttaaggtattanattactaccacaaaccgtanacccctgcatggcaccacatttattttcaggagtagatgttacatggcaggtatcaaaatgtgatgatcaattctgtgttttctgttgattaaacctcctcatttggttaaatagccagtgtataccanaaagttctacacaggtcaaaattatatcacttttagagcagcaatacgtgatccaaggttttcttgaaggtagtgcaaaanatgcagttcataatgttctcccgattcaggaactcttatgctgtgtctctcctgaggatagatctgtaaatcatatggctttccagccctcactaaaaaactcagtaatatactggtatgtgcaaaatggacattctcatccaggaaaaccatgttaagaaacagtaaacaatttggttcanaagggaacttttctgcttgcatggccncaaatcctaattaataaccctgttcattctggtcngggtaacccaaaaaaanttccgnnttcccgtttccn

SEQ ID NO: 9666 - DNA, 492 bp, Homo sapiens
  misc_feature (169)..(169): "n" may be a, t, c, g, other or unknown
  misc_feature (260)..(260): "n" may be a, t, c, g, other or unknown
  misc_feature (316)..(316): "n" may be a, t, c, g, other or unknown
  misc_feature (338)..(338): "n" may be a, t, c, g, other or unknown
  misc_feature (363)..(363): "n" may be a, t, c, g, other or unknown
  misc_feature (367)..(367): "n" may be a, t, c, g, other or unknown
  misc_feature (372)..(372): "n" may be a, t, c, g, other or unknown
  misc_feature (395)..(395): "n" may be a, t, c, g, other or unknown
  misc_feature (420)..(420): "n" may be a, t, c, g, other or unknown
  misc_feature (430)..(430): "n" may be a, t, c, g, other or unknown
  misc_feature (459)..(459): "n" may be a, t, c, g, other or unknown
  misc_feature (478)..(478): "n" may be a, t, c, g, other or unknown
  misc_feature (482)..(482): "n" may be a, t, c, g, other or unknown
  misc_feature (488)..(488): "n" may be a, t, c, g, other or unknown
gagatggagtcttgctgtgtcacccacactggagtgcagtggcgtgatctttgcttactgcagcctctgcctcaaaggttcaggtgactctcctgcctcagcctcctgagtagctagaattacaggtgcccgccaccacacccagccaatttttgtatttttagtaaanacagcgttttgccatgttggccaggctggtcttgaactcctgacctcaggtgatctgcccaccttgacctcccaaagtgttgggattacangccaccgtgtccggccaactttttccttctttacacgttctgcccacaaaaaaaantgtaacatattgctgcactcancacaaaaattatgttaccctttttnggtnctgcnctcaaaacgtatggtgatgtatnccttgtcctacccctattgtgaatntgagtccccngcctggtccctgtccacaaaggggcaatnttatacatctctgggcccntcanccactngaat

SEQ ID NO: 9667 - DNA, 501 bp, Homo sapiens
  misc_feature (4)..(4): "n" may be a, t, c, g, other or unknown
  misc_feature (85)..(85): "n" may be a, t, c, g, other or unknown
  misc_feature (87)..(87): "n" may be a, t, c, g, other or unknown
  misc_feature (328)..(328): "n" may be a, t, c, g, other or unknown
  misc_feature (352)..(352): "n" may be a, t, c, g, other or unknown
  misc_feature (354)..(354): "n" may be a, t, c, g, other or unknown
  misc_feature (406)..(406): "n" may be a, t, c, g, other or unknown
  misc_feature (451)..(451): "n" may be a, t, c, g, other or unknown
  misc_feature (462)..(462): "n" may be a, t, c, g, other or unknown
  misc_feature (471)..(472): "n" may be a, t, c, g, other or unknown
  misc_feature (483)..(483): "n" may be a, t, c, g, other or unknown
  misc_feature (495)..(495): "n" may be a, t, c, g, other or unknown
gganagacaggggtctatgttacccaagctggtctcaaactcctgagctcaagcaatcctcccactttggcatcccaaagtgcananattacaggcttgtgccaccatgcccgacccagatcttattcattctatctaactatatttttgtacccattaaccatctccactcctcttgaaactacccttcccagcctctgatatccatcattttactccatatctccatgagtccactgttttaatttttagctcctacaaataaatgagaacatgcaaagtctgtctttctgtcctgacatatttcattgaacataatgacctctanttccatccatgttttgcaaatganangatctcattcttctttatggctgaatagtactccattgtgtatatgtaccanatttcctttattcattaatctattgaaaggaaacttaaattcctnccaaatcttanctatcgtcnntatttctgcantaaacatgggantgcaaa

SEQ ID NO: 9668 - DNA, 435 bp, Homo sapiens
  misc_feature (16)..(16): "n" may be a, t, c, g, other or unknown
  misc_feature (35)..(35): "n" may be a, t, c, g, other or unknown
  misc_feature (62)..(62): "n" may be a, t, c, g, other or unknown
  misc_feature (120)..(120): "n" may be a, t, c, g, other or unknown
  misc_feature (131)..(131): "n" may be a, t, c, g, other or unknown
  misc_feature (147)..(147): "n" may be a, t, c, g, other or unknown
  misc_feature (166)..(166): "n" may be a, t, c, g, other or unknown
  misc_feature (344)..(344): "n" may be a, t, c, g, other or unknown
  misc_feature (367)..(367): "n" may be a, t, c, g, other or unknown
  misc_feature (391)..(391): "n" may be a, t, c, g, other or unknown
  misc_feature (414)..(414): "n" may be a, t, c, g, other or unknown
  misc_feature (417)..(417): "n" may be a, t, c, g, other or unknown
  misc_feature (431)..(431): "n" may be a, t, c, g, other or unknown
  misc_feature (435)..(435): "n" may be a, t, c, g, other or unknown
aattaatttgaggtangacacaaaatatacaatanaattttttgtgaagcactgctgaaagntttttactccaagaaagatcatacattattctttgttgacaatgccagggtgattcanaaagacaagtnaaatgttagccaaggnaatgcacaggagcgcagancagccgcactccagcccctcttctctcagtttccttaggatcctctattacccgctcccctccattcctaggcccagcctgtcattcctctctatggagttactgccagattgccttgcctcactgtaactggaacatcaattttccccatgaatctgtgagccctgcaaagtcaganactgtgccttgctaacaccctantcctcaaaagcacacaacagagtncttgacacccacgaagctctcangangcattgctgttgantatn

SEQ ID NO: 9669 - DNA, 344 bp, Homo sapiens
  misc_feature (13)..(13): "n" may be a, t, c, g, other or unknown
  misc_feature (99)..(99): "n" may be a, t, c, g, other or unknown
  misc_feature (142)..(142): "n" may be a, t, c, g, other or unknown
  misc_feature (149)..(149): "n" may be a, t, c, g, other or unknown
  misc_feature (183)..(183): "n" may be a, t, c, g, other or unknown
  misc_feature (215)..(215): "n" may be a, t, c, g, other or unknown
  misc_feature (267)..(267): "n" may be a, t, c, g, other or unknown
  misc_feature (270)..(270): "n" may be a, t, c, g, other or unknown
  misc_feature (285)..(285): "n" may be a, t, c, g, other or unknown
  misc_feature (299)..(299): "n" may be a, t, c, g, other or unknown
  misc_feature (317)..(317): "n" may be a, t, c, g, other or unknown
  misc_feature (336)..(336): "n" may be a, t, c, g, other or unknown
  misc_feature (342)..(342): "n" may be a, t, c, g, other or unknown
gacactgctctancaggggaaagtggctgccaccatcttgttaccgccaggtgaatgcaggcatctgggttttctactgggtgtcaactggccaaggantgggggaagggtatgtgcctccttactgctgaatgggggtganaatccanaattcccacgtggtctccactgaaactctgggancggacaaacttccttactgaccagtggggatnaaatttctggctcctggcttggtcttctctgacaccaccccagcaagggganaantctcacttgactcancccttgctggtgtnggtgaagggggaccacantgtttcctgtggtgttcanctgcanta

SEQ ID NO: 9670 - DNA, 359 bp, Homo sapiens
  misc_feature (31)..(31): "n" may be a, t, c, g, other or unknown
  misc_feature (35)..(35): "n" may be a, t, c, g, other or unknown
  misc_feature (56)..(56): "n" may be a, t, c, g, other or unknown
  misc_feature (91)..(91): "n" may be a, t, c, g, other or unknown
  misc_feature (127)..(127): "n" may be a, t, c, g, other or unknown
  misc_feature (134)..(134): "n" may be a, t, c, g, other or unknown
  misc_feature (143)..(143): "n" may be a, t, c, g, other or unknown
  misc_feature (172)..(172): "n" may be a, t, c, g, other or unknown
  misc_feature (193)..(193): "n" may be a, t, c, g, other or unknown
  misc_feature (211)..(211): "n" may be a, t, c, g, other or unknown
  misc_feature (217)..(217): "n" may be a, t, c, g, other or unknown
  misc_feature (242)..(242): "n" may be a, t, c, g, other or unknown
  misc_feature (314)..(314): "n" may be a, t, c, g, other or unknown
  misc_feature (320)..(320): "n" may be a, t, c, g, other or unknown
  misc_feature (326)..(326): "n" may be a, t, c, g, other or unknown
  misc_feature (330)..(330): "n" may be a, t, c, g, other or unknown
  misc_feature (334)..(334): "n" may be a, t, c, g, other or unknown
  misc_feature (350)..(350): "n" may be a, t, c, g, other or unknown
  misc_feature (353)..(353): "n" may be a, t, c, g, other or unknown
gtctggaaacattttttattttcacaactcnggtnaggggaaagtgctgacattcngggctggacactacgcacgaagaaaacaaggccangggttgggggataaacttaaggcttccatgctttcnttgggangaaaaacanggggtcctcatatctccaccaagtatgtnaccaacacaaattcaatgtcncatctggcactggcccanaaaaangaaccactcacccagggtcacccancaagcatggccagggctggtcacactgtggcctgacaggggacccacactctgggctgctgatatggggganctcaangaacangtcngcanaagatgatgctgtcanganttgggg

SEQ ID NO: 9671 - DNA, 624 bp, Homo sapiens
  misc_feature (143)..(143): "n" may be a, t, c, g, other or unknown
  misc_feature (284)..(284): "n" may be a, t, c, g, other or unknown
  misc_feature (408)..(408): "n" may be a, t, c, g, other or unknown
  misc_feature (491)..(491): "n" may be a, t, c, g, other or unknown
  misc_feature (495)..(495): "n" may be a, t, c, g, other or unknown
  misc_feature (526)..(526): "n" may be a, t, c, g, other or unknown
  misc_feature (543)..(543): "n" may be a, t, c, g, other or unknown
  misc_feature (559)..(559): "n" may be a, t, c, g, other or unknown
  misc_feature (579)..(579): "n" may be a, t, c, g, other or unknown
  misc_feature (582)..(582): "n" may be a, t, c, g, other or unknown
  misc_feature (591)..(591): "n" may be a, t, c, g, other or unknown
  misc_feature (596)..(596): "n" may be a, t, c, g, other or unknown
cactaaaagatacaaatattcacccaagtttattgattcaaagacatgcatttttttcatcagcagttttataataatcacaattcctaaaccaagcactttgtggaaatttgctccttgctatgtgttttttccttacaaanactttccaccagtaagattgttacaatgtaaggtaagaaaacagtgtgaactatgtcacgaatagttaatacagtatacagtattaagatagtttttctggtctctaaagaaatggtactttagaattcagtgtgtctcanaaataattctgaccattaagtaaacatcaaaattttaataaataacataaatgaaaaaacaaacaccttttaaaaattgcttatacctaacaaaacaatttctttgatgaagggtctggttggntttatcttggcagtgttcatttttatacaatttttgaattgcatttactccattctgatgaaattcccctctttggaatcccngaanaaatgaaacccatactgctaccatattgtgncctcccgaaatgcttcnatccccttccgaaccnaatgaacacccccgccttgnaanacataaaanaacantttttgtgccgtaccgaaatccttaaaa

SEQ ID NO: 9672 - DNA, 607 bp, Homo sapiens
  misc_feature (76)..(76): "n" may be a, t, c, g, other or unknown
  misc_feature (210)..(210): "n" may be a, t, c, g, other or unknown
  misc_feature (273)..(273): "n" may be a, t, c, g, other or unknown
  misc_feature (380)..(380): "n" may be a, t, c, g, other or unknown
  misc_feature (421)..(421): "n" may be a, t, c, g, other or unknown
  misc_feature (440)..(440): "n" may be a, t, c, g, other or unknown
  misc_feature (457)..(457): "n" may be a, t, c, g, other or unknown
  misc_feature (486)..(486): "n" may be a, t, c, g, other or unknown
  misc_feature (501)..(501): "n" may be a, t, c, g, other or unknown
  misc_feature (517)..(517): "n" may be a, t, c, g, other or unknown
  misc_feature (526)..(526): "n" may be a, t, c, g, other or unknown
  misc_feature (530)..(530): "n" may be a, t, c, g, other or unknown
  misc_feature (578)..(578): "n" may be a, t, c, g, other or unknown
  misc_feature (586)..(586): "n" may be a, t, c, g, other or unknown
  misc_feature (596)..(596): "n" may be a, t, c, g, other or unknown
  misc_feature (606)..(606): "n" may be a, t, c, g, other or unknown
gaaattgcagaaataaattttatttttaattttcagaagtaaaaaaagttataatactttaactgttaacaagggnttagctgatatccagttaacctaatactgcattaatgtttttattcttttcttgaaaatactcaaatacacctacattgtgctcttttaaaaaaaaaataaggatacttacatttaaaaagttttttgaggaanaaaattgtacaacattcatgtttttcatgacactgaatgatatatcaatttatctcttagaanaaaaagtagcataattaaaatcactggttccctaatcttcaactctctctccacaaataaaacctacctcttttcacaataaaaaagcaaaaaataatatacaatcnaaaggagctaaactgaaactctttatcccctttgtcaaaanataaattaattgttggganatcaacataacaatccnccctgaattttttttcttttaccatttanctctggtcaaaaaanaaataataatctatancccaaaatntttnaaactcctatcccttttccccttatctgtaaaaaagaaaatggttttntttttaanggaacttttntttttttttnc

SEQ ID NO: 9673 - DNA, 468 bp, Homo sapiens
  misc_feature (58)..(58): "n" may be a, t, c, g, other or unknown
  misc_feature (76)..(76): "n" may be a, t, c, g, other or unknown
  misc_feature (128)..(128): "n" may be a, t, c, g, other or unknown
  misc_feature (137)..(137): "n" may be a, t, c, g, other or unknown
  misc_feature (184)..(184): "n" may be a, t, c, g, other or unknown
  misc_feature (211)..(211): "n" may be a, t, c, g, other or unknown
  misc_feature (259)..(259): "n" may be a, t, c, g, other or unknown
  misc_feature (326)..(326): "n" may be a, t, c, g, other or unknown
  misc_feature (376)..(376): "n" may be a, t, c, g, other or unknown
  misc_feature (391)..(391): "n" may be a, t, c, g, other or unknown
  misc_feature (415)..(415): "n" may be a, t, c, g, other or unknown
  misc_feature (437)..(437): "n" may be a, t, c, g, other or unknown
  misc_feature (456)..(456): "n" may be a, t, c, g, other or unknown
  misc_feature (460)..(460): "n" may be a, t, c, g, other or unknown
  misc_feature (463)..(463): "n" may be a, t, c, g, other or unknown
gctagtgcggagttttattggctacaaaatagatgcaaaatgatgagaatctgaaggntgcagtaggaaagtaganctttaccctcataaactcgcactttgattagaaaagtgcaatatattaagancattatganaagtctggtgagactgttacagaaaaaaaaaaataaaagtttctgantctgataattccaagggtatcttttanaactcactcactggtgtctgtgcaaggactttccttgggggaaaatanactttacaacaggcggaaactttcattggtctcatgcgtgcttttggatttcattcacttgacaaanaactaatcttccgttgatggtctcctgggttatggccttgatctttgganttgcaaacactttcntgctcaactttgattcttcccgtntcccttcactctctccctccanaaaccgtcggtacttggtnattnccncccca

SEQ ID NO: 9674 - DNA, 500 bp, Homo sapiens
  misc_feature (87)..(87): "n" may be a, t, c, g, other or unknown
  misc_feature (109)..(109): "n" may be a, t, c, g, other or unknown
  misc_feature (212)..(212): "n" may be a, t, c, g, other or unknown
  misc_feature (382)..(382): "n" may be a, t, c, g, other or unknown
  misc_feature (413)..(413): "n" may be a, t, c, g, other or unknown
  misc_feature (418)..(418): "n" may be a, t, c, g, other or unknown
  misc_feature (472)..(472): "n" may be a, t, c, g, other or unknown
  misc_feature (476)..(476): "n" may be a, t, c, g, other or unknown
  misc_feature (479)..(479): "n" may be a, t, c, g, other or unknown
  misc_feature (488)..(488): "n" may be a, t, c, g, other or unknown
  misc_feature (495)..(495): "n" may be a, t, c, g, other or unknown
ccaattaattcctgattagataagtcatctcctcctccattttgaataatattatttacttggtcatctgggaaacttaatgttggnttattttggcaattactgtggnacatgtttaattctgtaactcccggtgaactcaactgtgcttattactcttcagttccaaattatcacaatcaaaatcgtaagtgggtggtgggctctttgancagtatctgtttggttttctcgtgcatcatttttcattgatttccttatgtcacgggacagatcttccagttttctgtttttgtttgggtcttttccctgttcttttcaccagccctcaggccaggcacagtggctcatgcctgtaatcccaacactttgggaggctganacagcggatcacttgtagccaggaattcganaacantctgggcaacatgacaaacccatctcttaattgttccaaaaaattatccatgtnctcnttnccattttcnggaaatnccaac

SEQ ID NO: 9675 - DNA, 552 bp, Homo sapiens
  misc_feature (34)..(34): "n" may be a, t, c, g, other or unknown
  misc_feature (48)..(48): "n" may be a, t, c, g, other or unknown
  misc_feature (54)..(54): "n" may be a, t, c, g, other or unknown
  misc_feature (108)..(108): "n" may be a, t, c, g, other or unknown
  misc_feature (120)..(120): "n" may be a, t, c, g, other or unknown
  misc_feature (128)..(128): "n" may be a, t, c, g, other or unknown
  misc_feature (146)..(146): "n" may be a, t, c, g, other or unknown
  misc_feature (194)..(194): "n" may be a, t, c, g, other or unknown
  misc_feature (386)..(386): "n" may be a, t, c, g, other or unknown
  misc_feature (493)..(493): "n" may be a, t, c, g, other or unknown
  misc_feature (525)..(525): "n" may be a, t, c, g, other or unknown
  misc_feature (527)..(527): "n" may be a, t, c, g, other or unknown
  misc_feature (530)..(531): "n" may be a, t, c, g, other or unknown
  misc_feature (534)..(534): "n" may be a, t, c, g, other or unknown
  misc_feature (539)..(539): "n" may be a, t, c, g, other or unknown
gagaacgaatcttgctctgtccccaggctgggantgcagtaacgcganctcggntcactgcaagctccgcctcccgggttcacgccattctcctgccccagcctccanaacagctgggantacatgtncccgccaccacgcccggntaattttttgtatttttagtaaaaacagggtttcaccatgttagccangatggtctcgatctcctgacctcgtgatccacctgcctcagcctgccaaagtgctggggattacaggcgtgagccaccgcacctgggccccatcctgatttttaaggaaacttcaacacgagttcttccagtcccttttaaatgatggacactgtcaagaagtaaatttcacctaataactggtttatccanaaagaaaactgactcctcattcaaatggcattatattaaaccagaataatctccttaccttgaaacaatggtttttgttaattttaaaaaaaaaaaaaaatcccccnaagttttctgaatcctcccagggaattttctntnttnnccnttttnccttttaaattaa

SEQ ID NO: 9676 - DNA, 531 bp, Homo sapiens
  misc_feature (28)..(28): "n" may be a, t, c, g, other or unknown
  misc_feature (55)..(55): "n" may be a, t, c, g, other or unknown
  misc_feature (64)..(64): "n" may be a, t, c, g, other or unknown
  misc_feature (109)..(109): "n" may be a, t, c, g, other or unknown
  misc_feature (167)..(167): "n" may be a, t, c, g, other or unknown
  misc_feature (334)..(334): "n" may be a, t, c, g, other or unknown
  misc_feature (348)..(348): "n" may be a, t, c, g, other or unknown
  misc_feature (351)..(351): "n" may be a, t, c, g, other or unknown
  misc_feature (381)..(381): "n" may be a, t, c, g, other or unknown
  misc_feature (412)..(412): "n" may be a, t, c, g, other or unknown
  misc_feature (428)..(428): "n" may be a, t, c, g, other or unknown
  misc_feature (447)..(447): "n" may be a, t, c, g, other or unknown
  misc_feature (449)..(450): "n" may be a, t, c, g, other or unknown
  misc_feature (473)..(473): "n" may be a, t, c, g, other or unknown
  misc_feature (497)..(497): "n" may be a, t, c, g, other or unknown
  misc_feature (521)..(521): "n" may be a, t, c, g, other or unknown
  misc_feature (528)..(528): "n" may be a, t, c, g, other or unknown
aaaaaataaaatgttcgcacaatggganaaaattgctttaagtgttacaccttanccaacagancccaaactccgtgtttccgttctttctctttcggtttctgctganggctggtgacacactggcctcttgtcagtggctgccggcagggccaggaacaaaatanaactgcagcacagctcagtccaaaaagcgctggcaggccttcttccaccggcaggccgtgcaccactggtcccggtgctcgatgccatacaccttgcggcacttcttagcctcccctcgggctttcctggcaccactctgggcccggggtggagaggtgaccatcanatgagatttcatcncangtgctggctgctggggctcgctgaacttancgaccggctccggaccggaaaaaaaaaacangcggcggaaggggcancaccccactgacactggtntnnattttttgttaaaaactgggatnttgaaagaatgcaaaaacctgttntccttattttcccgaattttcccnaaagaanccc

SEQ ID NO: 9677 - DNA, 621 bp, Homo sapiens
  misc_feature (81)..(81): "n" may be a, t, c, g, other or unknown
  misc_feature (100)..(100): "n" may be a, t, c, g, other or unknown
  misc_feature (425)..(425): "n" may be a, t, c, g, other or unknown
  misc_feature (450)..(450): "n" may be a, t, c, g, other or unknown
  misc_feature (478)..(478): "n" may be a, t, c, g, other or unknown
  misc_feature (481)..(481): "n" may be a, t, c, g, other or unknown
  misc_feature (492)..(492): "n" may be a, t, c, g, other or unknown
  misc_feature (496)..(496): "n" may be a, t, c, g, other or unknown
  misc_feature (499)..(499): "n" may be a, t, c, g, other or unknown
  misc_feature (568)..(568): "n" may be a, t, c, g, other or unknown
  misc_feature (574)..(574): "n" may be a, t, c, g, other or unknown
  misc_feature (579)..(579): "n" may be a, t, c, g, other or unknown
  misc_feature (604)..(604): "n" may be a, t, c, g, other or unknown
  misc_feature (607)..(608): "n" may be a, t, c, g, other or unknown
  misc_feature (618)..(618): "n" may be a, t, c, g, other or unknown
gcaaactgaatcctgctttaattcaagcttgtggagaacaaagtcctacagaaacattccacagaattttctggaaaaganggatcacaacaaccctgtnaaaaggagactgagagtaattcatagctcaccaagttctctccgtatcaaatttccagaatacccacaagatttcttcaccagctcagtcctgactcaacctcttcaatctttatttcattagaagacaaagggtcatattatttaaaattattctagtctcaagaaatttaaagacttgaagtagtagagcattcaaaacttaaataactttaacaagaaagccagctgatcttaacaagttactctgctagtaaatgggaaatagactgaatcatcctagacataatttcattagggctgcaaaccacccagggggagagtancacaattataccattttgttatccncattccccagaaatttgctaccccaatnaanaaaactttgtngccntanacacttatttttttaaatatccccccccaaaatttccctgtttccccctttgtttccctttccccttcnaaattnccccntgaattctcccggagaatggaaaanccnntttttccctnggg

SEQ ID NO: 9678 - DNA, 604 bp, Homo sapiens
  misc_feature (110)..(110): "n" may be a, t, c, g, other or unknown
  misc_feature (168)..(168): "n" may be a, t, c, g, other or unknown
  misc_feature (245)..(245): "n" may be a, t, c, g, other or unknown
  misc_feature (247)..(247): "n" may be a, t, c, g, other or unknown
  misc_feature (290)..(290): "n" may be a, t, c, g, other or unknown
  misc_feature (440)..(440): "n" may be a, t, c, g, other or unknown
  misc_feature (527)..(527): "n" may be a, t, c, g, other or unknown
  misc_feature (537)..(537): "n" may be a, t, c, g, other or unknown
  misc_feature (548)..(548): "n" may be a, t, c, g, other or unknown
  misc_feature (583)..(583): "n" may be a, t, c, g, other or unknown
  misc_feature (586)..(586): "n" may be a, t, c, g, other or unknown
  misc_feature (591)..(591): "n" may be a, t, c, g, other or unknown
  misc_feature (595)..(595): "n" may be a, t, c, g, other or unknown
agactgagtttcgctcttgttgtccagtctgtagtgcaatggcgcaatcttggctcaccgcaacctccgcctccagggttcaagcaattttcctgcctctgcctcctgantagctgggattacaggcatgagccaccatacccagctaattttgtatttttagtaaanatggagtttctccatgttgttcaggctggtcttgaactcccaacctcaggtgatccacctgcttcggcctcccaaananctgggaatataggcgtgagccaccacgcctggcccaaactgantttttttaaaggttttctgtgaatcataaattctactgaagccctatggtgtataaattattttcaatctctcctttcttcatttatattttcatatagtccctattcataacacaatgatggctcaaactatatataatgtgaattgantttctaatttaataaaaaatccaaattctttttcttggaaagatatcatactaggcacaaagaaccatttctaagaaaagtggatanatctccttanaataaggaacnctaattttaaccaaattcacccctgctgaatcccnaanaagantccntccccaaat

SEQ ID NO: 9679 - DNA, 302 bp, Homo sapiens
  misc_feature (127)..(127): "n" may be a, t, c, g, other or unknown
  misc_feature (146)..(146): "n" may be a, t, c, g, other or unknown
  misc_feature (171)..(171): "n" may be a, t, c, g, other or unknown
  misc_feature (173)..(173): "n" may be a, t, c, g, other or unknown
  misc_feature (239)..(239): "n" may be a, t, c, g, other or unknown
  misc_feature (253)..(253): "n" may be a, t, c, g, other or unknown
  misc_feature (256)..(256): "n" may be a, t, c, g, other or unknown
  misc_feature (260)..(260): "n" may be a, t, c, g, other or unknown
  misc_feature (274)..(274): "n" may be a, t, c, g, other or unknown
  misc_feature (282)..(282): "n" may be a, t, c, g, other or unknown
  misc_feature (292)..(292): "n" may be a, t, c, g, other or unknown
gcggtttccaaacttttgtatttttagcagcagaagccatcctccaaacaaaaccgtatgcaaaacctcagctacaaaacagatcagtgggctgcttgcccgtgtggggcatgggctgggccccganctctccctccagcacccantacttcttccacaaggccctatgtnanctcagtttaaaaccccagggccttggcaggggtcaggtgggcgggaacaaggggtggaccttgtancactggagctaaancanccanataaggtgggctanttcttaanacctctgganggtgtggcta

SEQ ID NO: 9680 - DNA, 554 bp, Homo sapiens
  misc_feature (354)..(354): "n" may be a, t, c, g, other or unknown
  misc_feature (496)..(497): "n" may be a, t, c, g, other or unknown
  misc_feature (507)..(507): "n" may be a, t, c, g, other or unknown
  misc_feature (517)..(517): "n" may be a, t, c, g, other or unknown
  misc_feature (528)..(528): "n" may be a, t, c, g, other or unknown
  misc_feature (538)..(538): "n" may be a, t, c, g, other or unknown
  misc_feature (546)..(546): "n" may be a, t, c, g, other or unknown
caaacatcctgcaacctttaatatatatcatgttgtgtgagttttaacacatttgggcttgcatttgttctacaatgtgtaatatgaaaagtttatcagcacaactagactgaattattcctcacataaatccttgggatgtgttacagttttgatccttggttaatagcttcaacatgcacaaaatatacaaagatgtttacacattttgatgtctagtgagttgtgagacctaaatgaagcctctgccacacagttaggtgtatatgatttctctttagcatggactctgatgtcaatgaatgcttgaacttgtgatgaagggtttgctgtacttgtaaggattctctcaanaaatgaaattctctgatgctgtgtaggagtgaattgtgactgaaaaccttgccacatttattatacttgtatggttccctctgaatataaattccttgaatgaacccccagggaattaaactttgaactgaaaaacctggcnnattaatttcntttaaaaggntccccctaatntggaaaaatnaaatttcnaaaaaggt

SEQ ID NO: 9681 - DNA, 401 bp, Homo sapiens
  misc_feature (252)..(252): "n" may be a, t, c, g, other or unknown
  misc_feature (305)..(305): "n" may be a, t, c, g, other or unknown
  misc_feature (310)..(310): "n" may be a, t, c, g, other or unknown
  misc_feature (331)..(331): "n" may be a, t, c, g, other or unknown
  misc_feature (338)..(338): "n" may be a, t, c, g, other or unknown
  misc_feature (347)..(347): "n" may be a, t, c, g, other or unknown
  misc_feature (354)..(354): "n" may be a, t, c, g, other or unknown
  misc_feature (379)..(379): "n" may be a, t, c, g, other or unknown
cttccatggaagttttgtgagaactctccactaccattgccaagggctgagtcaggatcatttttcagtgtatttattatatcagtagatacaaaaggaatatcttgtgacttcggagaaatattttcagcttcaactttaggcacttcactcagttcttccttttcatctatctcttcaaggctataatcagagcttattccaaatgtcaatgatgttatggctgcctcaggtgtcccagggcactcaaanacagaggtttcctccatcagtttgggcgcagtgcactgctcctgactggaaancccanggtgaaaggtttcacttaaanatgaaanattcaaaantgttccncctaaatgtttcctgggctggatanctcctcaggaaaatttgcttct

SEQ ID NO: 9682 - DNA, 563 bp, Homo sapiens
  misc_feature (36)..(36): "n" may be a, t, c, g, other or unknown
  misc_feature (268)..(268): "n" may be a, t, c, g, other or unknown
  misc_feature (383)..(383): "n" may be a, t, c, g, other or unknown
  misc_feature (424)..(424): "n" may be a, t, c, g, other or unknown
  misc_feature (473)..(473): "n" may be a, t, c, g, other or unknown
  misc_feature (483)..(483): "n" may be a, t, c, g, other or unknown
  misc_feature (485)..(485): "n" may be a, t, c, g, other or unknown
  misc_feature (514)..(514): "n" may be a, t, c, g, other or unknown
  misc_feature (521)..(521): "n" may be a, t, c, g, other or unknown
  misc_feature (527)..(527): "n" may be a, t, c, g, other or unknown
  misc_feature (531)..(531): "n" may be a, t, c, g, other or unknown
gtcatttcaccttttaaaggaaaataaatcaagtangtaggtaaaaattactgaactaaagagatactaaagatcagaagactggccaattgagaaaatcaagtttcatgattaagagtgactcaggaaggatgtcttagttatgaggggggcggtggaagacagtttatatctttgggtatttatggcaggtcagaattaaagatttaactttttcccttactctttacataaaaagctggtttatctgaaaaaagtatcaatctanacttggcaataaagtggcacttaggcactatattattgatatctacaatgacctcctggatgcacaaaaaaccctgaagggcttttttgatcagcaaaacaaaaacagaaaagcnaaaaacagttaatttttgttttggtcaattttactcaccanaccccttgataccaacaatgctggaaaacatttggcaaaaacagggccncaatgccaantnccttggaaaggtaaactcctataatcttnccggatnggcaanttgntggggttttttgggtattcctttgaaaatttt

SEQ ID NO: 9683 - DNA, 479 bp, Homo sapiens
  misc_feature (149)..(149): "n" may be a, t, c, g, other or unknown
  misc_feature (152)..(152): "n" may be a, t, c, g, other or unknown
  misc_feature (168)..(168): "n" may be a, t, c, g, other or unknown
  misc_feature (190)..(190): "n" may be a, t, c, g, other or unknown
  misc_feature (211)..(211): "n" may be a, t, c, g, other or unknown
  misc_feature (252)..(252): "n" may be a, t, c, g, other or unknown
  misc_feature (274)..(274): "n" may be a, t, c, g, other or unknown
  misc_feature (307)..(307): "n" may be a, t, c, g, other or unknown
  misc_feature (316)..(316): "n" may be a, t, c, g, other or unknown
  misc_feature (325)..(325): "n" may be a, t, c, g, other or unknown
  misc_feature (367)..(367): "n" may be a, t, c, g, other or unknown
  misc_feature (400)..(400): "n" may be a, t, c, g, other or unknown
  misc_feature (419)..(419): "n" may be a, t, c, g, other or unknown
  misc_feature (431)..(431): "n" may be a, t, c, g, other or unknown
  misc_feature (441)..(441): "n" may be a, t, c, g, other or unknown
  misc_feature (443)..(443): "n" may be a, t, c, g, other or unknown
  misc_feature (465)..(465): "n" may be a, t, c, g, other or unknown
  misc_feature (470)..(470): "n" may be a, t, c, g, other or unknown
acttccaccaaaggcatgtggcatatttaccaatgtcatgtattctgaacaaaggcaaaaaatacaaattcctaccattaaactggcttggttgttgtttgggttggaataactgtgggggcttggggaaaggtgtcgtttctttctantantctcatgtcgctttangtcagctgggctggcttacacncgctgtgcggtcttcatgganatgggaactctgtgtgtcagcacaggaaagtggtctcccancgttcaacctgaaacacccaantcctgtaggtgcttgccgtctctgaaaccccangaacatcantgcaagaangaaaaaactgctggcaaaaatgactcccaaggctgttctccnctctggtgggacaacctgggtgctggccccaangggctcctccaaaaaaatnttttttacctgncaggtgttantngcacctgcaaaaccaagttctnccgtnaaaaaagaa

SEQ ID NO: 9684 - DNA, 613 bp, Homo sapiens
  misc_feature (303)..(303): "n" may be a, t, c, g, other or unknown
  misc_feature (369)..(369): "n" may be a, t, c, g, other or unknown
  misc_feature (419)..(419): "n" may be a, t, c, g, other or unknown
  misc_feature (452)..(452): "n" may be a, t, c, g, other or unknown
  misc_feature (474)..(474): "n" may be a, t, c, g, other or unknown
  misc_feature (481)..(481): "n" may be a, t, c, g, other or unknown
  misc_feature (483)..(483): "n" may be a, t, c, g, other or unknown
  misc_feature (500)..(500): "n" may be a, t, c, g, other or unknown
  misc_feature (519)..(519): "n" may be a, t, c, g, other or unknown
  misc_feature (576)..(576): "n" may be a, t, c, g, other or unknown
  misc_feature (584)..(584): "n" may be a, t, c, g, other or unknown
  misc_feature (590)..(590): "n" may be a, t, c, g, other or unknown
  misc_feature (596)..(596): "n" may be a, t, c, g, other or unknown
  misc_feature (603)..(603): "n" may be a, t, c, g, other or unknown
  misc_feature (611)..(611): "n" may be a, t, c, g, other or unknown
gataatttagaaatttattacaaaacttttaataaaaaatacaatgatattacaaatttggttttccaaagctttcaaatttttcttaacattatctttcgttttaagaacacttttgaagtcggcagttatttaaaatccttactagaaaaaaaccaaagcccaaggattttgcatttagtcatcatctaggtatacagcgtgttttccgaaagcatcctttaagagtttggagatttgatgaaattgctcatgtaataagcagttagtgaatactattgaatcctaaacccagataagtcntcttgggctggctgtgtttttcatgtgaagaaactcatttatagcacaggcaccccaggccaatanagatgattacagatctctgggttccagaaattcctgaccccttattccanctaccaaaatacttaattgctaaaggaattacncccaccaggcacaaaacggttnctgaatntnacaaaaaaaggtgcccnaaaaatcttttaaaactcntggttacacatactttatctttaaaagggtttgaaattttggggaactaaaaatccngtaaaaanggtttnggtggnttttttnaggaaaanaa

SEQ ID NO: 9685 - DNA, 577 bp, Homo sapiens
  misc_feature (75)..(75): "n" may be a, t, c, g, other or unknown
  misc_feature (94)..(94): "n" may be a, t, c, g, other or unknown
  misc_feature (99)..(99): "n" may be a, t, c, g, other or unknown
  misc_feature (464)..(464): "n" may be a, t, c, g, other or unknown
  misc_feature (489)..(489): "n" may be a, t, c, g, other or unknown
  misc_feature (522)..(522): "n" may be a, t, c, g, other or unknown
  misc_feature (526)..(526): "n" may be a, t, c, g, other or unknown
  misc_feature (533)..(533): "n" may be a, t, c, g, other or unknown
  misc_feature (549)..(549): "n" may be a, t, c, g, other or unknown
  misc_feature (574)..(574): "n" may be a, t, c, g, other or unknown
  misc_feature (576)..(576): "n" may be a, t, c, g, other or unknown
agtgaaaacaaatttaatatcatcttgtttgaacaaagctttcagaataagtgagcaattaaattcttaaagtanggacagaacaccaacaggntctanactccggaagaattgtaagccgacaaatgggcattgttttgcttaacagttttagcttcaatgtaaatatatattattacttagaatattagcatctgaactatataatgactattttatcattttacttgaattaaaaccagaatttctggaacttccaaatagtctttaaagtttttcaatataaacataaactaacccctattcctctctacatatcaaatgtgaaataactgtcacaatatatcagcattttcacagaaagatgtttaaggcttctggcacataaaatgtgtaatttctgtgtgacaatgtcataattatatacagaaaatatttaaaattctggtagaatttaagttctnaagattaaaaaaaccagaattcccngtttataaaatattaaatctatgaacccccctnaaantgaaagnaattgttttccttaanaaacccaggggggttttccccccantnt

SEQ ID NO: 9686 - DNA, 581 bp, Homo sapiens
  misc_feature (41)..(41): "n" may be a, t, c, g, other or unknown
  misc_feature (101)..(101): "n" may be a, t, c, g, other or unknown
  misc_feature (184)..(184): "n" may be a, t, c, g, other or unknown
  misc_feature (229)..(229): "n" may be a, t, c, g, other or unknown
  misc_feature (438)..(438): "n" may be a, t, c, g, other or unknown
  misc_feature (443)..(443): "n" may be a, t, c, g, other or unknown
  misc_feature (520)..(520): "n" may be a, t, c, g, other or unknown
  misc_feature (531)..(531): "n" may be a, t, c, g, other or unknown
  misc_feature (555)..(557): "n" may be a, t, c, g, other or unknown
  misc_feature (570)..(570): "n" may be a, t, c, g, other or unknown
  misc_feature (577)..(577): "n" may be a, t, c, g, other or unknown
actttgaaatacatttttaatttttgaaaaatcaatatgtnatctacaaaatattttgttacatgattaagggtcaacctgtcttatatttgcattgacanaatacaaaactgtattttaagtaagacattataatagtcattgttaaggaagtccttctaactgactttataagaaaaggggntgtatcacaagcatagctctggaatgaagggaactaacatcctanaactgtctaatatatacatcaggttgtaaaattccagcctttatttatgtgctggaaagtatcttttttacatatctttttttagtggataaactcttgtgattcccacagaaaaaggaaatgttcttaaattcagatctgcacaaatcatctacccatgaaattcatttacacagttaatatgatcctgtaactggaaaggtgaccanactantcacaaactggtccactccttgggaaatttgcccctttgaaccccaaattgtccaactccccattggatttttttancccaattaaancctaaaaaggaaattttccccccnnntcctttcctcccngttcccncccc

SEQ ID NO: 9687 - DNA, 409 bp, Homo sapiens
  misc_feature (193)..(193): "n" may be a, t, c, g, other or unknown
  misc_feature (278)..(278): "n" may be a, t, c, g, other or unknown
  misc_feature (288)..(288): "n" may be a, t, c, g, other or unknown
  misc_feature (321)..(321): "n" may be a, t, c, g, other or unknown
  misc_feature (354)..(354): "n" may be a, t, c, g, other or unknown
  misc_feature (369)..(369): "n" may be a, t, c, g, other or unknown
  misc_feature (372)..(372): "n" may be a, t, c, g, other or unknown
  misc_feature (382)..(382): "n" may be a, t, c, g, other or unknown
  misc_feature (384)..(384): "n" may be a, t, c, g, other or unknown
  misc_feature (392)..(392): "n" may be a, t, c, g, other or unknown
cagcactcccagttgggtgttttattatttatttacttgacaggtaacatcgatttggtcctacaagacaccatgctataggcttagctacttgctgttgcacaagagaactttcctgaactctcaggaagcccttgcatggcctatcgaggacagctcagtcactgaagggaaaaattccataccaaagaanagagaaaaattccataccaaagaacagacttcccccaggggaacctccgtcctacagcccttcagggccatcacactcacacacntcagccatcntcaaaatattggccatgctgggaaaaacaggancctgaactaaaaggtggtcttcaaaccatggcntccgatttatttttnttncaaataaatnanttaaaaangtctacatgaataaaaa

SEQ ID NO: 9688 - DNA, 523 bp, Homo sapiens
  misc_feature (315)..(315): "n" may be a, t, c, g, other or unknown
  misc_feature (413)..(413): "n" may be a, t, c, g, other or unknown
  misc_feature (438)..(438): "n" may be a, t, c, g, other or unknown
  misc_feature (469)..(469): "n" may be a, t, c, g, other or unknown
  misc_feature (476)..(476): "n" may be a, t, c, g, other or unknown
  misc_feature (498)..(498): "n" may be a, t, c, g, other or unknown
  misc_feature (504)..(504): "n" may be a, t, c, g, other or unknown
  misc_feature (517)..(518): "n" may be a, t, c, g, other or unknown
agaaaaatgaaagctgatttttattttatcatcaacagccattctttagacatgaacatgcatacgtaatattctacgcacacatcacagcttttaacgttagttaataaaggttaaacacacaacatacatccttacaaaaaaagtcaaaatgcaaacttaaaactttaaacaaaagtattactaatttaaaaaaagtttgtgttgggtaccattcgtacaacacagttaatttaaacattctcattttggttgcacatgaaaaaggcggcagtagaaaataaagtcattgagggtttttaaatagcagaatangcagtcttgccatgcaggagaagcaatattaaatattagtttcaaaaaaaatccacatttaaaaatatttagttcaagtcacagaattttctcagtanaaaccccaatgcaatgcataattanctggcttaaatggcccgtttgaaaaggatanatccctncaaaatgtactttactgatttnggcccnaaaaaaaatcttnnaacct

SEQ ID NO: 9689 - DNA, 505 bp, Homo sapiens
  misc_feature (83)..(83): "n" may be a, t, c, g, other or unknown
  misc_feature (97)..(97): "n" may be a, t, c, g, other or unknown
  misc_feature (158)..(158): "n" may be a, t, c, g, other or unknown
  misc_feature (182)..(182): "n" may be a, t, c, g, other or unknown
  misc_feature (184)..(184): "n" may be a, t, c, g, other or unknown
  misc_feature (221)..(221): "n" may be a, t, c, g, other or unknown
  misc_feature (235)..(235): "n" may be a, t, c, g, other or unknown
  misc_feature (258)..(258): "n" may be a, t, c, g, other or unknown
  misc_feature (267)..(267): "n" may be a, t, c, g, other or unknown
  misc_feature (291)..(291): "n" may be a, t, c, g, other or unknown
  misc_feature (322)..(322): "n" may be a, t, c, g, other or unknown
  misc_feature (343)..(343): "n" may be a, t, c, g, other or unknown
  misc_feature (349)..(349): "n" may be a, t, c, g, other or unknown
  misc_feature (353)..(353): "n" may be a, t, c, g, other or unknown
  misc_feature (385)..(385): "n" may be a, t, c, g, other or unknown
  misc_feature (426)..(426): "n" may be a, t, c, g, other or unknown
  misc_feature (438)..(438): "n" may be a, t, c, g, other or unknown
  misc_feature (461)..(461): "n" may be a, t, c, g, other or unknown
  misc_feature (471)..(471): "n" may be a, t, c, g, other or unknown
  misc_feature (477)..(477): "n" may be a, t, c, g, other or unknown
  misc_feature (480)..(480): "n" may be a, t, c, g, other or unknown
  misc_feature (489)..(489): "n" may be a, t, c, g, other or unknown
gacgcgggggagagatttaatttacatagcagccacttggggtccagtcagagctggggcagtgggggaatctataaccccanagggtaccccccanacccccacccccgggagaccagtcctcaccaacccttggatgggctcccaaggttgtgcanaaaatgctccagtcaaaaggatananacatttgggaataaggctgtccccaagttgggggaantccacggcctggantggtggcctacatggtggcccangggtctganaaaccaatccatgtcctgggcgantcctcacctggtgggcctaaaagaaaccctncccggcggaaactttccctgnaagaanggcncggtactggtcaaatcctccttcccacgggtnaagccgcctccttcgcacacccacaactcccggcacaccancctgataaaacnctcatcctgggacaccaaaatcncccccccctnaaattnttnaaggcccgnccaaaaccccatggtc

SEQ ID NO: 9690 - DNA, 624 bp, Homo sapiens
  misc_feature (206)..(206): "n" may be a, t, c, g, other or unknown
  misc_feature (230)..(230): "n" may be a, t, c, g, other or unknown
  misc_feature (413)..(413): "n" may be a, t, c, g, other or unknown
  misc_feature (491)..(491): "n" may be a, t, c, g, other or unknown
  misc_feature (557)..(557): "n" may be a, t, c, g, other or unknown
  misc_feature (566)..(566): "n" may be a, t, c, g, other or unknown
  misc_feature (593)..(593): "n" may be a, t, c, g, other or unknown
  misc_feature (601)..(601): "n" may be a, t, c, g, other or unknown
  misc_feature (603)..(603): "n" may be a, t, c, g, other or unknown
  misc_feature (610)..(610): "n" may be a, t, c, g, other or unknown
  misc_feature (614)..(614): "n" may be a, t, c, g, other or unknown
gaatatattcctcccttttatttatagaagagtatacagaaattcatttggacagaaggagcctctctatgtaacaggcacccttctgctactggtcacaatcaatcaatggtccagacggcaattatgattttccacattcctcaaagctgctctctcctgaaatcactttgcaaattttgttgaccaatttgcaaacaaaaganaatgcagtggcctacccaacctanaaatctgttctgcctaattcccttaaaaacaccattgagaatgcaaaataagtcccttttttgttttttgcagaagcactacaagaaagcgtgtctaaaaccacagaactatgcacacacaaacacagacacgcgtgctcgcacacacagagtcgggatcaaagaatcttatctgatacatanttgggggagcacgggaaaaagctggcaagaaaaggatatggagagatctgatcagctaaagatgttggaatgttacantatggcatggaaattggttcttgggctatacaaaaaagggggtgggcaggcaaaaaaaataataantcccggctnctaaaaaaaagttcagtggccctcctnatttaaananattaaangccntttcctggat

SEQ ID NO: 9691 - DNA, 376 bp, Homo sapiens
  misc_feature (43)..(43): "n" may be a, t, c, g, other or unknown
  misc_feature (150)..(150): "n" may be a, t, c, g, other or unknown
  misc_feature (287)..(287): "n" may be a, t, c, g, other or unknown
  misc_feature (289)..(289): "n" may be a, t, c, g, other or unknown
  misc_feature (357)..(357): "n" may be a, t, c, g, other or unknown
  misc_feature (365)..(366): "n" may be a, t, c, g, other or unknown
  misc_feature (371)..(371): "n" may be a, t, c, g, other or unknown
  misc_feature (373)..(373): "n" may be a, t, c, g, other or unknown
aagtcagagttgccctttatttttagattcttaaatattctanaatgaggtaaaacgagcctgccagtacaaagtgaaaattctacatggtgcatctttggcgcttcatgcatgattatttcaatgaacctcttcctggtcactcttaanatagatctgagtttttgactcgccagtcaagggctttggcgacactcaatgacataatattcttggaaaaagcagtagcatttctgacttttcatattcagctcggaggtgtattgtctcgggctcctgtgcagtcnancgccacggctgctcatcggatgatccaggatggggtccttggcaattttcgggttctcgggtccaagnatggccannccgtntnttg

SEQ ID NO: 9692 - DNA, 551 bp, Homo sapiens
  misc_feature (126)..(126): "n" may be a, t, c, g, other or unknown
  misc_feature (130)..(130): "n" may be a, t, c, g, other or unknown
  misc_feature (132)..(132): "n" may be a, t, c, g, other or unknown
  misc_feature (438)..(438): "n" may be a, t, c, g, other or unknown
  misc_feature (486)..(486): "n" may be a, t, c, g, other or unknown
  misc_feature (519)..(519): "n" may be a, t, c, g, other or unknown
  misc_feature (525)..(525): "n" may be a, t, c, g, other or unknown
  misc_feature (527)..(527): "n" may be a, t, c, g, other or unknown
  misc_feature (530)..(530): "n" may be a, t, c, g, other or unknown
  misc_feature (532)..(532): "n" may be a, t, c, g, other or unknown
  misc_feature (547)..(547): "n" may be a, t, c, g, other or unknown
aaatggtcaaactagaaccaggatttaatgtgaaaaattaaactgattctttattcacaaatttataataccactctactgcagtctttgactccaagatattttaaatcatatttggtcgctgangaananataagttatagtatgcatccttgttccaaaaatctgggcccttccatccgcaccagcccttttccaaaataacttgcaggtcttcagcaccggtataatgtggatctagaatcagaaactttatctgccctgtaatctcattccatgcaactcctagtattgtgtgggccaaaactcctcccccgatcataactggagttccttcactttggaaatgattagccagttcccgtccttgagaggcaatttctgaaccttggctgacaaacaggatttttgacgttataccgatcaattggtttagtnccagctgccctcaataaattcaatccattggcgcgatccgacaatttngttggttgtccccggctccaacaaaaccgccgnaattcncngtntntttggaaaggaaccnccgt

SEQ ID NO: 9693 - DNA, 410 bp, Homo sapiens
  misc_feature (18)..(18): "n" may be a, t, c, g, other or unknown
  misc_feature (40)..(40): "n" may be a, t, c, g, other or unknown
  misc_feature (57)..(57): "n" may be a, t, c, g, other or unknown
  misc_feature (62)..(62): "n" may be a, t, c, g, other or unknown
  misc_feature (65)..(65): "n" may be a, t, c, g, other or unknown
  misc_feature (80)..(80): "n" may be a, t, c, g, other or unknown
  misc_feature (142)..(142): "n" may be a, t, c, g, other or unknown
  misc_feature (149)..(149): "n" may be a, t, c, g, other or unknown
  misc_feature (160)..(160): "n" may be a, t, c, g, other or unknown
  misc_feature (169)..(169): "n" may be a, t, c, g, other or unknown
  misc_feature (195)..(195): "n" may be a, t, c, g, other or unknown
  misc_feature (219)..(219): "n" may be a, t, c, g, other or unknown
  misc_feature (224)..(224): "n" may be a, t, c, g, other or unknown
  misc_feature (267)..(267): "n" may be a, t, c, g, other or unknown
  misc_feature (318)..(318): "n" may be a, t, c, g, other or unknown
  misc_feature (340)..(340): "n" may be a, t, c, g, other or unknown
  misc_feature (374)..(374): "n" may be a, t, c, g, other or unknown
  misc_feature (400)..(400): "n" may be a, t, c, g, other or unknown
  misc_feature (404)..(406): "n" may be a, t, c, g, other or unknown
aaaagacaaagacaaaanaatatatttggaaaaaaggtcnggaacacttgcctctantgganaanggaactgaacttgtncacagccttccgtatttattaggcaaaaaaaataatgtgaaaggaaatggaaaaaggggtcnctgctcngtccaaaatangcttgcaanactgcattctctggatgtcccaatanataacctcaaggagcttggcgtcnggaancaattgccctcagcaaaccttctggggcaggcacagtcatgantttgcccacattctgtattcatgataaacagtttgctgtttgatcgtatanactcactggaatgttggtcacntcccatgggcctttggctctctgtatatcctccnttctgtttatgtattaattgaaagantgtnnngcca

SEQ ID NO: 9694 - DNA, 553 bp, Homo sapiens
  misc_feature (92)..(92): "n" may be a, t, c, g, other or unknown
  misc_feature (98)..(98): "n" may be a, t, c, g, other or unknown
  misc_feature (101)..(101): "n" may be a, t, c, g, other or unknown
  misc_feature (193)..(193): "n" may be a, t, c, g, other or unknown
  misc_feature (213)..(213): "n" may be a, t, c, g, other or unknown
  misc_feature (250)..(250): "n" may be a, t, c, g, other or unknown
  misc_feature (261)..(261): "n" may be a, t, c, g, other or unknown
  misc_feature (269)..(269): "n" may be a, t, c, g, other or unknown
  misc_feature (291)..(291): "n" may be a, t, c, g, other or unknown
  misc_feature (301)..(301): "n" may be a, t, c, g, other or unknown
  misc_feature (317)..(317): "n" may be a, t, c, g, other or unknown
  misc_feature (347)..(347): "n" may be a, t, c, g, other or unknown
  misc_feature (365)..(365): "n" may be a, t, c, g, other or unknown
  misc_feature (400)..(400): "n" may be a, t, c, g, other or unknown
  misc_feature (423)..(423): "n" may be a, t, c, g, other or unknown
  misc_feature (460)..(460): "n" may be a, t, c, g, other or unknown
  misc_feature (472)..(472): "n" may be a, t, c, g, other or unknown
  misc_feature (480)..(480): "n" may be a, t, c, g, other or unknown
  misc_feature (494)..(494): "n" may be a, t, c, g, other or unknown
  misc_feature (515)..(515): "n" may be a, t, c, g, other or unknown
  misc_feature (522)..(522): "n" may be a, t, c, g, other or unknown
  misc_feature (552)..(552): "n" may be a, t, c, g, other or unknown
ggtttcaactgccagctttaccaatgcagcatttattttaaaattaaattaaattaaaaaaaaaaaaattgcatcaccaggtatttttctcnattaangangcacctgaccaaggtgggccgtggccgggcggcaacaacatcacactgggccatttaaggcagctccttctggcggggcatctgtcttcccntcctttgtcactgtccccanggtggccaccatggctggggctgctgttactgccatnatgggccctanggggaccnccacggccagtgcaaaaaaaantgctggggtnggtatggcggggccanccttgctcaatgctgtggtgatggccacantaacctcggggggcacanccacggctggggcaacaatcacttcctttggcccngggcaagcaaggcttaacaaccngctgtcaacacacccgacctgccgaacgcctcctctnttctggccactnttggcacnggggggctccccgnccgggaaccctctcacccatncattggnatccttccttcttgttcccacccccctttng

SEQ ID NO: 9695 - DNA, 424 bp, Homo sapiens
  misc_feature (26)..(26): "n" may be a, t, c, g, other or unknown
  misc_feature (38)..(38): "n" may be a, t, c, g, other or unknown
  misc_feature (109)..(109): "n" may be a, t, c, g, other or unknown
  misc_feature (119)..(119): "n" may be a, t, c, g, other or unknown
  misc_feature (168)..(168): "n" may be a, t, c, g, other or unknown
  misc_feature (360)..(360): "n" may be a, t, c, g, other or unknown
  misc_feature (362)..(362): "n" may be a, t, c, g, other or unknown
  misc_feature (382)..(382): "n" may be a, t, c, g, other or unknown
  misc_feature (400)..(400): "n" may be a, t, c, g, other or unknown
  misc_feature (412)..(413): "n" may be a, t, c, g, other or unknown
  misc_feature (423)..(423): "n" may be a, t, c, g, other or unknown
gagatggagtcttgctctgttgccangctggagtacantggcacaatctcagctcactgcaacctccacctcctgggttcaagcaatttttctgtcccagcctcctgantaactgggantacgggtgcgtgccaccacatccagctaatttttgtatttttagtaaanatggggtttcaccatgttggccgggctggtctcgatcttctgatgttgtgatctacccgcctcagcctcccaaagtgctgggattacaggagtgagccaccgcgcccggctggttatcccactctttaagttctttttgacagtcccaacattgtcacctctcgacgtgtgttttgcagttcgagcctgaananatggatttatgtcataaganctgcctttgtaataaaantggaataaggtnngctaccaaana

SEQ ID NO: 9696 - DNA, 576 bp, Homo sapiens
  misc_feature (174)..(174): "n" may be a, t, c, g, other or unknown
  misc_feature (450)..(450): "n" may be a, t, c, g, other or unknown
aaactttaaaaattattttattatctctgggtgacattttcatttatagtggcatttatatatacacatacatataggaggtgaatgtgagatatattccttagggcttttgataaaacccatatctttatccctagttcatttacaagagagcagcgtaacggtaactttganattttccttttgacagtaatttccattatcatttgaatgggagaaattcttaggacatgatttggaatcatttctagaatataaatttcatataatcttattttataatgagacaaaactgtgtctttgtaacaatacgtgataatttaagcctatgttttaatggttattgacaaagtttaatggcatccaaaatactcttatgtctatctgaatttttttcctgtactcttcttttttcttaaaagcatgatagacccctctgcaaatacagancctttgttgttgctttgctgtactttggtaccttgctgtttattccttaatctaacacaccttagtttggtagtatatcttacttaattgccactaaaaaaaatgctaacctagggttaactggga

SEQ ID NO: 9697 - DNA, 581 bp, Homo sapiens
  misc_feature (132)..(132): "n" may be a, t, c, g, other or unknown
  misc_feature (395)..(395): "n" may be a, t, c, g, other or unknown
  misc_feature (499)..(499): "n" may be a, t, c, g, other or unknown
  misc_feature (507)..(507): "n" may be a, t, c, g, other or unknown
  misc_feature (563)..(563): "n" may be a, t, c, g, other or unknown
  misc_feature (572)..(572): "n" may be a, t, c, g, other or unknown
caaatgcagcatattttaatttgtttcaaataaagcaatatatgtatatatattttttcagaaaaacaccagatgttaaattctacaaaagcgcatgtgtcctcagcagatcatgtttgtctgattattaanaattcttttttgtaacattaactctctaaagacaatcaatggactgacatcactgctacaacacaggttgctaactgagcctctgatcttcagccacatcttgattttcctaataatgagtaaatactgcctggctaaaatgcagcaaagtcttgatgagagaaagcatcaacagatcaagcaaagccatgaaaattatgaagcaagctagagctgattattagaaattagtaaaaatgattaagaagaggatgacacaaccntacgggatttgtatattctgattgacactcttttggcagcgaattgggtcagcacctcgggcagggaaccaaaactgaatgaaaactgctctttttcctcctanctcaggcnaccaacgtcacaccggggactgaaaaaactgctgcatctgtggaaacttctattcnccttggggnaaaaatgca

SEQ ID NO: 9698 - DNA, 570 bp, Homo sapiens
  misc_feature (52)..(52): "n" may be a, t, c, g, other or unknown
  misc_feature (54)..(54): "n" may be a, t, c, g, other or unknown
  misc_feature (359)..(359): "n" may be a, t, c, g, other or unknown
  misc_feature (371)..(371): "n" may be a, t, c, g, other or unknown
  misc_feature (437)..(437): "n" may be a, t, c, g, other or unknown
  misc_feature (477)..(477): "n" may be a, t, c, g, other or unknown
  misc_feature (483)..(483): "n" may be a, t, c, g, other or unknown
attgtcttttatgttaaactttctacaaaaggatgtataaacgggtaagtananaatctctatctacaaaatgttttctcttttaagtattacattacttggtgtacatttaatagactgacatatataagcacataaaaatcattttacgtaatacgctgcgaaatacgttgactcctcctccgcctcacccctgaagtgcctcctcctctatcctccccatcactttcatcatcttctgtctctgctgctgtattatttttagggctgcctcctccaagcagtgaggtaattgctttgttccgagcatttgtgctagctgaaacctccccttcttcttcttcttcatcagggtccanatgttccatganaagtttgaaatctaaatactgttttactatactcccttttcacctcttctgtgattttggaattanccatgtcctccgcaaggaaatccaatgttggttttggatnaaaatnaatcccggttttccggttaaccctttatcatatacttttggcaaatcccaatggaaaattcttctgaattttactatcaaaaaatcc

SEQ ID NO: 9699 - DNA, 512 bp, Homo sapiens
  misc_feature (3)..(3): "n" may be a, t, c, g, other or unknown
  misc_feature (150)..(150): "n" may be a, t, c, g, other or unknown
  misc_feature (220)..(220): "n" may be a, t, c, g, other or unknown
  misc_feature (275)..(275): "n" may be a, t, c, g, other or unknown
  misc_feature (277)..(277): "n" may be a, t, c, g, other or unknown
  misc_feature (309)..(309): "n" may be a, t, c, g, other or unknown
  misc_feature (322)..(322): "n" may be a, t, c, g, other or unknown
  misc_feature (352)..(352): "n" may be a, t, c, g, other or unknown
  misc_feature (445)..(445): "n" may be a, t, c, g, other or unknown
  misc_feature (467)..(467): "n" may be a, t, c, g, other or unknown
  misc_feature (472)..(472): "n" may be a, t, c, g, other or unknown
  misc_feature (485)..(485): "n" may be a, t, c, g, other or unknown
  misc_feature (497)..(497): "n" may be a, t, c, g, other or unknown
  misc_feature (500)..(500): "n" may be a, t, c, g, other or unknown
  misc_feature (505)..(505): "n" may be a, t, c, g, other or unknown
ggnttcaaataacttatttatttctgccttaatttcgttatttacccagtagtcattcaggagcaggttgttcagtttccatgtagttgtgcggttttgagtaagtttcttaatcctgagttctaatttgattgcactgtggtctgaaanactgttgtgatttccgttcttttgcattcggtgtgtagtgttttacttccaattatgtggtcaattttanaataagtgcgatgtggtgctgctaaaaatgtatattctgttgatttgaagtggananttgtgtaaatgtctgcttggtccaaagctganttcaagttctganttctgtaggtctgcttggtccaaaactgantttaagtcctgaatattcttgttaattttctgtctcattgttctgtctaatattgacagtggaatgtcaaatctcccattattattgtgtganaatctaagtctcttgtaggtcnctaanaacttgccttatnaatctgggtgcnccngtatngggtgca

SEQ ID NO: 9700 - DNA, 569 bp, Homo sapiens
  misc_feature (48)..(48): "n" may be a, t, c, g, other or unknown
  misc_feature (117)..(117): "n" may be a, t, c, g, other or unknown
  misc_feature (230)..(230): "n" may be a, t, c, g, other or unknown
  misc_feature (300)..(300): "n" may be a, t, c, g, other or unknown
  misc_feature (381)..(381): "n" may be a, t, c, g, other or unknown
  misc_feature (393)..(393): "n" may be a, t, c, g, other or unknown
  misc_feature (436)..(436): "n" may be a, t, c, g, other or unknown
  misc_feature (494)..(494): "n" may be a, t, c, g, other or unknown
  misc_feature (528)..(528): "n" may be a, t, c, g, other or unknown
  misc_feature (531)..(531): "n" may be a, t, c, g, other or unknown
  misc_feature (558)..(558): "n" may be a, t, c, g, other or unknown
  misc_feature (564)..(564): "n" may be a, t, c, g, other or unknown
  misc_feature (568)..(568): "n" may be a, t, c, g, other or unknown
agctcatcatctattattagtgttagcgtattttatgtgtggccgaanacacattcttcttctaatgtggcccaggaaagtcaaaagtttggacacccctgctctaaggcaaggaanaaaatgttttgttaaaccattctaatttgggcaacaatattattgactgtgataaagataacaacaatgatgaattgatgacacttttgtaaattgctttatagttcaaagancattttcacatatatttgtttaaatatctgtctttcctacttctgaatttcttgagggtatgtctgaaanttttaagtatgaattccagcattatctgagcaaatccaggcctcagtttcctttaggtataaaggtttgtgttttggatanttttaagtgtanacacagggcacatgtatgcttttaattcagttcttcaattaanatgatctttggaggaaaaaactctcctgatgaattttaaaaaacaaacacaggtttanatacaaaaaaactctggctggcatctggcgggantantaataatgggcctcttacattgttcangaaagngtgna

SEQ ID NO: 9701 - DNA, 568 bp, Homo sapiens
  misc_feature (380)..(380): "n" may be a, t, c, g, other or unknown
  misc_feature (520)..(520): "n" may be a, t, c, g, other or unknown
  misc_feature (526)..(526): "n" may be a, t, c, g, other or unknown
  misc_feature (528)..(528): "n" may be a, t, c, g, other or unknown
  misc_feature (537)..(537): "n" may be a, t, c, g, other or unknown
  misc_feature (559)..(559): "n" may be a, t, c, g, other or unknown
aaagaaacttggattgttttaattggtttaaatgcagggtatatgtaaacaactccccagaaatgagaggcacttctcggaaatacaataacccatgtcactagactagcaaaacactcagtgcttttgacttgatgaattgaatgagttcatgattcaactttctaatgttgtctacttgaaaaatagcaagattcttatctgcagcatttaatgcattaagatgtattagataggcatatcagatatcataaaattaaaattgtgcttatgttaattctgtaatagacctaactttaaaacacctcatgttattcactaggagctatgatctagtcgtgacaatattggttaaaatagtccatctgaggcagaaagtnaacaagcaaagtcacttttgcaggctttttaaactgtataacacatgaaattatgactattccccagattatgcaaccagcttcaatttaaaaagctgggaacaaatattatgaagggttactccccattccttcctttncctttntntttgaaacngaatttccccctgttgcccagncgggattgc

SEQ ID NO: 9702 - DNA, 562 bp, Homo sapiens
  misc_feature (5)..(5): "n" may be a, t, c, g, other or unknown
  misc_feature (167)..(167): "n" may be a, t, c, g, other or unknown
  misc_feature (226)..(226): "n" may be a, t, c, g, other or unknown
  misc_feature (228)..(228): "n" may be a, t, c, g, other or unknown
  misc_feature (451)..(451): "n" may be a, t, c, g, other or unknown
  misc_feature (524)..(524): "n" may be a, t, c, g, other or unknown
  misc_feature (533)..(533): "n" may be a, t, c, g, other or unknown
  misc_feature (552)..(552): "n" may be a, t, c, g, other or unknown
  misc_feature (559)..(560): "n" may be a, t, c, g, other or unknown
cccanatagccatttgttcatttattaacaccagaggcaataacaacgctaaaaataaacatgcatcaattgtacaataaatacttacaaaaacctctgtctgtcacaattagtgagtgcaaacagaacttctacccaaccttagtgcatttttattttcacaagtnaaacagaaaaggaaaatagtgaatttaatgctattcagcacctttagtaaagtcaaaanantcaacatctccatatatcaaaaacatttgcatctgtatcaccaaacatgtaaagttaattattttgttccatctttaacatgaattattttatgtacattactttttagttcaataaattttaacaatatttaaaaattatctaaattcataaaagtatttcataaatttcaacatttaattattatgtacatataagggaagtccacgaaaaaagttaaaanaaaatgttttcataaagttcaaagccacattaccaattttagcaaaaaatcccaccaaatcaagggggaaggnatccaaacnttccaaaatcttatctgcngccaaanntt

SEQ ID NO: 9703 - DNA, 570 bp, Homo sapiens
  misc_feature (136)..(136): "n" may be a, t, c, g, other or unknown
  misc_feature (196)..(196): "n" may be a, t, c, g, other or unknown
  misc_feature (259)..(259): "n" may be a, t, c, g, other or unknown
  misc_feature (303)..(303): "n" may be a, t, c, g, other or unknown
  misc_feature (373)..(373): "n" may be a, t, c, g, other or unknown
  misc_feature (485)..(485): "n" may be a, t, c, g, other or unknown
  misc_feature (487)..(487): "n" may be a, t, c, g, other or unknown
  misc_feature (493)..(493): "n" may be a, t, c, g, other or unknown
  misc_feature (502)..(502): "n" may be a, t, c, g, other or unknown
  misc_feature (505)..(505): "n" may be a, t, c, g, other or unknown
  misc_feature (509)..(509): "n" may be a, t, c, g, other or unknown
  misc_feature (557)..(557): "n" may be a, t, c, g, other or unknown
gttgttcatttgaagcaatttttcttttttattattatactttaagttttagggtacatgtgcacagtgtgcaggttagttacatatgtatacatgtgccatgctggtgcgctgcacccactaactcgtcatctancattaggtatatctcccaatgctatccctccccctccccccaccccacaacagtccccanagtgtgatgttccccttcctgtgtccatgtgttctcattgttcagttcccacctatgaatganaatatgcggtgtttggttttttgttcttgcgatagtttactganaatgatgatttccaatttcatccatgtccctacaaaggacatgaactcatcgttttttatggctgcatantattccatggtgtatatgtgccacattttcttaatccaatctgtcattgttggacatttgggttggttccaaatctttgctattgtgaaaaatgccgcaataaacatacacntncgtttntctttatancancatnaattaaaatcccttggggtttatacccattaatgggaaagctgggtcnaatggtattccca

SEQ ID NO: 9704 - DNA, 543 bp, Homo sapiens
  misc_feature (424)..(424): "n" may be a, t, c, g, other or unknown
  misc_feature (445)..(446): "n" may be a, t, c, g, other or unknown
  misc_feature (461)..(461): "n" may be a, t, c, g, other or unknown
  misc_feature (468)..(468): "n" may be a, t, c, g, other or unknown
  misc_feature (502)..(502): "n" may be a, t, c, g, other or unknown
  misc_feature (522)..(522): "n" may be a, t, c, g, other or unknown
  misc_feature (536)..(536): "n" may be a, t, c, g, other or unknown
ggtggtgatagttacacaacattatgaatgtgtttaattccactgaactgtgttcttaaaaatggttgagatggtaaaatttatgttctatgtattttaccacaataaaatgaaattgatagggaaaagatgaggcaagtacatttgtaaggaaaacagaaagcttggaccaattcttatatataaagcaagtaatatttcatgtataatcttaatctcagatggtaggtaaagaccactgtaaaactaaccagtacccttgagtgtcacaggcacatttcatttccaaagcttatgagattgtaagtaaccagaaccacttgacaagatacctgaataaatgaagcgaaggatgtctgataaacaagaacagaagagggcgtctttaacaatgactcgtaatggtgggttgcctgaagattcntggctagcacctggaaatgcnntatctctgtttatanccaaaanattctggggtttttcccgaaaaaaccggaatccngaatttcttggaaacccccnttgaaaaccccttnaaacctg

SEQ ID NO: 9705 - DNA, 574 bp, Homo sapiens
  misc_feature (150)..(150): "n" may be a, t, c, g, other or unknown
  misc_feature (322)..(322): "n" may be a, t, c, g, other or unknown
  misc_feature (392)..(392): "n" may be a, t, c, g, other or unknown
  misc_feature (423)..(423): "n" may be a, t, c, g, other or unknown
  misc_feature (429)..(429): "n" may be a, t, c, g, other or unknown
  misc_feature (470)..(470): "n" may be a, t, c, g, other or unknown
  misc_feature (482)..(482): "n" may be a, t, c, g, other or unknown
  misc_feature (539)..(539): "n" may be a, t, c, g, other or unknown
  misc_feature (548)..(548): "n" may be a, t, c, g, other or unknown
  misc_feature (552)..(552): "n" may be a, t, c, g, other or unknown
  misc_feature (568)..(568): "n" may be a, t, c, g, other or unknown
acaaacaagactagcttatagcaaattctctatagctaagggtcaatttaaaatccttggcttatatctccccctcactcaatgactacatgatgcaaactaattttattaacaccttaagcaaaacatactggaatttcacaaaatgtncaagatttcaatatttaaggaactggggttaggaagcaaaagtggctttcaggtcttccagtctttctctcaagtaataaagctctgctgtgaatattcaaagctattgggaaattaccggtagatttttctgttttttttttttcggttttccactatgttgtttctctanatatgtaagcttactctattaaccaaaatctcagcttgaccattcttgataagtacctaatcgacatgtnactttttttctgccttaaatatgtataacanggacanaacccttaaatctgatcaattattaattcctgatttacaanttctatggtganctaacaaaacttatccatgcctttattgccctttactaacccaattttaaaaaggtnggaattaancccncccaaccaattatccngtcagt

SEQ ID NO: 9706 - DNA, 563 bp, Homo sapiens
  misc_feature (146)..(146): "n" may be a, t, c, g, other or unknown
  misc_feature (427)..(427): "n" may be a, t, c, g, other or unknown
  misc_feature (436)..(436): "n" may be a, t, c, g, other or unknown
  misc_feature (495)..(495): "n" may be a, t, c, g, other or unknown
  misc_feature (505)..(505): "n" may be a, t, c, g, other or unknown
  misc_feature (517)..(517): "n" may be a, t, c, g, other or unknown
  misc_feature (528)..(528): "n" may be a, t, c, g, other or unknown
gtttttaaacagctttactgaggtataattgacatatcataacattcacctattttaagtgtacagtttaattatttttagtaaaattttagacttgtttgaccatcatcacaatcttgttttggaacatttctataattcctaanaaatccctcatgctcatcaataccaccccttattcccactccccagctccagacaacccctaattgacttactgacactacagatttgtcttttctggatatcataaaaatagagtcatacaacatgtggttttttgtatctgtcttctttcacttagattaatgtgcttttgtggttcacctgtgttgtagcacgtatcaatattttatttttttaggtgctagattctattaaattgtatggatcactcccatttgtttattctttcatcagctgatanatatttgangtgtttctactttatggactattatggataaagctgctactaatattcccattccagtnttgtgtgganataggttttttncccttggaatnaacaccaggaatgaaattgccaggttatacggtaa

SEQ ID NO: 9707 - DNA, 522 bp, Homo sapiens
  misc_feature (138)..(138): "n" may be a, t, c, g, other or unknown
  misc_feature (315)..(315): "n" may be a, t, c, g, other or unknown
  misc_feature (369)..(369): "n" may be a, t, c, g, other or unknown
  misc_feature (402)..(402): "n" may be a, t, c, g, other or unknown
  misc_feature (448)..(448): "n" may be a, t, c, g, other or unknown
  misc_feature (461)..(461): "n" may be a, t, c, g, other or unknown
  misc_feature (463)..(463): "n" may be a, t, c, g, other or unknown
  misc_feature (499)..(499): "n" may be a, t, c, g, other or unknown
  misc_feature (503)..(503): "n" may be a, t, c, g, other or unknown
  misc_feature (505)..(505): "n" may be a, t, c, g, other or unknown
  misc_feature (508)..(508): "n" may be a, t, c, g, other or unknown
caaatatttaattggaaggaactacatctggaataagttttaaaggaatccatataaaaagaaaagcaaatccattagaaattgatataaacagttgattttatctggaaccaagaatgtgaatgaattggaacctanatgtcctaacctgtttctttgcataaaagccagttgaattttgaaatttatatggcaattatactttattactttacatagagctttgtttttagctaatattttagagacagattacccaaaattacctaatttggttcccacttcattccttctcaaaaaccaaacataaaacanaagggggccagctgtggtggctcatgcctgtaatcccaccactttgggaagccnaagaagggtggatcactaggtcaggattttganaccaccctgaccaacatggtgaaaccccgtctctactaaaaatacnaaaatcccccagntntggtggccctgcctgttatccccaaatacttaggangctnangcnggaaaatcccttga

SEQ ID NO: 9708 - DNA, 512 bp, Homo sapiens
  misc_feature (431)..(431): "n" may be a, t, c, g, other or unknown
  misc_feature (451)..(451): "n" may be a, t, c, g, other or unknown
  misc_feature (472)..(472): "n" may be a, t, c, g, other or unknown
  misc_feature (479)..(479): "n" may be a, t, c, g, other or unknown
  misc_feature (481)..(481): "n" may be a, t, c, g, other or unknown
  misc_feature (505)..(505): "n" may be a, t, c, g, other or unknown
  misc_feature (512)..(512): "n" may be a, t, c, g, other or unknown
acaacaaaactttacatggttttattatacattactgttattgaaagcaaactttatacaaaaagttttatacagataaaaaaaatccttggctaggcaaagccgtttatgtgtgtgcatatacagaaacacacatacatacatatacacacggtattttacatcataattatacatatttataaatacattatttaaattattttacaatataccaaaacaaggaggcaattataaaagcaaataaaaaatggatgaacaattgaactaaatagtcactaagtttaaaatgctacaaaactatttttttaatctagaaagtcatttctttaaaatatcaaaactaagatttcaatacatcactgttgctttcattttggtaagttctaacatgtttaaaaataaatattttgaccaaaaacagataagcnaatcagaatgatgactagcncaagctgaacatgctgatgtnaaattananaatccctgagtataaccaatatanattatcn

SEQ ID NO: 9709 - DNA, 460 bp, Homo sapiens
  misc_feature (42)..(42): "n" may be a, t, c, g, other or unknown
  misc_feature (85)..(85): "n" may be a, t, c, g, other or unknown
  misc_feature (90)..(90): "n" may be a, t, c, g, other or unknown
  misc_feature (364)..(364): "n" may be a, t, c, g, other or unknown
  misc_feature (391)..(391): "n" may be a, t, c, g, other or unknown
  misc_feature (411)..(411): "n" may be a, t, c, g, other or unknown
  misc_feature (418)..(418): "n" may be a, t, c, g, other or unknown
  misc_feature (434)..(434): "n" may be a, t, c, g, other or unknown
  misc_feature (451)..(451): "n" may be a, t, c, g, other or unknown
  misc_feature (453)..(453): "n" may be a, t, c, g, other or unknown
ccatttttatttgatgtttccaaatataaaaaaatcagggantcttacatcaattatctcaaatgaaaacatgcaaagcaattcngtgtntacaacaatcatttttccccttcagttctgctgctttatacaacagtgtgattgacaaaaaattggatggcatgtgcctgggtcagaaaatgtcatctgtttacaaaataacatcatgcagcacagtttctactttgtctgcaagtcaattcacaaaaactacttattttctgttttttatttgggaggcacatggaactgaaaaatttagctgcccaattttattcaactaccccaccaaaaaaaaaaaaaaaaatcacaaatgacagtcccnacactctgcaaattttggagggttganatagtaaacactatttgtcntactccncagaatttactatttnacagaaattaatctccnangggcctt

SEQ ID NO: 9710 - DNA, 435 bp, Homo sapiens
  misc_feature (31)..(31): "n" may be a, t, c, g, other or unknown
  misc_feature (283)..(283): "n" may be a, t, c, g, other or unknown
  misc_feature (308)..(308): "n" may be a, t, c, g, other or unknown
  misc_feature (316)..(316): "n" may be a, t, c, g, other or unknown
  misc_feature (318)..(318): "n" may be a, t, c, g, other or unknown
  misc_feature (356)..(357): "n" may be a, t, c, g, other or unknown
  misc_feature (368)..(368): "n" may be a, t, c, g, other or unknown
  misc_feature (411)..(411): "n" may be a, t, c, g, other or unknown
  misc_feature (423)..(423): "n" may be a, t, c, g, other or unknown
  misc_feature (433)..(433): "n" may be a, t, c, g, other or unknown
  misc_feature (435)..(435): "n" may be a, t, c, g, other or unknown
gaataatattatgggggggggggctaagacntttaaattaatattgttttcacatcaaggaaccatcgtcagaacaaagttcccttgtaatggtcggccctgtcaatgaaattttcattaggatgataatgtgcaaggagcacggagagaaaggacaaggcagtgaacacatgcattccagtggagggagaacgaggctgatgtgcaacacaactgaggaaaatttatagattaaactattcaaaactgctaagcagcctcctgtaccacataagtccagtanttctaagaaaatacagatatggtanaaaaagtnanaaaattttcaccacaaaaccaatagttaactactaacnnagaaagttatncacaaaatatatctctcaatacagtgatcacacctcatcttantcaaccgactcnatggccggancn

SEQ ID NO: 9711 - DNA, 392 bp, Homo sapiens
  misc_feature (186)..(186): "n" may be a, t, c, g, other or unknown
  misc_feature (252)..(252): "n" may be a, t, c, g, other or unknown
  misc_feature (287)..(287): "n" may be a, t, c, g, other or unknown
  misc_feature (295)..(295): "n" may be a, t, c, g, other or unknown
  misc_feature (307)..(307): "n" may be a, t, c, g, other or unknown
  misc_feature (341)..(341): "n" may be a, t, c, g, other or unknown
  misc_feature (343)..(343): "n" may be a, t, c, g, other or unknown
  misc_feature (355)..(355): "n" may be a, t, c, g, other or unknown
  misc_feature (363)..(363): "n" may be a, t, c, g, other or unknown
  misc_feature (389)..(389): "n" may be a, t, c, g, other or unknown
agagacagtgaaagattttatttttttttttactttcatccaaacacacccttttctaaaaaacataaaagcatgcacatcgacgggattcttataaagaaaaattaataactaagctgtaaatcagtaataatacaaacaaaagtttaaatgatatgtgaaaagacttacaggtaggtatacggntcttaattttagaaaataactcaagtcagtatcaatacaggttaaggagaagcttctaattttccnaacattttgatacaaaatttttttcaacgactgtnttttatanaccttttgtganaaaattagtatagttctatgaaacctaacattcnantgatcttatgcnggtcaggntaccttgtttaaatgagttagaaccncat

SEQ ID NO: 9712 - DNA, 516 bp, Homo sapiens
  misc_feature (227)..(227): "n" may be a, t, c, g, other or unknown
  misc_feature (270)..(270): "n" may be a, t, c, g, other or unknown
  misc_feature (294)..(294): "n" may be a, t, c, g, other or unknown
  misc_feature (317)..(317): "n" may be a, t, c, g, other or unknown
  misc_feature (326)..(326): "n" may be a, t, c, g, other or unknown
  misc_feature (363)..(363): "n" may be a, t, c, g, other or unknown
  misc_feature (369)..(369): "n" may be a, t, c, g, other or unknown
  misc_feature (398)..(398): "n" may be a, t, c, g, other or unknown
  misc_feature (432)..(432): "n" may be a, t, c, g, other or unknown
  misc_feature (451)..(451): "n" may be a, t, c, g, other or unknown
  misc_feature (454)..(454): "n" may be a, t, c, g, other or unknown
  misc_feature (461)..(461): "n" may be a, t, c, g, other or unknown
  misc_feature (498)..(498): "n" may be a, t, c, g, other or unknown
  misc_feature (500)..(500): "n" may be a, t, c, g, other or unknown
  misc_feature (511)..(511): "n" may be a, t, c, g, other or unknown
gcatcttaagacaaatattcttttatttctgttaaactgaatatacaattgttccctaggcaaccaacttttgcttataactacaatttaatttcacgttgacaaaacacagtgaaaagacaactttgtgaagatctaattacaataataaataaaataatttatacaagggtttttttttcttgacttttctataggggtcatattcattaaaaagcccaaaaggntacctttgccttaacccttctgtagtacaggaatgattcttanatttgtttccttttgttataaaancaaatattgtttttttaaaatancctgaaatnaaaggttatattgtaccccaccagctaacacactaantggatnacaaactattctctcggtaatttatatancaaaacatctaataaatggtcatggtatcaaggnataggtaacattacttccnccncatttanttttacttcaaagtgctaactttgttaaactaatganantggttcctganggggt

SEQ ID NO: 9713 - DNA, 466 bp, Homo sapiens
  misc_feature (159)..(159): "n" may be a, t, c, g, other or unknown
  misc_feature (211)..(211): "n" may be a, t, c, g, other or unknown
  misc_feature (213)..(213): "n" may be a, t, c, g, other or unknown
  misc_feature (268)..(268): "n" may be a, t, c, g, other or unknown
  misc_feature (280)..(280): "n" may be a, t, c, g, other or unknown
  misc_feature (298)..(298): "n" may be a, t, c, g, other or unknown
  misc_feature (306)..(306): "n" may be a, t, c, g, other or unknown
  misc_feature (328)..(328): "n" may be a, t, c, g, other or unknown
  misc_feature (395)..(395): "n" may be a, t, c, g, other or unknown
  misc_feature (419)..(419): "n" may be a, t, c, g, other or unknown
  misc_feature (421)..(421): "n" may be a, t, c, g, other or unknown
  misc_feature (430)..(430): "n" may be a, t, c, g, other or unknown
  misc_feature (435)..(435): "n" may be a, t, c, g, other or unknown
  misc_feature (443)..(443): "n" may be a, t, c, g, other or unknown
  misc_feature (451)..(451): "n" may be a, t, c, g, other or unknown
aagaaaagcttgtccaagggcattcaaatttaatggcttttatataatacttggtgtagtgcctcgtggctgcctctgtgagccagaaataaaggaagctcatggattccccaaaaatgaaatgccactttttccctcatcatggatgactttgttaanatgaaccccttttacaggaaaggggttacacaggctgctgataccagtctananagggcacccaccagccaaggctgtgttctaacttaggtgtcataccatcggccanaaaaaccatgtntccataaaggctgtgaanctaactantttatctgtaatttggtcctanttgcttcccttattttatgtcgtttttttttttccttaaataaatctgttcaaataacctccttatnaatcctcccaaatcaatgttcttnanagaaaacantcaanctaaacancaatgatnacttttatggttaaa

SEQ ID NO: 9714 - DNA, 570 bp, Homo sapiens
  misc_feature (17)..(17): "n" may be a, t, c, g, other or unknown
  misc_feature (362)..(362): "n" may be a, t, c, g, other or unknown
  misc_feature (541)..(541): "n" may be a, t, c, g, other or unknown
  misc_feature (545)..(545): "n" may be a, t, c, g, other or unknown
  misc_feature (552)..(552): "n" may be a, t, c, g, other or unknown
ataccttattgaaaganggtttaataaatataattattaaataaatgttaagactttaaatactaacccaagaaaaatttaaaaatacaaattcagtaagacttttgctctaacaacaatttttcaaaacgaatcaacaacaaaaaagtatccagtgtttcttttcttatgaagattattaataaaacgcagtattggtaagcacattttaacagtatgcttttcttttgtagggaaaggagatatggctatgtctaacatcgtgggatccaatgtgtttgatatgttgtgccttggtattccatggtttattaaaactgcatttataaatggatcagctcctgcagaagtaaacagcaganggactaacttacataaccatctctctcaacatttcaattatttttctttttttagcagttcacttcaatggctggaaactaaacagaaagttgggaatagtctgcctattatcatacttggggcttgctacattatcagttctatatgaacttggaattattggaaataataaaataangggnggttganggtgaaaatattaaaatt

SEQ ID NO: 9715 - DNA, 583 bp, Homo sapiens
  misc_feature (63)..(63): "n" may be a, t, c, g, other or unknown
  misc_feature (185)..(185): "n" may be a, t, c, g, other or unknown
  misc_feature (300)..(300): "n" may be a, t, c, g, other or unknown
  misc_feature (402)..(402): "n" may be a, t, c, g, other or unknown
  misc_feature (467)..(467): "n" may be a, t, c, g, other or unknown
  misc_feature (528)..(528): "n" may be a, t, c, g, other or unknown
  misc_feature (572)..(572): "n" may be a, t, c, g, other or unknown
cacaagggataaatagaactttattttaaataaacatttgcactctgtacacagccccagcanaagcagggctcagtcgtcagctgtcttgcgcacatcaaagctgccacagggtcctcgcagcagctctgccagtagcgcaagcagctgcccgtgctcctcctgtacgctggggggaagtgcanccagctcgctgcgcaggctccgctccaccatgcggcccagggcccgccgcagctccttcagcagccgcacggtacgcgagtcaccctccagccgcagcaggtcactgtcgctcantgagatggtggcccggcgcccgtcatcacggatgtgcacgtccccgtcggtcagcagcagcacagctagcgggtgcacctgaagaagagtcccggacgaaanacgctgccattggacttgactgccatgaaatacgtcagccatcggctccgtaaccgtgttgtaancggttcgttgttcctgtccaccaggcccaagctcttcattttcttgcaggccaaggttccnccttattctcacctctgcttttgcgggccctttgggcaacaaangtcttgggggc

SEQ ID NO: 9716 - DNA, 584 bp, Homo sapiens
  misc_feature (483)..(483): "n" may be a, t, c, g, other or unknown
  misc_feature (509)..(509): "n" may be a, t, c, g, other or unknown
  misc_feature (545)..(545): "n" may be a, t, c, g, other or unknown
  misc_feature (583)..(584): "n" may be a, t, c, g, other or unknown
atatgcaccaatacctctctttaatatataaagctctacaacaaatacctctaataattttacaattaaattaagtccatacttctatactactttggtctcaacatttttaaaacatcaattaattttgaaaatttacaatttaacaacatgatcctatcaataacaagcacattttgtagtgaattaaagacacattcaaccatgcaatccagtgttcaataccttaatgataaataacaatgctgattgacttttattttgaaaaatcattgaaaactggaataatcatctgagactcacagtgatcacaaacatgcagaaaaaagcatacaattctattcttcctgaaggaatgttacaaaatgcccacttttttatatagggtcaatatgccaaattacttatatttttcaatccatcatcttctaacatttgtcacttaaatttttcttaaagtacaaatgttcctgttaagttgtnacagaaaatgaaaccccactccttcngtctttaaaaactccgtcccagtccccccctaatanccgcctttaattaaaatatgactccccgtggaaaaatnn

SEQ ID NO: 9717 - DNA, 562 bp, Homo sapiens
  misc_feature (71)..(71): "n" may be a, t, c, g, other or unknown
  misc_feature (103)..(103): "n" may be a, t, c, g, other or unknown
  misc_feature (203)..(203): "n" may be a, t, c, g, other or unknown
  misc_feature (411)..(411): "n" may be a, t, c, g, other or unknown
  misc_feature (469)..(469): "n" may be a, t, c, g, other or unknown
  misc_feature (509)..(509): "n" may be a, t, c, g, other or unknown
  misc_feature (513)..(513): "n" may be a, t, c, g, other or unknown
  misc_feature (532)..(532): "n" may be a, t, c, g, other or unknown
  misc_feature (540)..(540): "n" may be a, t, c, g, other or unknown
  misc_feature (543)..(543): "n" may be a, t, c, g, other or unknown
  misc_feature (551)..(551): "n" may be a, t, c, g, other or unknown
gagcacatacatttccgctttattcaaatattgcataaatacagagcagttgggcacatccattctaaggnactgttctggtttgaatgcaattccgcaaganagaaaagagaagccattacattctgtatttttcatctctacattcagactcctcctatattatatgtttattgctactgggatatcaatttgagccccanacttatagcagcatcatatgttgacctggatgacaagaattaaagatacatcctgggtctagcaattggtataattggcacttaattacaaactctcttgcattattctccacctgtttcccaactcttgtttaactaaaaatattataaaatctttatgagcctgatccatgaattatatttctttactagcttccactaagcctanaacaggactagttaggcacatagtaaataccccccaaagtatttatatcactctcganaacttcaatggaataaagactatacttttcctaattgtanttcnaggaaaggatgactgaacntcttcctnaanggaaaatncctgaattttt

SEQ ID NO: 9718 - DNA, 575 bp, Homo sapiens
  misc_feature (441)..(441): "n" may be a, t, c, g, other or unknown
  misc_feature (496)..(496): "n" may be a, t, c, g, other or unknown
  misc_feature (527)..(527): "n" may be a, t, c, g, other or unknown
  misc_feature (532)..(532): "n" may be a, t, c, g, other or unknown
  misc_feature (551)..(551): "n" may be a, t, c, g, other or unknown
  misc_feature (558)..(558): "n" may be a, t, c, g, other or unknown
ggtaaaaacagaaaattttaatttttatatagttttattaacaagcacacagagaaacgctgatatccctacatgttgaaagtgtcacgataatattctgaaaagtacaaaattcaaatgtctaaattttacatggtaatgcaaaagaaaaaattactaataacaagtatattttattaaaaacttcatttatcatgaaaattagtgagattacaaagattaaactataactgaatttcataccctaatgggtcaagtccctggtctaggagcattagagaggactctctgagcttctgcagcaacttccttagctcttccttagaaaataccaggtacagtttgtggcgctcagaggataccatatctgctaactgtaggcattcctgatactgaccagtactgtgcaatatcgtatgaagcagaaaaccaacattggcngacaaagctttctcagtaagaacatttgatgtgttccttcctggtctcctttggnatcctctctaacatccaccatcccccctccntcaanaaacaacaagaaatttttnattttcnccctcccattcgcagtt

SEQ ID NO: 9719 - DNA, 540 bp, Homo sapiens
  misc_feature (47)..(47): "n" may be a, t, c, g, other or unknown
  misc_feature (65)..(65): "n" may be a, t, c, g, other or unknown
  misc_feature (98)..(98): "n" may be a, t, c, g, other or unknown
  misc_feature (182)..(182): "n" may be a, t, c, g, other or unknown
  misc_feature (197)..(197): "n" may be a, t, c, g, other or unknown
  misc_feature (313)..(313): "n" may be a, t, c, g, other or unknown
  misc_feature (322)..(322): "n" may be a, t, c, g, other or unknown
  misc_feature (364)..(365): "n" may be a, t, c, g, other or unknown
  misc_feature (423)..(423): "n" may be a, t, c, g, other or unknown
  misc_feature (489)..(490): "n" may be a, t, c, g, other or unknown
  misc_feature (493)..(493): "n" may be a, t, c, g, other or unknown
  misc_feature (497)..(497): "n" may be a, t, c, g, other or unknown
  misc_feature (520)..(520): "n" may be a, t, c, g, other or unknown
  misc_feature (532)..(532): "n" may be a, t, c, g, other or unknown
  misc_feature (539)..(539): "n" may be a, t, c, g, other or unknown
ctatttatttatcttatttattatccgtctctcccagctaggatgtnagcctcgtgaaagtggangaagggggcttatttctgaatctccaaatctanaatggtacctgccacacaaatatgtgctccataaacaaatgcactttttcttttctgcactccctgggttgcaggctgcatgcnaagcacgtcctcaanggccagggatctgtctcaagcctttttgaaaaccacccctttcctacgtgccccacacccagctctagcagggtgccctcctgcccctgagcctgccctcatcatgcccattgccnaagcctcangactgaatcacatttttggaatcttcccaaggataaccaatnngcatcattattctacagcgatgctcatgtataattatgattattatcctatatgaacnatccattgctgctgtgtaattccaatgggtaattactggcctctgaagattgaactgggcttgganngtntttncccgttttctctgaaactgcccnctggaacacaancaggttng

SEQ ID NO: 9720 - DNA, 567 bp, Homo sapiens
  misc_feature (53)..(53): "n" may be a, t, c, g, other or unknown
  misc_feature (403)..(403): "n" may be a, t, c, g, other or unknown
  misc_feature (446)..(446): "n" may be a, t, c, g, other or unknown
  misc_feature (501)..(501): "n" may be a, t, c, g, other or unknown
  misc_feature (519)..(519): "n" may be a, t, c, g, other or unknown
  misc_feature (521)..(521): "n" may be a, t, c, g, other or unknown
  misc_feature (536)..(536): "n" may be a, t, c, g, other or unknown
  misc_feature (538)..(538): "n" may be a, t, c, g, other or unknown
  misc_feature (542)..(542): "n" may be a, t, c, g, other or unknown
  misc_feature (566)..(566): "n" may be a, t, c, g, other or unknown
acatttacaaatattaaatttattataactaaaatgaatttaattgttctcanatttggccaccttatagctccgtttaaggaggggatttgttaaaaacaaaaatgcattataacttggtcaaattactttcacattaaggaaaaaaacttctaaaaaggaaaacaagaaaagcaactcttcagtttcacataattaaaagaacaggagaaagcacgcaagctacatatagctaaatttacgaaaccaaccaaagccagggggatttctcttctgattatgtgtcataaaaaggtccactgtcttatatacacatgtatataatgttacattccatcactgtaaaaagtcccctttgccccctcccccaaaaaagtttcagtctagtctccaaacttggaangcggcgctcgctcctgctgccggtgcaattcgttctcggtcancaactggaagttctcggcgcgcaccggtcaactccaactccactcccgcaaaagnccgttttcccacccaacngnttgtctcaaccgaancnggtnttctcctccccctgcccaaaaggnc

SEQ ID NO: 9721 - DNA, 578 bp, Homo sapiens
  misc_feature (159)..(159): "n" may be a, t, c, g, other or unknown
  misc_feature (234)..(234): "n" may be a, t, c, g, other or unknown
  misc_feature (236)..(236): "n" may be a, t, c, g, other or unknown
  misc_feature (238)..(238): "n" may be a, t, c, g, other or unknown
  misc_feature (433)..(433): "n" may be a, t, c, g, other or unknown
  misc_feature (492)..(492): "n" may be a, t, c, g, other or unknown
  misc_feature (495)..(495): "n" may be a, t, c, g, other or unknown
  misc_feature (553)..(553): "n" may be a, t, c, g, other or unknown
  misc_feature (556)..(556): "n" may be a, t, c, g, other or unknown
  misc_feature (575)..(575): "n" may be a, t, c, g, other or unknown
acgtttcattatagtttttaatttgtatactttttgtttactcataaggcagaacacgattttaaatataaacacacatacataaacatacatatgtacacattttgattactcatgaggcaaaacatgttcatatatatttgtgtgtgtgtatttttncccatttgttttggcatttcccttaaacaggatgttaaaagataaagaaatagatttagtctatttttctgctanananaggggcctcacacttcttgttgatttgcaaatgcccttctcctctttgtaagtataagaaatatcaacttctttatttattgtggtaaatatacataacataaaagtgatgattttaaccacatttaaatgtgcagttctgtggcattaagtacattcacactgttgagcacccataaccatcatccatctccanaactttttaccttcccaaactaaaactccggacccactaaacactcactcctccattgnccnctccccccagcccttgggaaccaccaatcctatttcctggtctctgtgaaactgaacngcnccaaaatcccccatataantta

SEQ ID NO: 9722 - DNA, 538 bp, Homo sapiens
  misc_feature (457)..(457): "n" may be a, t, c, g, other or unknown
  misc_feature (464)..(464): "n" may be a, t, c, g, other or unknown
  misc_feature (476)..(476): "n" may be a, t, c, g, other or unknown
  misc_feature (486)..(486): "n" may be a, t, c, g, other or unknown
  misc_feature (509)..(509): "n" may be a, t, c, g, other or unknown
  misc_feature (519)..(519): "n" may be a, t, c, g, other or unknown
  misc_feature (524)..(524): "n" may be a, t, c, g, other or unknown
aagaatttgtaccagtaaatttattccaagtaagacttgtgtgcacacaccaggcagataatttccacacaaacaccaaacattgtagtaaaactagttaacactttggccatgaaactcaaagatacttgaaaaacctctcgatagcactttgagtcacttaattctgacaaatattaatatgtcatccatgcttgcccagttataattttacaatataattgtatttttcattgtacttattattcattatacttactatatatatttaaaacatctttgctgaaattctcttatcccaaaaataatttttcagtaactccaaaatacccacatgtacctcttagcaggctattccaatatcaaaattctttttcttcaagtaacaagttctcaatccacaccattcctgatcacagatataactgatatgcagttttataaacagctctttacncctggtnccaattttagcngggcaaccanccttccctgatatcccaaatttncttggcacanaatcntccatagctttggg

SEQ ID NO: 9723 - DNA, 569 bp, Homo sapiens
  misc_feature (11)..(11): "n" may be a, t, c, g, other or unknown
  misc_feature (131)..(131): "n" may be a, t, c, g, other or unknown
  misc_feature (434)..(434): "n" may be a, t, c, g, other or unknown
  misc_feature (469)..(469): "n" may be a, t, c, g, other or unknown
  misc_feature (499)..(499): "n" may be a, t, c, g, other or unknown
  misc_feature (504)..(504): "n" may be a, t, c, g, other or unknown
  misc_feature (519)..(519): "n" may be a, t, c, g, other or unknown
  misc_feature (521)..(521): "n" may be a, t, c, g, other or unknown
  misc_feature (527)..(527): "n" may be a, t, c, g, other or unknown
  misc_feature (547)..(547): "n" may be a, t, c, g, other or unknown
gcctgttgtanaatattgtttatttctgggcataaattgttgaatgatgcaaaacaaattttatgacacaaattagtattgcttgacacaataaaaaaaggttaattatttaatgatatatcttcatttangttcccttgattggggacatgggtaactaacttaaacaaactaccttacttgacataaaacttataacaagggaaaaaagttaacaacttaaagagataataaaatcaaagcctattatgttattaaaaagattcacgagttactaccactactattactagttaatatttattgaattactctgtgcttggaactgttctatgcattttacttgtgttatctcatttgatgctcacaacaaccttgtgaggtaggtattattgttatcatcatcatccccattttaaaaggaagaaattgangccccaagaaaataggtaccttgcccaaggtcccncactgaaaatggtaggtttggaattgaccnaaacntctgaccagattttnanactaantccggaatttaaattggttngctcctatttacaatcctatac

SEQ ID NO: 9724 - DNA, 566 bp, Homo sapiens
  misc_feature (37)..(37): "n" may be a, t, c, g, other or unknown
  misc_feature (162)..(162): "n" may be a, t, c, g, other or unknown
  misc_feature (179)..(179): "n" may be a, t, c, g, other or unknown
  misc_feature (181)..(181): "n" may be a, t, c, g, other or unknown
  misc_feature (240)..(240): "n" may be a, t, c, g, other or unknown
  misc_feature (266)..(266): "n" may be a, t, c, g, other or unknown
  misc_feature (274)..(274): "n" may be a, t, c, g, other or unknown
  misc_feature (314)..(314): "n" may be a, t, c, g, other or unknown
  misc_feature (389)..(389): "n" may be a, t, c, g, other or unknown
  misc_feature (425)..(425): "n" may be a, t, c, g, other or unknown
  misc_feature (432)..(432): "n" may be a, t, c, g, other or unknown
  misc_feature (454)..(454): "n" may be a, t, c, g, other or unknown
  misc_feature (472)..(472): "n" may be a, t, c, g, other or unknown
  misc_feature (508)..(508): "n" may be a, t, c, g, other or unknown
  misc_feature (541)..(541): "n" may be a, t, c, g, other or unknown
  misc_feature (545)..(545): "n" may be a, t, c, g, other or unknown
  misc_feature (564)..(564): "n" may be a, t, c, g, other or unknown
gtggaatgtcatttctctttatagaattataggcaanatttctccaataaaacttaacttaagccagttataaaactataacttcacatcaaaatttaaaaaagttaaaaaatgtgtttgaatatgtacatatcacacagaagtggttgaatgttcttgcanattgtgttgctggtcanantccagtctactttccacttttaaaactggaataggctgagtcttctgatcttgctgtanattaagttctgatgcaggtgggaaanatgatgangcagttgttaacagctgaatctctgtgcatgcttcttcanattcagtttttatcctcacacattgggagtcaacttctaattctcgctttccagttaaaccacagtccatgttanaattgctttctgtgttttgagtggcttccacaacanggtggtnctgtttaagccttatatgccangctaaactgcacccgccnaaactgttttgaactgatgaatgactttctagggangaaattaaatatcattgtccccaactgaaatcncacntaacaaatgcctccccccnct

SEQ ID NO: 9725 - DNA, 535 bp, Homo sapiens
  misc_feature (339)..(339): "n" may be a, t, c, g, other or unknown
  misc_feature (354)..(354): "n" may be a, t, c, g, other or unknown
  misc_feature (416)..(416): "n" may be a, t, c, g, other or unknown
  misc_feature (438)..(438): "n" may be a, t, c, g, other or unknown
  misc_feature (472)..(472): "n" may be a, t, c, g, other or unknown
  misc_feature (503)..(503): "n" may be a, t, c, g, other or unknown
  misc_feature (510)..(510): "n" may be a, t, c, g, other or unknown
  misc_feature (517)..(518): "n" may be a, t, c, g, other or unknown
  misc_feature (526)..(526): "n" may be a, t, c, g, other or unknown
gctgcaagtgtttattctatttagaagtctacaaatttgagcttttaagaaagattcacaaaatattcattcaaaaccacatttttggcttatcaaatttcaaatatattttactgtgctgaacaatatattctaatgctgtctaaaacacagctaaattatttttctttatttgtttatacacattcggtaatttctgaaaagcaagatttaaaaatatttattaacaaactacccaattacaatgactgttctcccatacacgcaactattttctgtagctgtatcttcttacctcattccactttaactctgtataccgtattgatttgtgatganatgatttattatganaactcttagggagttctcatcttccatttctcatcaattcaaacagcaacacctttcacaanataacattaattcccttggcanggcaaaaaacttaagtttggttaaaaagcactcnctgaaaaacatttttaaatttataggtcctnttaaatnttttccnngaaaacgnatgactccc

SEQ ID NO: 9726 - DNA, 556 bp, Homo sapiens
  misc_feature (20)..(20): "n" may be a, t, c, g, other or unknown
  misc_feature (23)..(23): "n" may be a, t, c, g, other or unknown
  misc_feature (79)..(79): "n" may be a, t, c, g, other or unknown
  misc_feature (402)..(402): "n" may be a, t, c, g, other or unknown
  misc_feature (503)..(503): "n" may be a, t, c, g, other or unknown
  misc_feature (507)..(507): "n" may be a, t, c, g, other or unknown
  misc_feature (515)..(515): "n" may be a, t, c, g, other or unknown
  misc_feature (524)..(524): "n" may be a, t, c, g, other or unknown
  misc_feature (530)..(530): "n" may be a, t, c, g, other or unknown
  misc_feature (536)..(536): "n" may be a, t, c, g, other or unknown
  misc_feature (544)..(544): "n" may be a, t, c, g, other or unknown
ggggtagagttctgtattantcnaggtaaatatactgtcttgaggatggggatgcaaacagtgctctgtagtgttgtanaaatcggattttgaaattatcagtacaaaaataacagcttgattaaaattaatttgtatctgataattgtttacaagttatgaaattcagtgatgatttacaaaatccaaacagacaatggatacctaatgccactgagctgtaaaacaaaagttatgctgacatctagtggtaacatacaaaaaatctatgctttacccaattttgatgatatcatttctcttcacaaatttcactcctttgttgatatactttcctgaactcttcaccaagcagatcaatatcatcctcttttttaaatactcctttagggagatacctantaagtttgtacatgctctttaagaaattttagcccttcctcctccataattgcattaataaatccctggcgcctttgctgcactgccactcctccaattcncttntttgtctncaaggaatntttggngaaacncctccatnaatttttcccaa

SEQ ID NO: 9727 - DNA, 598 bp, Homo sapiens
  misc_feature (209)..(209): "n" may be a, t, c, g, other or unknown
  misc_feature (286)..(286): "n" may be a, t, c, g, other or unknown
  misc_feature (410)..(410): "n" may be a, t, c, g, other or unknown
  misc_feature (420)..(420): "n" may be a, t, c, g, other or unknown
  misc_feature (428)..(428): "n" may be a, t, c, g, other or unknown
  misc_feature (453)..(453): "n" may be a, t, c, g, other or unknown
  misc_feature (455)..(455): "n" may be a, t, c, g, other or unknown
  misc_feature (465)..(465): "n" may be a, t, c, g, other or unknown
  misc_feature (476)..(476): "n" may be a, t, c, g, other or unknown
  misc_feature (512)..(512): "n" may be a, t, c, g, other or unknown
  misc_feature (550)..(550): "n" may be a, t, c, g, other or unknown
  misc_feature (555)..(555): "n" may be a, t, c, g, other or unknown
  misc_feature (577)..(577): "n" may be a, t, c, g, other or unknown
  misc_feature (582)..(582): "n" may be a, t, c, g, other or unknown
  misc_feature (597)..(598): "n" may be a, t, c, g, other or unknown
ggtgaacgaaattttttatttacacactgtatctagaagcagatacataaattcttatacaattaatttccaaaaatgtgcaagaaattactataatttgtttacaaaccaaaacacgtattaaaatcaatggactttggataattcattctgtggtgttctcagtacaaatggtacacacctgatttgaaacatacagaaaaagtgtnaactaccgcaatctgaattgcaagtattaatttcatggcactccaacgactatgaaatttctttcacccaacatgtnaatacttgttacaaaattctataagaatttttcataatctctggatgtagagtttggatcacttttcagaaacagcaactacacacttcgccatgttatgactgattaataaaaagaatgtttntaaaaacccntccttacnggattaaaaaagtttttaaagaaancntatttgtgantggcaatgttnccccccttttgaaattttaaatttttttcggaaccngggtttgttccctattaaaatttccaaaaaaccgtccnatggngggggtggtggttccctttggnaattnaaaaccccctttagnn

SEQ ID NO: 9728 - DNA, 381 bp, Homo sapiens
  misc_feature (92)..(92): "n" may be a, t, c, g, other or unknown
  misc_feature (217)..(217): "n" may be a, t, c, g, other or unknown
  misc_feature (220)..(220): "n" may be a, t, c, g, other or unknown
  misc_feature (238)..(238): "n" may be a, t, c, g, other or unknown
  misc_feature (242)..(242): "n" may be a, t, c, g, other or unknown
  misc_feature (257)..(257): "n" may be a, t, c, g, other or unknown
  misc_feature (273)..(273): "n" may be a, t, c, g, other or unknown
  misc_feature (304)..(304): "n" may be a, t, c, g, other or unknown
  misc_feature (322)..(322): "n" may be a, t, c, g, other or unknown
  misc_feature (346)..(346): "n" may be a, t, c, g, other or unknown
  misc_feature (354)..(354): "n" may be a, t, c, g, other or unknown
  misc_feature (362)..(362): "n" may be a, t, c, g, other or unknown
  misc_feature (376)..(376): "n" may be a, t, c, g, other or unknown
  misc_feature (380)..(380): "n" may be a, t, c, g, other or unknown
cccacctatgccctttccagggcagtttaattggtatcatttgtaaaaggtcttttccatcacccccaaagcctttgcattccctttccaanaaggtggctgtttactggttttggccccatgtgcaacagtaggccttggtatgatgctgccataacactcccatgtgacactccaggtgacatccaagtgcaagtctatgttcagctctggacancangggggaaggtgaggaaantcangtctgtaaattgaanctgggcagggccctgnctggctggaaatgtgtgggcaaggtgagcangccccatgtgcaccccanctccattgcccactgatttggctnaaccccantttggttntggtcaaattaaangtcnt

SEQ ID NO: 9729 - DNA, 551 bp, Homo sapiens; identical to SEQ ID NO: 7449
  misc_feature (1)..(551): "n" may be a, t, c, g, other or unknown

SEQ ID NO: 9730 - DNA, 366 bp, Homo sapiens
  misc_feature (284)..(284): "n" may be a, t, c, g, other or unknown
  misc_feature (297)..(297): "n" may be a, t, c, g, other or unknown
  misc_feature (306)..(306): "n" may be a, t, c, g, other or unknown
  misc_feature (309)..(309): "n" may be a, t, c, g, other or unknown
  misc_feature (341)..(341): "n" may be a, t, c, g, other or unknown
  misc_feature (347)..(347): "n" may be a, t, c, g, other or unknown
  misc_feature (353)..(353): "n" may be a, t, c, g, other or unknown
gttttaccattaacatttattgatgggatggataaatacagattgagaaacatacttgacagcaagatatcaaactgatagccagactataaaatgtatacatcctttttaaattttttgaatttttttacaaagagcccttactataatggtcacttacctcctatcattcacataacagcagtagatatcccaggggtagcatccagagctgaggtgccccaaggaagacagaggcaatggcagaataatatgctgagaaaggactcttaagaagcaatacnaagagaacagacnaaaatctcnccncaaaattgtacctgagtgacaaattggtaaantgtttnactttnttttttcctttcc

SEQ ID NO: 9731 - DNA, 521 bp, Homo sapiens
  misc_feature (26)..(26): "n" may be a, t, c, g, other or unknown
  misc_feature (47)..(47): "n" may be a, t, c, g, other or unknown
  misc_feature (49)..(49): "n" may be a, t, c, g, other or unknown
  misc_feature (54)..(54): "n" may be a, t, c, g, other or unknown
  misc_feature (148)..(148): "n" may be a, t, c, g, other or unknown
  misc_feature (240)..(240): "n" may be a, t, c, g, other or unknown
  misc_feature (245)..(245): "n" may be a, t, c, g, other or unknown
  misc_feature (316)..(316): "n" may be a, t, c, g, other or unknown
  misc_feature (320)..(320): "n" may be a, t, c, g, other or unknown
  misc_feature (327)..(327): "n" may be a, t, c, g, other or unknown
  misc_feature (367)..(367): "n" may be a, t, c, g, other or unknown
  misc_feature (425)..(425): "n" may be a, t, c, g, other or unknown
  misc_feature (429)..(429): "n" may be a, t, c, g, other or unknown
  misc_feature (453)..(453): "n" may be a, t, c, g, other or unknown
  misc_feature (498)..(498): "n" may be a, t, c, g, other or unknown
  misc_feature (503)..(503): "n" may be a, t, c, g, other or unknown
  misc_feature (511)..(512): "n" may be a, t, c, g, other or unknown
aagccaaagtataatttattggaaanatacagtttacataacagcananaaggntgatgaaccagattcagaaagacacagggaacactttagcttctcatcttcaatgtgaataaacctcaatcattttctttgcattatttcaaanaattcatctaattagcttagtttgggtctcatccttattaaaaagttaagggaagtagctgacaatctcaccaaagctctatacaattgcanatganttaattctctaaaagttaactgaggtgctaccactagaaaaaaagaaatggaggcaagacagataaaatcnaganatggtcntattgatgaaacagtatgtcttaaattttcctatgctccnaaatagggaaattaacagctaccttaaattagaaataactaagtgaacagtttcctcnggtncatttagtgaagcatttgttagantcctttctcaatttcctccccattattgttctattccaattctcncctcnaaaaaaanncacttttaa

SEQ ID NO: 9732 - DNA, 584 bp, Homo sapiens
  misc_feature (409)..(409): "n" may be a, t, c, g, other or unknown
  misc_feature (458)..(458): "n" may be a, t, c, g, other or unknown
  misc_feature (532)..(532): "n" may be a, t, c, g, other or unknown
  misc_feature (536)..(536): "n" may be a, t, c, g, other or unknown
  misc_feature (539)..(539): "n" may be a, t, c, g, other or unknown
  misc_feature (583)..(583): "n" may be a, t, c, g, other or unknown
cttttaaagcagaaatgtctttattgtttgaagcatgacaaaataaaattgataggacatttcatttcttacttagtcttctcaatggggttataaaaatacaatgccacttagtttttgtaagctcttgaaaatgtccagaagctcacacttagtatgatattaaaaggcacttataacacacaataagatacttagaaacccatctcatagatacaattgaaatttctttgagaaaaatttctaaatatagaaataaataggacggcactatttcttcttttccaaaacacagaatagcattttccccatgttacctatacacaccataaatgtggacacctcctcccatttttgttcttgatacaggttgataatcaagctgaaattaatttgcttgcttttctcnatttaatctcaatttggtttaaaataaagcaaaattcctaatttgtttnccaggatctttaaaatacccggcttatttccattttggttttaaatcccaatcccttaattaggaaaataagangccnaantttaaaaattcttctatttactgcccaatcccccaagcacaatnt

SEQ ID NO: 9733 - DNA, 434 bp, Homo sapiens
  misc_feature (268)..(268): "n" may be a, t, c, g, other or unknown
  misc_feature (272)..(272): "n" may be a, t, c, g, other or unknown
  misc_feature (343)..(343): "n" may be a, t, c, g, other or unknown
  misc_feature (367)..(367): "n" may be a, t, c, g, other or unknown
  misc_feature (383)..(383): "n" may be a, t, c, g, other or unknown
  misc_feature (392)..(392): "n" may be a, t, c, g, other or unknown
  misc_feature (409)..(409): "n" may be a, t, c, g, other or unknown
  misc_feature (412)..(412): "n" may be a, t, c, g, other or unknown
  misc_feature (421)..(421): "n" may be a, t, c, g, other or unknown
gaaactggaataagtgtttattttctattaataaaaatgaattgtgacaaaagtggactctggcttcccctcccccctacccctctgggataaaaattttccagcattgccaggagctttcaggtacacattaaagaataaaatgaagttaagcagctggagtataggatagtatttgattttcaagatcacccaaagctgcactatcgtcccaaagctgaccaagtagaataaaaagaaaaaaaaaaaaaacaacccatgcgcaaanatanacatttgcttgatctgctggctcagggccaaatgtttaatttgcttctccaaagtcattcatcttcaaaantctgattctgggaaactgatgccnctaccctaaaaccccnctgaccatnttattgtgcatcagttnccncttgtccantaagcatttatcc

SEQ ID NO: 9734 - DNA, 519 bp, Homo sapiens
  misc_feature (1)..(519): "n" may be a, t, c, g, other or unknown
nnnnnnnnnnnnnnnnnnnnnnnnnnnnnnnnnnnnnnnnnnnnnnnnnnnnnnnnnnnnnnnnnnnnnnnnnnnnnnnnnnnnnnnnnnnnnnnnnnnnnnnnnnnnnnnnnnnnnnnnnnnnnnnnnnnnnnnnnnnnnnnnnnnnnnnnnnnnnnnnnnnnnnnnnnnnnnnnnnnnnnnnnnnnnnnnnnnnnnnnnnnnnnnnnnnnnnnnnnnnnnnnnnnnnnnnnnnnnnnnnnnnnnnnnnnnnnnnnnnnnnnnnnnnnnnnnnnnnnnnnnnnnnnnnnnnnnnnnnnnnnnnnnnnnnnnnnnnnnnnnnnnnnnnnnnnnnnnnnnnnnnnnnnnnnnnnnnnnnnnnnnnnnnnnnnnnnnnnnnnnnnnnnnnnnnnnnnnnnnnnnnnnnnnnnnnnnnnnnnnnnnnnnnnnnnnnnnnnnnnnnnnnnnnnnnnnnnnnnnnnnnnnnnnnnnnnnnnnnnnnnnnnnnnnnnnnnnnnnnnnnnnnnnnnnnnnnnnnnn

SEQ ID NO: 9735 - DNA, 353 bp, Homo sapiens
  misc_feature (291)..(291): "n" may be a, t, c, g, other or unknown
  misc_feature (331)..(332): "n" may be a, t, c, g, other or unknown
  misc_feature (345)..(345): "n" may be a, t, c, g, other or unknown
  misc_feature (347)..(347): "n" may be a, t, c, g, other or unknown
  misc_feature (349)..(350): "n" may be a, t, c, g, other or unknown
aagcatttccttcctttggcataaggaatcccatccttggaatcagccatttttccaaagagccagggttcctttcagtgcgaatgttgtaagaaaaaccaagatctgagtcctaggtgctactaagtcttagttacattttggtgcactgcgcttaacacaccattactttataaaatacaaacaagagagatagttcaaataaaatctaaactcataattacttgttggtaagacgactcatacgccttaaactctcctcaaatatattttactgccagttgatagaanaacctggatccccaccccaattcctaattcctaaattttnncccctcccccctnancnngct

SEQ ID NO: 9736 - DNA, 515 bp, Homo sapiens
  misc_feature (261)..(261): "n" may be a, t, c, g, other or unknown
  misc_feature (449)..(449): "n" may be a, t, c, g, other or unknown
  misc_feature (464)..(464): "n" may be a, t, c, g, other or unknown
  misc_feature (479)..(479): "n" may be a, t, c, g, other or unknown
  misc_feature (484)..(484): "n" may be a, t, c, g, other or unknown
  misc_feature (489)..(489): "n" may be a, t, c, g, other or unknown
  misc_feature (494)..(494): "n" may be a, t, c, g, other or unknown
  misc_feature (507)..(507): "n" may be a, t, c, g, other or unknown
attttacaaatccaatatttattttatcttgtatgtacaaaaagtaaactccaagtgaacatcaaatcaaatctaatccttttggccacatgactggttgttctttatctcatagttacaatgaatcatataaactgtagactgccactaccacgatacttctgtgacacagaaggaatgtcctatttgcctatctatctgaggaatgttaaatagagaaaaatagattataaaacaacctggaggtcacaggattctganataatccctctgttaaaaaacatctgaacagcaaatgtccaatctgtaataaaatagttaaaggtccaagtcaagtccacttctacttggctggcccagcacaagaaatctaacagcactttgtaatcattttgcttttctaattttcccggaagacatgggccattgacatataaggaaaaaaaacnaaaaccaaaaacgantaagttagttgtgtnatccnaaccngtganttccaaagaaaanttgccggg

SEQ ID NO: 9737 - DNA, 466 bp, Homo sapiens
  misc_feature (55)..(55): "n" may be a, t, c, g, other or unknown
  misc_feature (298)..(298): "n" may be a, t, c, g, other or unknown
  misc_feature (300)..(300): "n" may be a, t, c, g, other or unknown
  misc_feature (326)..(326): "n" may be a, t, c, g, other or unknown
  misc_feature (373)..(373): "n" may be a, t, c, g, other or unknown
  misc_feature (394)..(394): "n" may be a, t, c, g, other or unknown
  misc_feature (410)..(411): "n" may be a, t, c, g, other or unknown
  misc_feature (452)..(452): "n" may be a, t, c, g, other or unknown
  misc_feature (461)..(461): "n" may be a, t, c, g, other or unknown
  misc_feature (465)..(465): "n" may be a, t, c, g, other or unknown
ataaaacaatttccatgtttaccaaatgcaacacatttccttttctattaagaanaaaaagccggttgcaacccactaaagtgatttgatggccaaagaataggtagcaatttgcattttgaaaaatacttatttaaatagaaatttgtcagacatgtagaaaccagtcacattgtagctctggcagatttctgcaggagatccagtgacacatttcatggtcctagaaatggttttccttactctttgaatctttcacggttgatgaggtggtgttggtgatgaaggccaagggaananagtggagaaaatggtgatgggaggantttaggaggccaagtcttaattctgctcaggcagaaaacagttgaantgtctgtgatgcattgtccanacacgaatgagacacnnaccctggtctatggcggcttataatccaaggtgttgcttcntattaaacngganc

SEQ ID NO: 9738 - DNA, 520 bp, Homo sapiens
  misc_feature (196)..(196): "n" may be a, t, c, g, other or unknown
  misc_feature (272)..(272): "n" may be a, t, c, g, other or unknown
  misc_feature (306)..(306): "n" may be a, t, c, g, other or unknown
  misc_feature (316)..(316): "n" may be a, t, c, g, other or unknown
  misc_feature (328)..(328): "n" may be a, t, c, g, other or unknown
  misc_feature (330)..(330): "n" may be a, t, c, g, other or unknown
  misc_feature (354)..(354): "n" may be a, t, c, g, other or unknown
  misc_feature (369)..(369): "n" may be a, t, c, g, other or unknown
  misc_feature (395)..(395): "n" may be a, t, c, g, other or unknown
  misc_feature (406)..(406): "n" may be a, t, c, g, other or unknown
  misc_feature (441)..(441): "n" may be a, t, c, g, other or unknown
  misc_feature (450)..(450): "n" may be a, t, c, g, other or unknown
  misc_feature (453)..(453): "n" may be a, t, c, g, other or unknown
  misc_feature (473)..(473): "n" may be a, t, c, g, other or unknown
  misc_feature (508)..(508): "n" may be a, t, c, g, other or unknown
  misc_feature (510)..(510): "n" may be a, t, c, g, other or unknown
  misc_feature (520)..(520): "n" may be a, t, c, g, other or unknown
gaagtttggtgatgttttaatgaccaagtgtagggaaaaggatgaggagagatcatgctgttagcaggctctggggatcctatggtcacatggaaagagggattcctcaacaatgaggggtgtggtcatctccataaattgcagacagacattgaggtcagggagacatcttcccacacttgcaaaatcttcatanaacatggtggaagtggatggacaaagatgtatggtgttggccatttattattaccttgggggaaatgccagatganctgatactgatcacggtcagattttggaaacganctgaggatancggtgcaaccananggtgctctggtattcattgtctancaccaagatgctcanatcaaattgtttgccgtccttgaaanaacacattgtnggcatctcccctcacacttccaggccccacacacntggctgtcnatnaccaaacaatgggccaaatncccccccaaaatggaaaggcaaattctgaatttcncnttcccccccn

SEQ ID NO: 9739 - DNA, 518 bp, Homo sapiens
  misc_feature (336)..(336): "n" may be a, t, c, g, other or unknown
  misc_feature (412)..(412): "n" may be a, t, c, g, other or unknown
  misc_feature (432)..(432): "n" may be a, t, c, g, other or unknown
  misc_feature (456)..(456): "n" may be a, t, c, g, other or unknown
  misc_feature (504)..(504): "n" may be a, t, c, g, other or unknown
  misc_feature (506)..(506): "n" may be a, t, c, g, other or unknown
  misc_feature (514)..(514): "n" may be a, t, c, g, other or unknown
  misc_feature (516)..(516): "n" may be a, t, c, g, other or unknown
  misc_feature (518)..(518): "n" may be a, t, c, g, other or unknown
gcactacttaccagaggtttttatttggcctctaatctccatcccagcacagcccgagaattcagcaaatgtctttaggcaagtccaacaaagtatcgaggtcagtttctcacttctctttccttataaaaatcaagcctctatgactttttgtctttccagtgtgagatggcaaaaggcttcattggtttctctgcctcttagtagcaatcctcttcctgatccctttgtttgaattcttcttttattgctctatacctagaatttaaaaatgtcctgtcttttctctccagtaacagacctgacctgttgcaggtgggggagtctgccactganaaacagcaagaaggtactgggttcctcccccctttttggcagtctgggctggctacccttccccccatcttggcanaaaaatggtttctgaccctnctctgggatgggaaattaggaatnaagaaaaggaaaagcccacttttttgctactgccaaaattgcattgcncnctttggantntn

SEQ ID NO: 9740 - DNA, 556 bp, Homo sapiens
  misc_feature (9)..(9): "n" may be a, t, c, g, other or unknown
  misc_feature (25)..(25): "n" may be a, t, c, g, other or unknown
  misc_feature (53)..(53): "n" may be a, t, c, g, other or unknown
  misc_feature (74)..(74): "n" may be a, t, c, g, other or unknown
  misc_feature (77)..(77): "n" may be a, t, c, g, other or unknown
  misc_feature (178)..(178): "n" may be a, t, c, g, other or unknown
  misc_feature (273)..(273): "n" may be a, t, c, g, other or unknown
  misc_feature (275)..(275): "n" may be a, t, c, g, other or unknown
  misc_feature (309)..(309): "n" may be a, t, c, g, other or unknown
  misc_feature (387)..(387): "n" may be a, t, c, g, other or unknown
  misc_feature (397)..(397): "n" may be a, t, c, g, other or unknown
  misc_feature (435)..(435): "n" may be a, t, c, g, other or unknown
  misc_feature (460)..(460): "n" may be a, t, c, g, other or unknown
  misc_feature (465)..(465): "n" may be a, t, c, g, other or unknown
  misc_feature (480)..(480): "n" may be a, t, c, g, other or unknown
  misc_feature (484)..(484): "n" may be a, t, c, g, other or unknown
  misc_feature (494)..(494): "n" may be a, t, c, g, other or unknown
  misc_feature (523)..(523): "n" may be a, t, c, g, other or unknown
  misc_feature (549)..(549): "n" may be a, t, c, g, other or unknown
agtgctgantacatttattgaagantctctccctgtataagcccatgttaaangtctcagcactaacacaagantcnaaaaggaagcccacatctctctttcatacaggatttgctgcaatactatattcttccaaccagtgagtaatctcaaagtgtgatgggtgagttttacatantcttctttgtttcgaatccaattggctgatttgttaccattctagaggctgaactgtatgaagacctcaactaccattcacaaggtgcagttaananacttttggacagttcacagtgtcaacaaatgtcncaggctccgaccaagtataaccacatcctttggaaatccttccatttttgcaatttcaaaacatcctaacttgctgtnaaattcccanaattcctttatcctccggtccccctccccaaaaaaccnccccgggaacctttaccctccattnaaaanaggaaggcaaccctncttncttttggccncccttgggtcagttactttttggtgaatntcccccttttccaaaaagggaatttnccgggaa

SEQ ID NO: 9741 - DNA, 487 bp, Homo sapiens
  misc_feature (373)..(373): "n" may be a, t, c, g, other or unknown
  misc_feature (400)..(400): "n" may be a, t, c, g, other or unknown
  misc_feature (420)..(420): "n" may be a, t, c, g, other or unknown
  misc_feature (429)..(429): "n" may be a, t, c, g, other or unknown
  misc_feature (466)..(466): "n" may be a, t, c, g, other or unknown
  misc_feature (472)..(472): "n" may be a, t, c, g, other or unknown
  misc_feature (483)..(483): "n" may be a, t, c, g, other or unknown
  misc_feature (487)..(487): "n" may be a, t, c, g, other or unknown
gcaagttaaattacatctattatataaagagatcctataacttgatacgaaaaacaaagcaactccaacagataacagaagggcaaaaggacaggaacatctgatcaaagaaacacagctaccgatagcacacaaatattcaacctcattaataatcaaaggattaggatgcacttcttgcttattcaataaagttaataatttctaatttttctacttttcaaatgtactcaaatgtgctatttttagtaataaaaaactgagtaattaaaaaaacatagaaagtatgaaaatttctgccaatgcagaaatcataaacagcattaaaatgaatcaacacttgtatgggcagtaaggttcagacccctaaaanccaattcattttgccttggttcctganttttattatggggattgtcnataaagganaaagttgttcctgatttacatgctgacaatcttccangtatangggggtttttntttn

SEQ ID NO: 9742 - DNA, 494 bp, Homo sapiens
  misc_feature (338)..(338): "n" may be a, t, c, g, other or unknown
  misc_feature (418)..(418): "n" may be a, t, c, g, other or unknown
  misc_feature (429)..(429): "n" may be a, t, c, g, other or unknown
  misc_feature (445)..(445): "n" may be a, t, c, g, other or unknown
  misc_feature (447)..(448): "n" may be a, t, c, g, other or unknown
  misc_feature (479)..(479): "n" may be a, t, c, g, other or unknown
  misc_feature (491)..(491): "n" may be a, t, c, g, other or unknown
gttttttttggtcatactacatttcactttattattattaacatttatcatacacggggtactattccaatctttcatgcagacaaaaataaacaatataaaatacataatgcactttgataattttaaccatacataaaatatgggagtaatgggaagctatgttacatggatattttacaaaggaaaaaaagatgacttttataataacacatccagatgaaatttatcattaaattttggatttcatatgatgttaagtatggatatattcaaaacaattactatttatagaaccaatttgatattttgtcatttaaaataatgaatactatgtnaatgagtacttataaaaatatttttaggcaaaaagctctgttctactcatttacttgccagttacaaaaatatatattcntctgaaactcnaataaatttgcttgangnnttagatattccaattccaatgtttattttcnaaagcgtcctancca

SEQ ID NO: 9743 - DNA, 534 bp, Homo sapiens
  misc_feature (2)..(2): "n" may be a, t, c, g, other or unknown
  misc_feature (38)..(38): "n" may be a, t, c, g, other or unknown
  misc_feature (169)..(169): "n" may be a, t, c, g, other or unknown
  misc_feature (396)..(396): "n" may be a, t, c, g, other or unknown
  misc_feature (449)..(449): "n" may be a, t, c, g, other or unknown
  misc_feature (468)..(468): "n" may be a, t, c, g, other or unknown
  misc_feature (470)..(470): "n" may be a, t, c, g, other or unknown
  misc_feature (505)..(505): "n" may be a, t, c, g, other or unknown
  misc_feature (507)..(507): "n" may be a, t, c, g, other or unknown
  misc_feature (516)..(516): "n" may be a, t, c, g, other or unknown
  misc_feature (534)..(534): "n" may be a, t, c, g, other or unknown
anacagagtctccctctgttgcctaggctggagtgtantggtgcaatctcagctcactgcaacctccacctcccaggttcaagcaattctcgtgcctcagcctcccaagtagctaggaatacaggtatgcaccaccacacccagctaatttttgtgtttttagtaaaanacagggtttcaccatattggccaggctggttttgagctcctgacctcaagtggtccacccgccttggcctcccaaagtgctggaattataagcatgagccacgctacccagccacccctaggaaactttaatgccacaaatgtattatatatctgtttatgtactatggccctttgaagggtcaaaaaccattgttatattcaagattttttttcacctttcaagantcaacatttgccctcttgcggtagtatctcccattgaaaaatgcatgctgtancgcatgttacaatatccanantatattttaaggtaaaaacaccaaggtggaaaaanantatttacantgcgctaacacttttctn

SEQ ID NO: 9744 - DNA, 530 bp, Homo sapiens
  misc_feature (228)..(228): "n" may be a, t, c, g, other or unknown
  misc_feature (379)..(379): "n" may be a, t, c, g, other or unknown
  misc_feature (389)..(389): "n" may be a, t, c, g, other or unknown
  misc_feature (391)..(391): "n" may be a, t, c, g, other or unknown
  misc_feature (415)..(415): "n" may be a, t, c, g, other or unknown
  misc_feature (436)..(436): "n" may be a, t, c, g, other or unknown
  misc_feature (487)..(487): "n" may be a, t, c, g, other or unknown
  misc_feature (491)..(491): "n" may be a, t, c, g, other or unknown
  misc_feature (495)..(495): "n" may be a, t, c, g, other or unknown
  misc_feature (500)..(500): "n" may be a, t, c, g, other or unknown
  misc_feature (527)..(527): "n" may be a, t, c, g, other or unknown
  misc_feature (530)..(530): "n" may be a, t, c, g, other or unknown
cataaataagtattataactttattaaaatgaaaagacaatattcaaaataatgcaacaaaatgaataaaatcctttgtccaatactgtacacataatgcagaaatcagtgcatttttcttaagcatgttttaaccttcatttagttcatactaaaatataataagctttaaatagctcaaataatattcagcagtttaaactgtaaacagcttgtttaactgttaanagaacattgcagtaatgtacctctgttagtgagcaccttctcttctgtgcttatctcttcaagataaatacatggaaggatgtgaaaatcggaacaccaactatgtgtctcactgcatctaagtgaagcaccacagctgtgagagttttcnaagcaaaaanangctgatgtgacctccggaattcanacatactgagctatgggtcgnaaatgttttacttaaaaagccaacaatcccccggaaatctgaatgggaacngccncccngggcngcctgtgttgtttgtttattaaaaccnccn

SEQ ID NO: 9745 - DNA, 543 bp, Homo sapiens
  misc_feature (278)..(278): "n" may be a, t, c, g, other or unknown
  misc_feature (332)..(332): "n" may be a, t, c, g, other or unknown
  misc_feature (363)..(363): "n" may be a, t, c, g, other or unknown
  misc_feature (372)..(372): "n" may be a, t, c, g, other or unknown
  misc_feature (378)..(378): "n" may be a, t, c, g, other or unknown
  misc_feature (411)..(411): "n" may be a, t, c, g, other or unknown
  misc_feature (473)..(473): "n" may be a, t, c, g, other or unknown
  misc_feature (481)..(481): "n" may be a, t, c, g, other or unknown
  misc_feature (485)..(485): "n" may be a, t, c, g, other or unknown
  misc_feature (492)..(492): "n" may be a, t, c, g, other or unknown
  misc_feature (494)..(494): "n" may be a, t, c, g, other or unknown
  misc_feature (504)..(504): "n" may be a, t, c, g, other or unknown
  misc_feature (527)..(527): "n" may be a, t, c, g, other or unknown
ccaaatacaactttggaattagtcacaaaaaatcaacatatattctcagaaattgtaccatttcctttggtctacaatccacgctataggaggttcaatataatattaaataatgtaccatttaccctaaaagtaggttctagaaaactgactattaggattgaataacaaggctttaatggctcaattttcttatgattatacaaacatataaatcttgaaaaggtaacgccatttagtaaaatccataaaaataacagttttgccacagtgcaaanaaaagttcattcagtttgattccccatgccctcgacaagcagctttctgattanagctggaaaacacaggctgggtgcagtggcnaccccgtantcccanctactggggaggctgaagtggaaggatcacttnacccaggaatttccgaacatctgggcacataccaaaaccctgtctcttttttaacttggaanaaataaantctntacttcntnccttgaaacntgaattttctacgaaaatttgtnaaaattacttttaaat

SEQ ID NO: 9746 - DNA, 545 bp, Homo sapiens; identical to SEQ ID NO: 8796
  misc_feature (1)..(545): "n" may be a, t, c, g, other or unknown

SEQ ID NO: 9747 - DNA, 518 bp, Homo sapiens
  misc_feature (168)..(168): "n" may be a, t, c, g, other or unknown
  misc_feature (371)..(372): "n" may be a, t, c, g, other or unknown
  misc_feature (388)..(388): "n" may be a, t, c, g, other or unknown
  misc_feature (435)..(435): "n" may be a, t, c, g, other or unknown
  misc_feature (442)..(442): "n" may be a, t, c, g, other or unknown
  misc_feature (463)..(464): "n" may be a, t, c, g, other or unknown
  misc_feature (492)..(492): "n" may be a, t, c, g, other or unknown
  misc_feature (500)..(500): "n" may be a, t, c, g, other or unknown
  misc_feature (509)..(509): "n" may be a, t, c, g, other or unknown
gttttttgagacagtctcgctttgtcacccaggctggagtgcagtggcacaaccttggctcactgcaacctccgcctcctgggttcaagtgattctcgtgcctcccaggtagctgggattacaggtgtgcaccaccatgcccagctaatttttatatttttagtaaanatggggttttgccatgttggccaaactggtttagaactcctggcctcaaatggtctgcccaccttggcatcccaaaatgctgggattacaggcataagccaccgcgcccagccaacacttaactgatttcttatttcctaataaaaaggatctgtttggtatcctataatactgatgcaccttgatttgctccgttcacccannaattcttctgaaaacnctgttgttcctgtggtggctaatgttcccccaaaatggaaacccctntggccanggaaaatttaaattaaaaccnntaaaatttaaaaaattccttaaatccgnaaccaatnacaccaaanttccttttt

SEQ ID NO: 9748 - DNA, 513 bp, Homo sapiens
  misc_feature (94)..(94): "n" may be a, t, c, g, other or unknown
  misc_feature (330)..(330): "n" may be a, t, c, g, other or unknown
  misc_feature (345)..(345): "n" may be a, t, c, g, other or unknown
  misc_feature (374)..(374): "n" may be a, t, c, g, other or unknown
  misc_feature (392)..(392): "n" may be a, t, c, g, other or unknown
  misc_feature (418)..(418): "n" may be a, t, c, g, other or unknown
  misc_feature (451)..(451): "n" may be a, t, c, g, other or unknown
  misc_feature (459)..(459): "n" may be a, t, c, g, other or unknown
  misc_feature (462)..(462): "n" may be a, t, c, g, other or unknown
  misc_feature (467)..(467): "n" may be a, t, c, g, other or unknown
  misc_feature (493)..(493): "n" may be a, t, c, g, other or unknown
  misc_feature (503)..(503): "n" may be a, t, c, g, other or unknown
agacacaaacatctagtttattttttctgactgtaaccaaagtcagcaaaagaaacaacaaaacttcagtgccctaaaaatcctcctggattcnatgacaacacatcaatggccgggcacagggttggattccttttatgaaatcaccttataatctctcatcatcccaggacagtgccttttgggactgcatgaatctttaatagctacaccacattttctcatcctttaagttatgacagacaggttatctctctccaagagcatcaggttagatgctctttcactcttacaaactgtcaggtggagggagaatcacgacatcattcntaaataactgtggantctgggatgctggctgaaagcatctccangaaagactggagggcgantttgctaaagggctgctcactgctcntttcactgcatgccccttttctccctttggttnggaatttnaangaccntttttccccaaaattaaaaccccccnttaaaaccanccctgccctt

SEQ ID NO: 9749 - DNA, 505 bp, Homo sapiens
  misc_feature (31)..(31): "n" may be a, t, c, g, other or unknown
  misc_feature (248)..(248): "n" may be a, t, c, g, other or unknown
  misc_feature (404)..(404): "n" may be a, t, c, g, other or unknown
  misc_feature (432)..(432): "n" may be a, t, c, g, other or unknown
  misc_feature (452)..(452): "n" may be a, t, c, g, other or unknown
  misc_feature (473)..(473): "n" may be a, t, c, g, other or unknown
  misc_feature (486)..(486): "n" may be a, t, c, g, other or unknown
  misc_feature (488)..(488): "n" may be a, t, c, g, other or unknown
  misc_feature (491)..(491): "n" may be a, t, c, g, other or unknown
  misc_feature (504)..(504): "n" may be a, t, c, g, other or unknown
gagtattccagcattatttatttgatcagantaaaatacacttcccatcactacaaactgagcacaactacagttgtctacacattcatatttttgacgtgccaacattttgcattctacatgaaacatttggtttaaacaaaatcttaagaagtctctattttgtttcccatcttccctcctgtcctctcccatcctccaaagatgttttatattaactgctatgagatttatttgccggtcacgtnatacggaggacagcagggaacaacacaagatttaccatgcctaggggatgaatggcaaacccaactttggctaatgtcattgagaacaacttggaagcgtgagcagagatatctcatgaagtggcagtgaacctacatttccatttatcagaagcnaacatggaaggttacatacatgatgaantattggaagttaaagacttnagacaccaaatccctaatttnaaagaacatgccncntgnatttcaacttgcna

SEQ ID NO: 9750 - DNA, 608 bp, Homo sapiens
  misc_feature (4)..(4): "n" may be a, t, c, g, other or unknown
  misc_feature (6)..(6): "n" may be a, t, c, g, other or unknown
  misc_feature (29)..(29): "n" may be a, t, c, g, other or unknown
  misc_feature (48)..(48): "n" may be a, t, c, g, other or unknown
  misc_feature (50)..(50): "n" may be a, t, c, g, other or unknown
  misc_feature (104)..(104): "n" may be a, t, c, g, other or unknown
  misc_feature (163)..(163): "n" may be a, t, c, g, other or unknown
  misc_feature (317)..(317): "n" may be a, t, c, g, other or unknown
  misc_feature (340)..(340): "n" may be a, t, c, g, other or unknown
  misc_feature (461)..(461): "n" may be a, t, c, g, other or unknown
  misc_feature (510)..(510): "n" may be a, t, c, g, other or unknown
  misc_feature (526)..(526): "n" may be a, t, c, g, other or unknown
  misc_feature (562)..(562): "n" may be a, t, c, g, other or unknown
  misc_feature (568)..(568): "n" may be a, t, c, g, other or unknown
  misc_feature (573)..(573): "n" may be a, t, c, g, other or unknown
gtananatgggtcttgctgtgttgcccangctggtctttaacgtctangntcaagctcaagctcttgccttgccctcccaaagtgctgggattacagacgtgantcccacgcctggccggtaatttctcattgtgaattgattgggtccctgtaagtccagancctgtcctgagtccttcatctgaatgagggtgaaaagactgagttttctgtcccgggtgacaaggacagaatctgtcttgtgaaacaaccagaagaaaattcccctaagaaagccgtctagcggggcagtggacacaacactattctatatcanacaattaaatgtgagggatgaanggtgaaccccaactggtgcgtaataacacttaggattaaaatgaaaatatgcaagttccagtgactttcaaatctggcaacaaatcctaagattcccaccccctcctgcaacaatgattcnaaaataccatatttttttcctctccctctcctccatccataattaccanctgaatgttccccatnttctccataaaacccacacccaacatcaccctgggnccaatntttanaaaaatttggcttccggtccccccttgccctttaa

SEQ ID NO: 9751 - DNA, 503 bp, Homo sapiens
  misc_feature (6)..(6): "n" may be a, t, c, g, other or unknown
  misc_feature (217)..(217): "n" may be a, t, c, g, other or unknown
  misc_feature (377)..(377): "n" may be a, t, c, g, other or unknown
  misc_feature (384)..(384): "n" may be a, t, c, g, other or unknown
  misc_feature (420)..(420): "n" may be a, t, c, g, other or unknown
  misc_feature (433)..(433): "n" may be a, t, c, g, other or unknown
  misc_feature (437)..(437): "n" may be a, t, c, g, other or unknown
  misc_feature (459)..(459): "n" may be a, t, c, g, other or unknown
  misc_feature (488)..(488): "n" may be a, t, c, g, other or unknown
  misc_feature (494)..(494): "n" may be a, t, c, g, other or unknown
  misc_feature (501)..(501): "n" may be a, t, c, g, other or unknown
gtaganccattctatccatccagctatgaaatcttctctaaaagcctctcctctggtgtcccattgcacttttatctgtactgacttgggctacttgtcagttgtatatttgcctgtattgtctcccatactgaaacataaaatccccgtggacaagaaacatgtcttactcatcttagtatttctagcacctagcacagtactaggcacacagtcnatacctaataaatatgccgaataaatgaaagcacattacggaatggaaggtacaaagccacagttggacattttccataatagtgtattttcaacccttacagaaatagacttgcagtggaatgtctactatttagcagctgaattcagacttggggaanagcccanaaactgctacacttcacagatggtcatttggaaaanaaaattaatgcanaaancttgtgtactatttaataatanctcaggaataggtccaaataacaaatccnctgatnccccganaa

SEQ ID NO: 9752 - DNA, 604 bp, Homo sapiens
  misc_feature (64)..(64): "n" may be a, t, c, g, other or unknown
  misc_feature (157)..(157): "n" may be a, t, c, g, other or unknown
  misc_feature (184)..(184): "n" may be a, t, c, g, other or unknown
  misc_feature (272)..(272): "n" may be a, t, c, g, other or unknown
  misc_feature (283)..(283): "n" may be a, t, c, g, other or unknown
  misc_feature (288)..(288): "n" may be a, t, c, g, other or unknown
  misc_feature (297)..(297): "n" may be a, t, c, g, other or unknown
  misc_feature (330)..(330): "n" may be a, t, c, g, other or unknown
  misc_feature (355)..(355): "n" may be a, t, c, g, other or unknown
  misc_feature (377)..(377): "n" may be a, t, c, g, other or unknown
  misc_feature (441)..(441): "n" may be a, t, c, g, other or unknown
  misc_feature (443)..(443): "n" may be a, t, c, g, other or unknown
  misc_feature (480)..(480): "n" may be a, t, c, g, other or unknown
  misc_feature (490)..(490): "n" may be a, t, c, g, other or unknown
  misc_feature (518)..(518): "n" may be a, t, c, g, other or unknown
  misc_feature (527)..(527): "n" may be a, t, c, g, other or unknown
  misc_feature (541)..(541): "n" may be a, t, c, g, other or unknown
  misc_feature (553)..(553): "n" may be a, t, c, g, other or unknown
  misc_feature (584)..(584): "n" may be a, t, c, g, other or unknown
cttagtatatactttaatgcatgtttatgtgcaatcttgttagtgggtatacaagtttgtgaanaacttctcatttcaataggcagttaatgtaatgcattaaaagcctgggaatttggggctatatttttcctttctgactcaataatcttcaaanaattcataggaaagtcagtacttgcanacaagtggttagcttggctaaaatgtacaaaacacccagaacccacaaaacactcagaggtttaggaaaatgttttaatgcttaaaangcaggatcaantgaanaggttacanaaatcagtgtctctggctgggcagtcaaaaaancaggctcaaattctgtgactcactnctctgtgtctcggttggaaatnaatgggtatcctggttcccaccttcccacacgctgtgatacttcaaactccttgggtgaagggncncttctcacccaaaatcttgattgtgaacataacaaanaaaacatccncctccacaaaaaaaactccttaatgacntttgatccntgaataaatattcntttaaaaaaatnttttggggggatcttaaaattttggaagttnttccccccggaaaaatggtt

SEQ ID NO: 9753 - DNA, 589 bp, Homo sapiens
  misc_feature (5)..(5): "n" may be a, t, c, g, other or unknown
  misc_feature (105)..(105): "n" may be a, t, c, g, other or unknown
  misc_feature (220)..(220): "n" may be a, t, c, g, other or unknown
  misc_feature (356)..(356): "n" may be a, t, c, g, other or unknown
  misc_feature (403)..(403): "n" may be a, t, c, g, other or unknown
  misc_feature (437)..(437): "n" may be a, t, c, g, other or unknown
  misc_feature (463)..(463): "n" may be a, t, c, g, other or unknown
  misc_feature (480)..(480): "n" may be a, t, c, g, other or unknown
  misc_feature (493)..(493): "n" may be a, t, c, g, other or unknown
  misc_feature (532)..(532): "n" may be a, t, c, g, other or unknown
  misc_feature (537)..(537): "n" may be a, t, c, g, other or unknown
  misc_feature (550)..(550): "n" may be a, t, c, g, other or unknown
  misc_feature (555)..(555): "n" may be a, t, c, g, other or unknown
  misc_feature (583)..(583): "n" may be a, t, c, g, other or unknown
  misc_feature (585)..(585): "n" may be a, t, c, g, other or unknown
ggcanagaccgggtctagctatgttgcccaggatggtctcaaactcctggcctcaagcaagtctcccagctgggcctcccaaggcactgggactacagtcatgancaacctctcctagccctgttttcttgtaataaagtaaatgcagtgttcattttagtaacaaaacaggtcttcactgggagggagaaatgaggaaatttgaccccgcgtggctgangcctggaatgagctccatgggcaggctccaggaatgatgtaattttgcctcctctcaaggctggcctcaaggaggcctgattccagccctctttgtctggggctgccctgaaacctgtaaaaatccttctgaccanatcctccagacactgcaaattctcacccaggttgctcaaaatcctgnaaaaaactcaggtttgattcaaacgggctaaatntgggttctgcttgaccactttctgtntttcatttggcaattcncttcccctctctnaacctttttcatttctgcctatctaaaatcaaaatcccnccctnatttccatttttntggtnaaaatccatggaattaatttttctaaangntccc

SEQ ID NO: 9754 - DNA, 538 bp, Homo sapiens
  misc_feature (186)..(186): "n" may be a, t, c, g, other or unknown
  misc_feature (188)..(188): "n" may be a, t, c, g, other or unknown
  misc_feature (209)..(209): "n" may be a, t, c, g, other or unknown
  misc_feature (349)..(349): "n" may be a, t, c, g, other or unknown
  misc_feature (353)..(353): "n" may be a, t, c, g, other or unknown
  misc_feature (359)..(359): "n" may be a, t, c, g, other or unknown
  misc_feature (370)..(370): "n" may be a, t, c, g, other or unknown
  misc_feature (377)..(377): "n" may be a, t, c, g, other or unknown
  misc_feature (395)..(395): "n" may be a, t, c, g, other or unknown
  misc_feature (460)..(460): "n" may be a, t, c, g, other or unknown
  misc_feature (477)..(477): "n" may be a, t, c, g, other or unknown
  misc_feature (481)..(481): "n" may be a, t, c, g, other or unknown
  misc_feature (498)..(498): "n" may be a, t, c, g, other or unknown
  misc_feature (503)..(503): "n" may be a, t, c, g, other or unknown
  misc_feature (526)..(526): "n" may be a, t, c, g, other or unknown
  misc_feature (536)..(536): "n" may be a, t, c, g, other or unknown
gtttgggcaatagaacactttctggcattctaggtacttcaatatgtgtccttcaatcaccctgaagtgaaagcagtcctggcaacttaatatttgcctccagatgggtctctagtcagttcatgctgaaacacagctctgccacccacaacttggagctgaccagcccccaggggaacatggaanangacaggacacacctgttctanaaaaccaggtcctcagtaaacactgctgggaatgaaagcctaaaattatacagtactccattcctgtgaacgggccaaaggatgacgggcaacacaggggaaacctgttttcacatttggtcatctcctcacatttcgtntganctggangaaaccgtgtnacacaanggcttgctttgcccctgnaaactggccctaacatattatctccaggcaaaaatgccatgctcactgcaaactatggaaatgangtcaaaacaaaatcaanttancccttgatgggaaaaanttggncccaaaaacccatttctaaaaanggtcccctgntt

SEQ ID NO: 9755 - DNA, 499 bp, Homo sapiens
  misc_feature (32)..(32): "n" may be a, t, c, g, other or unknown
  misc_feature (105)..(105): "n" may be a, t, c, g, other or unknown
  misc_feature (116)..(116): "n" may be a, t, c, g, other or unknown
  misc_feature (155)..(155): "n" may be a, t, c, g, other or unknown
  misc_feature (157)..(157): "n" may be a, t, c, g, other or unknown
  misc_feature (350)..(350): "n" may be a, t, c, g, other or unknown
  misc_feature (352)..(352): "n" may be a, t, c, g, other or unknown
  misc_feature (424)..(424): "n" may be a, t, c, g, other or unknown
  misc_feature (430)..(430): "n" may be a, t, c, g, other or unknown
  misc_feature (432)..(432): "n" may be a, t, c, g, other or unknown
  misc_feature (452)..(452): "n" may be a, t, c, g, other or unknown
  misc_feature (472)..(472): "n" may be a, t, c, g, other or unknown
  misc_feature (490)..(490): "n" may be a, t, c, g, other or unknown
  misc_feature (498)..(498): "n" may be a, t, c, g, other or unknown
cagaaaataaaatagttttattcatagcctangtaaagttcaaaaatttatattgcactttggcggttatgctgatcctgtgtttggatggggtcacaataacanggaaagccgangcttcctacaaaaagtcctttgtggcaaatcactatganangaaactccatcaaaagtcccaattgttcatttcatttctactgtgctacggaagcctggttttgttttaagggctaacgtcctaggttttaagcaattttttttgagctttggctacccagctaacaagcagtaaaataatcaactcaaaactacgtctgatgccaaagctctaactctaaaactcaatatananttttttttctgtgacacctcccctcgtgtctcccctaactgcgactcgcattaactcgctgctggttcccanctgganancacaaattgcacctgctccnaaacccaacggggctcaatntctccgcactcaacctcngctgcctnt

SEQ ID NO: 9756 - DNA, 607 bp, Homo sapiens
  misc_feature (8)..(8): "n" may be a, t, c, g, other or unknown
  misc_feature (91)..(91): "n" may be a, t, c, g, other or unknown
  misc_feature (113)..(113): "n" may be a, t, c, g, other or unknown
  misc_feature (316)..(316): "n" may be a, t, c, g, other or unknown
  misc_feature (355)..(355): "n" may be a, t, c, g, other or unknown
  misc_feature (412)..(412): "n" may be a, t, c, g, other or unknown
  misc_feature (475)..(475): "n" may be a, t, c, g, other or unknown
  misc_feature (482)..(482): "n" may be a, t, c, g, other or unknown
  misc_feature (585)..(585): "n" may be a, t, c, g, other or unknown
  misc_feature (604)..(604): "n" may be a, t, c, g, other or unknown
  misc_feature (606)..(607): "n" may be a, t, c, g, other or unknown
gttagaanagaatactttattttgaaataaaatacaaatgtgcaaaggaaattagctcctcctgccccccctttgaacaatgagtcaatanaatgtgagactgggtagattancagataataggcaaaggtctagcttttcagtggcaacttgaagaaaccaaagatgaatgatgctaaaggaatgaccctttggtacctgttttaaagtacttctggcccccttcttttataaacccccaggagcccagcaccacaccttgttaccctacaatgatcactcacgctccacgatgtcactaatgtaataactgaanatatgggccagtttgtccatgtcacgttccgacttgtangtcagggtgaactgtccattaatgctgtaaaccctgaccaacaaagcagaaattacnatgttaactccaaatcctaaactttttggcccctttctccccacacatcaggccagtgtaaangaaacanatccttcaagctgagtaatcctttatccattaacatggtgttacttaaaaactactaagggccagtttggttgctgctgcccctgggaaaccaaaggacaccncccgctcccaaaactgganann

SEQ ID NO: 9757 - DNA, 509 bp, Homo sapiens
  misc_feature (40)..(40): "n" may be a, t, c, g, other or unknown
  misc_feature (101)..(101): "n" may be a, t, c, g, other or unknown
  misc_feature (133)..(133): "n" may be a, t, c, g, other or unknown
  misc_feature (153)..(153): "n" may be a, t, c, g, other or unknown
  misc_feature (212)..(212): "n" may be a, t, c, g, other or unknown
  misc_feature (236)..(236): "n" may be a, t, c, g, other or unknown
  misc_feature (258)..(258): "n" may be a, t, c, g, other or unknown
  misc_feature (304)..(304): "n" may be a, t, c, g, other or unknown
  misc_feature (308)..(308): "n" may be a, t, c, g, other or unknown
  misc_feature (326)..(326): "n" may be a, t, c, g, other or unknown
  misc_feature (382)..(382): "n" may be a, t, c, g, other or unknown
  misc_feature (384)..(385): "n" may be a, t, c, g, other or unknown
  misc_feature (433)..(433): "n" may be a, t, c, g, other or unknown
  misc_feature (446)..(446): "n" may be a, t, c, g, other or unknown
  misc_feature (480)..(480): "n" may be a, t, c, g, other or unknown
  misc_feature (497)..(498): "n" may be a, t, c, g, other or unknown
  misc_feature (501)..(501): "n" may be a, t, c, g, other or unknown
  misc_feature (508)..(508): "n" may be a, t, c, g, other or unknown
caactaaaatggttttattgagatgttttggttggagganatactttttctggcaacatttctgactcaaggtccctctgggccccagctcttcccatganacagtcacaacactgtttaatcagctctgcanaggccagccctggagcaaangaggattcagggccatggaggggacctactctgccctgttctggtcactacttctctanactctcatgcactattgtctgtancaagtgacatttccactggaancacataaagatggcgacagcctcatttcttcctgagtgaactgaancccnaaaaaaggggaggtcccnccaaaggggaaaaaaccagggccccacccaacaaggatgctgaaataaactacatntnntgctttctaggaaacaacacaaaaatctctactctgaaatccaaaatnttaaatatgggcnccccctctataatttaactgtacaaccttatcantcatttaaaaccccccnnccnacaatanc

SEQ ID NO: 9758 - DNA, 434 bp, Homo sapiens
  misc_feature (60)..(60): "n" may be a, t, c, g, other or unknown
  misc_feature (85)..(85): "n" may be a, t, c, g, other or unknown
  misc_feature (128)..(128): "n" may be a, t, c, g, other or unknown
  misc_feature (143)..(143): "n" may be a, t, c, g, other or unknown
  misc_feature (155)..(155): "n" may be a, t, c, g, other or unknown
  misc_feature (202)..(202): "n" may be a, t, c, g, other or unknown
  misc_feature (226)..(226): "n" may be a, t, c, g, other or unknown
  misc_feature (248)..(249): "n" may be a, t, c, g, other or unknown
  misc_feature (266)..(266): "n" may be a, t, c, g, other or unknown
  misc_feature (283)..(283): "n" may be a, t, c, g, other or unknown
  misc_feature (289)..(289): "n" may be a, t, c, g, other or unknown
  misc_feature (329)..(329): "n" may be a, t, c, g, other or unknown
  misc_feature (364)..(364): "n" may be a, t, c, g, other or unknown
  misc_feature (386)..(386): "n" may be a, t, c, g, other or unknown
  misc_feature (398)..(398): "n" may be a, t, c, g, other or unknown
  misc_feature (400)..(400): "n" may be a, t, c, g, other or unknown
  misc_feature (409)..(409): "n" may be a, t, c, g, other or unknown
  misc_feature (417)..(417): "n" may be a, t, c, g, other or unknown
  misc_feature (430)..(430): "n" may be a, t, c, g, other or unknown
aagtgagcagatattttaatatgctttatgttaataggattctgataattttagctttanttaatgcaacacacttccctgggtncaaccatgacctctctgagaactggaaaatactgcataatttnaaaaatcagagtgtnatgacattcccngacaacttcaaataagttatgtgaggaggatgaactatgggtagtcnagaccaccagtcatatttgtctanccgtagaaacagtgactacttnnagatctgcaaagatcanagcacaactggctgaangtgcancattctatacatgtcctcatggagcttcacaaaggttatnagatgacccactcactctggttggctgtggccatngacagacaccataaaatcctgngatgtggtccantnctgaactgngggggcgngtctgaacttgcnttaa

SEQ ID NO: 9759 - DNA, 396 bp, Homo sapiens
  misc_feature (39)..(39): "n" may be a, t, c, g, other or unknown
  misc_feature (60)..(60): "n" may be a, t, c, g, other or unknown
  misc_feature (66)..(66): "n" may be a, t, c, g, other or unknown
  misc_feature (75)..(75): "n" may be a, t, c, g, other or unknown
  misc_feature (146)..(146): "n" may be a, t, c, g, other or unknown
  misc_feature (189)..(189): "n" may be a, t, c, g, other or unknown
  misc_feature (232)..(232): "n" may be a, t, c, g, other or unknown
  misc_feature (240)..(240): "n" may be a, t, c, g, other or unknown
  misc_feature (246)..(246): "n" may be a, t, c, g, other or unknown
  misc_feature (313)..(313): "n" may be a, t, c, g, other or unknown
  misc_feature (316)..(316): "n" may be a, t, c, g, other or unknown
  misc_feature (325)..(325): "n" may be a, t, c, g, other or unknown
  misc_feature (331)..(332): "n" may be a, t, c, g, other or unknown
  misc_feature (347)..(347): "n" may be a, t, c, g, other or unknown
  misc_feature (359)..(359): "n" may be a, t, c, g, other or unknown
cccaggtacaacagcaggttcttttccaattcctcaaancgctgcatggggtgggggcanaaacanaaaaaaatnttaacattgggttccaccccctggagctcaagggaaaacccttacccaaatagggactaactggaggggtngaagggaacaaggtgaaaggtatgggtcctggtgaaacaaaancaggggggcctgaaaacacaaaacaaggtgggtttggagggancacaccanggttcncgaaaggaaattggggacatttcctattccagtgcatgtccccttaaataaactgggttcaggaccnttntggaagganaacccnnggacaaaaaacaaancgagcacccccnccccaggccaaccccatcctcttttaccaattacaac

SEQ ID NO: 9760 - DNA, 576 bp, Homo sapiens
  misc_feature (297)..(297): "n" may be a, t, c, g, other or unknown
  misc_feature (443)..(443): "n" may be a, t, c, g, other or unknown
  misc_feature (467)..(467): "n" may be a, t, c, g, other or unknown
  misc_feature (504)..(504): "n" may be a, t, c, g, other or unknown
  misc_feature (520)..(521): "n" may be a, t, c, g, other or unknown
  misc_feature (525)..(525): "n" may be a, t, c, g, other or unknown
  misc_feature (549)..(549): "n" may be a, t, c, g, other or unknown
  misc_feature (565)..(565): "n" may be a, t, c, g, other or unknown
  misc_feature (567)..(567): "n" may be a, t, c, g, other or unknown
aattctggaagatttttaatcaatttaacactattatacattagaggaaaaaattttgcacaaacactccctcacaaagccagtagtcttatatttacatagcatgattatggtaatttaaaatgttaatctatgatacaatgttacttcagaaaacatataataaaatatagttgtcttatagccatgctcccatttttgatgaaagctagttagcaaatcctaatgttagtttaatactttaaaaatgcataacagatattcagtcagcattataaaacctttaagacagaaggntgtcaagcagaatagacagagggctcatcatcacttatgtctgaatcttcatctactccttcaataaccgatttcttccctttacaacaggatacaattaatccaatcaaaaataccccaagaaagggccagttaccaaaatagtnagcaccctgaagaacccaaacttntttaaggaataggtttttccgggtaacattacctggnttttcgggaaatttgnntcanttttttttgggaaaaaaagggttnaatgccttttaaattncnaaatttttt

SEQ ID NO: 9761 - DNA, 496 bp, Homo sapiens
  misc_feature (292)..(292): "n" may be a, t, c, g, other or unknown
  misc_feature (344)..(344): "n" may be a, t, c, g, other or unknown
  misc_feature (366)..(366): "n" may be a, t, c, g, other or unknown
  misc_feature (380)..(380): "n" may be a, t, c, g, other or unknown
  misc_feature (388)..(388): "n" may be a, t, c, g, other or unknown
  misc_feature (423)..(423): "n" may be a, t, c, g, other or unknown
  misc_feature (438)..(438): "n" may be a, t, c, g, other or unknown
  misc_feature (451)..(451): "n" may be a, t, c, g, other or unknown
  misc_feature (456)..(456): "n" may be a, t, c, g, other or unknown
  misc_feature (479)..(479): "n" may be a, t, c, g, other or unknown
  misc_feature (486)..(486): "n" may be a, t, c, g, other or unknown
  misc_feature (494)..(494): "n" may be a, t, c, g, other or unknown
acatctttattgatgttaaacaaatcttttacatctttatctatataattcacgcactataaaattcacccatttaagatgaaccattcaatgccattcaatgctttttagtatattcacgcagttgtacatccatcatcacatctaagtttagaacactttcattgcccccagaataaaccgtgttcctgttagcagccactttccattcctccctcccgccagcctgcagcaactactaatctgctttctgtctggaaatggaatcacacaaagccttttatgtctggcntcttcattactttttagggccatataatattccattgttatagctatgccanatttggtttatctattcattanctgaaggggcattngggctatncccatttctcaattattataaataaggctgctatnaacattgtgtgcaantttttctgggganacatnttttcatttgcctgggggtaaanacccagnaattgtancc

SEQ ID NO: 9762 - DNA, 496 bp, Homo sapiens
  misc_feature (13)..(13): "n" may be a, t, c, g, other or unknown
  misc_feature (76)..(76): "n" may be a, t, c, g, other or unknown
  misc_feature (246)..(246): "n" may be a, t, c, g, other or unknown
  misc_feature (248)..(248): "n" may be a, t, c, g, other or unknown
  misc_feature (251)..(251): "n" may be a, t, c, g, other or unknown
  misc_feature (338)..(338): "n" may be a, t, c, g, other or unknown
  misc_feature (357)..(357): "n" may be a, t, c, g, other or unknown
  misc_feature (443)..(443): "n" may be a, t, c, g, other or unknown
  misc_feature (446)..(446): "n" may be a, t, c, g, other or unknown
  misc_feature (469)..(469): "n" may be a, t, c, g, other or unknown
  misc_feature (484)..(484): "n" may be a, t, c, g, other or unknown
  misc_feature (486)..(487): "n" may be a, t, c, g, other or unknown
  misc_feature (491)..(491): "n" may be a, t, c, g, other or unknown
ctctaatcttgangtccactttatgtcattaaagttgatcttcaatctctgatatcctttcttctgcttgatcgantcagctattgatacttctgtatgcttcacgaaagtctcgtgctgtgtttttcagctccatcagatcatttatgttcttctctaaagtggttattctagttagcaattcctccagccttttttcatttttagcttccttgcattgggttagaacatgctcctttagctcanangantttgttattacccaccttctgaagcctccttctgtaaattcgtcaaactcattctccatccagttttgttctcttgctggcaagganttgtgatcctttgcagganaaaaagtgttctggtttttggaattttcacctttttgcactggtttttcctcatcttcatggatttatctacctttggtctttgangcnggtgaacctccgaatgggttttngtgttggaaattccntnngttnaaatt

SEQ ID NO: 9763 - DNA, 514 bp, Homo sapiens
  misc_feature (1)..(514): "n" may be a, t, c, g, other or unknown
nnnnnnnnnnnnnnnnnnnnnnnnnnnnnnnnnnnnnnnnnnnnnnnnnnnnnnnnnnnnnnnnnnnnnnnnnnnnnnnnnnnnnnnnnnnnnnnnnnnnnnnnnnnnnnnnnnnnnnnnnnnnnnnnnnnnnnnnnnnnnnnnnnnnnnnnnnnnnnnnnnnnnnnnnnnnnnnnnnnnnnnnnnnnnnnnnnnnnnnnnnnnnnnnnnnnnnnnnnnnnnnnnnnnnnnnnnnnnnnnnnnnnnnnnnnnnnnnnnnnnnnnnnnnnnnnnnnnnnnnnnnnnnnnnnnnnnnnnnnnnnnnnnnnnnnnnnnnnnnnnnnnnnnnnnnnnnnnnnnnnnnnnnnnnnnnnnnnnnnnnnnnnnnnnnnnnnnnnnnnnnnnnnnnnnnnnnnnnnnnnnnnnnnnnnnnnnnnnnnnnnnnnnnnnnnnnnnnnnnnnnnnnnnnnnnnnnnnnnnnnnnnnnnnnnnnnnnnnnnnnnnnnnnnnnnnnnnnnnnnnnnnnnnnnnnnnn

SEQ ID NO: 9764 - DNA, 456 bp, Homo sapiens
  misc_feature (55)..(55): "n" may be a, t, c, g, other or unknown
  misc_feature (57)..(57): "n" may be a, t, c, g, other or unknown
  misc_feature (66)..(66): "n" may be a, t, c, g, other or unknown
  misc_feature (70)..(70): "n" may be a, t, c, g, other or unknown
  misc_feature (80)..(80): "n" may be a, t, c, g, other or unknown
  misc_feature (98)..(98): "n" may be a, t, c, g, other or unknown
  misc_feature (111)..(111): "n" may be a, t, c, g, other or unknown
  misc_feature (183)..(183): "n" may be a, t, c, g, other or unknown
  misc_feature (238)..(238): "n" may be a, t, c, g, other or unknown
  misc_feature (280)..(280): "n" may be a, t, c, g, other or unknown
  misc_feature (286)..(286): "n" may be a, t, c, g, other or unknown
  misc_feature (306)..(306): "n" may be a, t, c, g, other or unknown
  misc_feature (319)..(319): "n" may be a, t, c, g, other or unknown
  misc_feature (398)..(398): "n" may be a, t, c, g, other or unknown
  misc_feature (400)..(400): "n" may be a, t, c, g, other or unknown
  misc_feature (437)..(438): "n" may be a, t, c, g, other or unknown
  misc_feature (446)..(446): "n" may be a, t, c, g, other or unknown
  misc_feature (448)..(449): "n" may be a, t, c, g, other or unknown
aaaggcatgattgatagtttatttaatacatataacatttaaaacttttgttccncnaaggaaacnaacnaaacatagcnaaaggataaaacgtcccnctagaaaaacgantcccacttatatgatgacaaagatgtgtagaatcatgtcaactaccgctacaaatcagtaagcaaaaaggtnaaacaatgaaaatttaagaaaaaaacaatttattgaagaaacacaaatagccccnaaacataccagaagatgttaaacctcactaatgattaaatcnatgccnaataaaatgatactgaggtnagatttgcaagtnaaactaaagttactaacaaaatccaatgttagtgaaactgtgagaatatatgcctttgttcacattattggcaaaagtncnaatttggggtctgaaaggaaatttaaatatgttcccnntatgttcncnngttccct

SEQ ID NO: 9765 - DNA, 476 bp, Homo sapiens
  misc_feature (6)..(6): "n" may be a, t, c, g, other or unknown
  misc_feature (8)..(8): "n" may be a, t, c, g, other or unknown
  misc_feature (66)..(66): "n" may be a, t, c, g, other or unknown
  misc_feature (121)..(121): "n" may be a, t, c, g, other or unknown
  misc_feature (148)..(148): "n" may be a, t, c, g, other or unknown
  misc_feature (178)..(178): "n" may be a, t, c, g, other or unknown
  misc_feature (221)..(221): "n" may be a, t, c, g, other or unknown
  misc_feature (412)..(412): "n" may be a, t, c, g, other or unknown
  misc_feature (424)..(424): "n" may be a, t, c, g, other or unknown
  misc_feature (430)..(430): "n" may be a, t, c, g, other or unknown
  misc_feature (443)..(443): "n" may be a, t, c, g, other or unknown
  misc_feature (461)..(461): "n" may be a, t, c, g, other or unknown
  misc_feature (467)..(468): "n" may be a, t, c, g, other or unknown
gttttntnaagtgaaataatagatttattccaagagaaataaaatgtcctgggtaaagcttctgtnataatactatttctgatactgtatctctgaaaaatggctaactagtcccttatcnatacatttaaggcatcaataataggtnccactgaggacatacattgtgaagaaaganaagaataagtccaatactaaaacatacttatcatgacaactcnaggtgacatgaatatttaatgaaaatttagaatataacaacatatgactctcattctgtggacataaaaggaaaaatacagtaattcattttactcattacattttacaaaatcagcccaatgaagcagtattttttaataaaaacagtaatttaatttcaaacaaatatattaccatcccaatcccttancctggttaaatntttccnaatgggcaaaacntactttactgaaattcantaccannccatccca

SEQ ID NO: 9766 - DNA, 492 bp, Homo sapiens
  misc_feature (28)..(28): "n" may be a, t, c, g, other or unknown
  misc_feature (45)..(45): "n" may be a, t, c, g, other or unknown
  misc_feature (76)..(76): "n" may be a, t, c, g, other or unknown
  misc_feature (83)..(83): "n" may be a, t, c, g, other or unknown
  misc_feature (99)..(99): "n" may be a, t, c, g, other or unknown
  misc_feature (102)..(102): "n" may be a, t, c, g, other or unknown
  misc_feature (131)..(131): "n" may be a, t, c, g, other or unknown
  misc_feature (190)..(190): "n" may be a, t, c, g, other or unknown
  misc_feature (240)..(240): "n" may be a, t, c, g, other or unknown
  misc_feature (242)..(242): "n" may be a, t, c, g, other or unknown
  misc_feature (268)..(268): "n" may be a, t, c, g, other or unknown
  misc_feature (395)..(395): "n" may be a, t, c, g, other or unknown
  misc_feature (415)..(415): "n" may be a, t, c, g, other or unknown
  misc_feature (417)..(417): "n" may be a, t, c, g, other or unknown
  misc_feature (434)..(434): "n" may be a, t, c, g, other or unknown
  misc_feature (462)..(462): "n" may be a, t, c, g, other or unknown
  misc_feature (469)..(469): "n" may be a, t, c, g, other or unknown
  misc_feature (488)..(488): "n" may be a, t, c, g, other or unknown
ccaattcagaagaactttaatgcatatnccatcattgccactatnatagagatagaagataccttaagaaaattcngtttgtntccataaaacagatcnacncagaacaaggaaacccatagatatttgtnaatgagatcttctcttttgctactgtgtatatatattcctttatattcatacaaactcncaacacatgacatttcatatttcatatgccactgagaagaggtgtctgtntncagaacataggaagaagaaaaaagcntgagaacatctgcttagttagaatctgatgaggagagacgtgagagctattgttcctctctctgctcaggcctatcgagaggcaactgcagtttttgctaattgttcctcctgaggaattctgctcntactgctatggtcatctccnangttgggcgtgagaacancctggtcccccttgaataaatttaaaanaacattnggggggattgaatatgatntgcc

SEQ ID NO: 9767 - DNA, 463 bp, Homo sapiens
  misc_feature (437)..(437): "n" may be a, t, c, g, other or unknown
  misc_feature (440)..(440): "n" may be a, t, c, g, other or unknown
  misc_feature (450)..(450): "n" may be a, t, c, g, other or unknown
  misc_feature (453)..(453): "n" may be a, t, c, g, other or unknown
  misc_feature (455)..(455): "n" may be a, t, c, g, other or unknown
  misc_feature (458)..(458): "n" may be a, t, c, g, other or unknown
  misc_feature (462)..(462): "n" may be a, t, c, g, other or unknown
gttttttgttttgttttttttttgtttgtttttttttgcagcagacaatatcattcagcttgtgctcagtttccctataagggtaagaaaagtttccatcaggtagccacttgtttttatactgaaagactaatctgctccaaaatgctcccaagtagaaatgacaggactcaaaatccctttctaaagcccaacagctaactttttctgactaatctctagcttcattgaaactggctaccaagattgcatttcaggctaacaattggcttcttagttaaggcatcacaactgaaaatggttatttcaacaatggatgctgtggatgaaggaataccaacaaacttctaagaactctcatcaaaaactaaagcaatttgctttgccccagtggcaggcagaaggaatttagcccattatctcacaaactaggaaanganttttggaatnctnantanccant

SEQ ID NO: 9768 - DNA, 536 bp, Homo sapiens
  misc_feature (361)..(361): "n" may be a, t, c, g, other or unknown
  misc_feature (367)..(367): "n" may be a, t, c, g, other or unknown
  misc_feature (430)..(430): "n" may be a, t, c, g, other or unknown
  misc_feature (444)..(444): "n" may be a, t, c, g, other or unknown
  misc_feature (461)..(461): "n" may be a, t, c, g, other or unknown
  misc_feature (463)..(463): "n" may be a, t, c, g, other or unknown
  misc_feature (465)..(465): "n" may be a, t, c, g, other or unknown
  misc_feature (495)..(495): "n" may be a, t, c, g, other or unknown
  misc_feature (517)..(517): "n" may be a, t, c, g, other or unknown
  misc_feature (535)..(535): "n" may be a, t, c, g, other or unknown
aatttattcttatttatttattttgtttttgagacggaggttcactctgtcacccaggctggagtgcaatggtgcaatctcggttcactgcaatctctgcctcctgggttcaagcgattctcctgcctcagcctcccgaatagctgggattacaggcgtgcaccaccatgcccagctaattattgtatttttagtaaaaatggggtttcaccacgttggccaggctggtctcgaactcctgacctcaggtgatccacctgcctcggcctctcaaagtgctgggattacagacattagccactgcacgcagcctttctatacactttaaatcatctctagtttacttataataatgaatgcnaagganatgcgatgttaataattgttacactacattgtttaaggaaccaagaccagaaaaaaatccgtncacattccatacanatgccattcccttttcncntntttttgatctgttgttgggtcccatccctnggattccggaacccctggaaanaaaagaaaattttttgcnc

SEQ ID NO: 9769 - DNA, 497 bp, Homo sapiens
  misc_feature (443)..(443): "n" may be a, t, c, g, other or unknown
  misc_feature (446)..(446): "n" may be a, t, c, g, other or unknown
  misc_feature (457)..(457): "n" may be a, t, c, g, other or unknown
  misc_feature (477)..(477): "n" may be a, t, c, g, other or unknown
  misc_feature (479)..(479): "n" may be a, t, c, g, other or unknown
  misc_feature (486)..(486): "n" may be a, t, c, g, other or unknown
  misc_feature (490)..(490): "n" may be a, t, c, g, other or unknown
gaacgccaagcttttttttttttaattaaaaagaaaaaaaaagagagagaaaaaattccacattcattaaaatctctttctcttgataatttctggtttccagctgactggatgagtttcttctgtggctgtgtcatcctctctgtatactttaatggttttatcagcttcagctgttagtaatcgactttcagactgatcaaaagcacaagcaaatattcctgattcactgtccaaagacccaggttgcacagctgcgtgaactctctgaaaattgtagccagttctccagtcccaaagatgcatggtgccattgtcagctccagatacaagcactccatcagaatttaccgtcaatgtgttaataatagcattatgaccggaaagattttgaatgaaacttccatcagggaatttccactgctttatgttatctggagaancanatgccaatgtnttatgtcttggatgttaaancncagcccnaacngaatttt

SEQ ID NO: 9770 - DNA, 598 bp, Homo sapiens
  misc_feature (54)..(54): "n" may be a, t, c, g, other or unknown
  misc_feature (99)..(99): "n" may be a, t, c, g, other or unknown
  misc_feature (103)..(103): "n" may be a, t, c, g, other or unknown
  misc_feature (116)..(116): "n" may be a, t, c, g, other or unknown
  misc_feature (140)..(140): "n" may be a, t, c, g, other or unknown
  misc_feature (142)..(142): "n" may be a, t, c, g, other or unknown
  misc_feature (387)..(387): "n" may be a, t, c, g, other or unknown
  misc_feature (424)..(424): "n" may be a, t, c, g, other or unknown
  misc_feature (463)..(463): "n" may be a, t, c, g, other or unknown
  misc_feature (471)..(471): "n" may be a, t, c, g, other or unknown
  misc_feature (479)..(479): "n" may be a, t, c, g, other or unknown
  misc_feature (488)..(488): "n" may be a, t, c, g, other or unknown
  misc_feature (493)..(493): "n" may be a, t, c, g, other or unknown
  misc_feature (526)..(526): "n" may be a, t, c, g, other or unknown
  misc_feature (542)..(542): "n" may be a, t, c, g, other or unknown
  misc_feature (586)..(586): "n" may be a, t, c, g, other or unknown
  misc_feature (589)..(589): "n" may be a, t, c, g, other or unknown
gagacagagtctcgctctgtcactctgtcgctctgtcaccaggttggagtgcantggcacgatctgggctcactgcaacctccgcctcccgggtccaantgantctcctgccttancctcctgaataactgggaatacangnacatgccaccatgcccgggctcattttctgtatttttagtaaaaaaacggggtttcaccatgttggccaggatggtctctaactccagacctcgtgatccgcccgctttggcctcccaaagtgctgggattacaggcatgagccaccacacctggcccctcttttctttcttaatcacaggatttgggtcactcttctgtaggcaggtgagtttactgcacatactctggaataccactgttcanaatgtcaaattaaatacagtgccaacactgactgaangcgttttactggggaaaaaactactgaaaaaagaattcntaattatnttctacancactgttantccanggctacctactgttctaagttaaaccgaaattntctaaccccccgaatntcctaaaccaatactccaaatctcctaaacatcttggaagaatnctnttcccccct

SEQ ID NO: 9771 - DNA, 607 bp, Homo sapiens
  misc_feature (113)..(113): "n" may be a, t, c, g, other or unknown
  misc_feature (169)..(169): "n" may be a, t, c, g, other or unknown
  misc_feature (240)..(240): "n" may be a, t, c, g, other or unknown
  misc_feature (247)..(247): "n" may be a, t, c, g, other or unknown
  misc_feature (326)..(326): "n" may be a, t, c, g, other or unknown
  misc_feature (406)..(406): "n" may be a, t, c, g, other or unknown
  misc_feature (449)..(449): "n" may be a, t, c, g, other or unknown
  misc_feature (459)..(459): "n" may be a, t, c, g, other or unknown
  misc_feature (474)..(474): "n" may be a, t, c, g, other or unknown
  misc_feature (479)..(479): "n" may be a, t, c, g, other or unknown
  misc_feature (493)..(493): "n" may be a, t, c, g, other or unknown
  misc_feature (526)..(526): "n" may be a, t, c, g, other or unknown
  misc_feature (541)..(541): "n" may be a, t, c, g, other or unknown
  misc_feature (562)..(562): "n" may be a, t, c, g, other or unknown
  misc_feature (576)..(576): "n" may be a, t, c, g, other or unknown
  misc_feature (604)..(604): "n" may be a, t, c, g, other or unknown
gttgttgttgtaaagtcggggttttgccatgttgcccaggctggtctcaaactcctgggctcaagtaatcccctcaccttgaactcccaaagcacttggactacaggtgtganccactgtgcctggcccctaaagtatttttaattaaggtatatacattgtgttttanacacttcgcagcctacagtacagtgtaaatccttttttttttttgagacgaaatcttgctctgtggcccangatggantatggtggtgcaatcatagttcactgcaacctccgcctcccaggttcaagcaattctcctgcctcagcctcttgagtanctgggactacaggtgtgcaaccccacacccggctaatttttgtatttttactaaaaacagggtttcaacatgttggccangctggtcttgaaattcctgaccttgtgatccgcccaccttggnctcccaaaantgctgggaattacangcgtnaaccaccgcaaccnggcctaatttttttttttttccattttgggtcnctggaaacccccccnccccgttcaaattaatatccncccccccccaccantttcttaaaatacgggaccccccacttnccg

SEQ ID NO: 9772 - DNA, 600 bp, Homo sapiens
  misc_feature (315)..(315): "n" may be a, t, c, g, other or unknown
  misc_feature (489)..(489): "n" may be a, t, c, g, other or unknown
  misc_feature (521)..(521): "n" may be a, t, c, g, other or unknown
  misc_feature (535)..(535): "n" may be a, t, c, g, other or unknown
  misc_feature (547)..(547): "n" may be a, t, c, g, other or unknown
  misc_feature (552)..(552): "n" may be a, t, c, g, other or unknown
  misc_feature (584)..(585): "n" may be a, t, c, g, other or unknown
  misc_feature (600)..(600): "n" may be a, t, c, g, other or unknown
aatttttaacaaaattttatttagagcattaggaaaatcatattcaaaacacagaaataatcagactataacaatgctgcatagatagtggtatacaagttccctgactctaacttcttcctaacttaaaagttcaattttcaagtcaccaggtagaaaatggtggaggcattatttcctctttctgaggctataaaaaaatggcttcaatggtgagaaggcaaaccatttaaacaatgaagattagattataccccaatttaattctattcccttcttgtttgttatttctcatagatgaaaatttagaatgtnataattattggaaaggaataagaagtgaattacctcttaggagataccctgatcagtgcctgctttaatcagacaaaacactaagttttaaaaattacaaccacaatattatgcctaactaaaattgccaatatgaatacttttttacagaatacattacatgttttccagaanaaaaatacttgtttcctatcccccgaacctcngttaaaaaaaaatntttcccttaccnggatncgaaaattttttcccgggggaacattaccccnnggggttcaatctttn

SEQ ID NO: 9773 - DNA, 500 bp, Homo sapiens
  misc_feature (5)..(5): "n" may be a, t, c, g, other or unknown
  misc_feature (7)..(7): "n" may be a, t, c, g, other or unknown
  misc_feature (30)..(30): "n" may be a, t, c, g, other or unknown
  misc_feature (55)..(55): "n" may be a, t, c, g, other or unknown
  misc_feature (113)..(114): "n" may be a, t, c, g, other or unknown
  misc_feature (129)..(129): "n" may be a, t, c, g, other or unknown
  misc_feature (194)..(194): "n" may be a, t, c, g, other or unknown
  misc_feature (268)..(268): "n" may be a, t, c, g, other or unknown
  misc_feature (283)..(283): "n" may be a, t, c, g, other or unknown
  misc_feature (288)..(288): "n" may be a, t, c, g, other or unknown
  misc_feature (336)..(336): "n" may be a, t, c, g, other or unknown
  misc_feature (366)..(367): "n" may be a, t, c, g, other or unknown
  misc_feature (395)..(395): "n" may be a, t, c, g, other or unknown
  misc_feature (430)..(430): "n" may be a, t, c, g, other or unknown
  misc_feature (435)..(435): "n" may be a, t, c, g, other or unknown
  misc_feature (441)..(441): "n" may be a, t, c, g, other or unknown
  misc_feature (481)..(482): "n" may be a, t, c, g, other or unknown
  misc_feature (491)..(491): "n" may be a, t, c, g, other or unknown
  misc_feature (500)..(500): "n" may be a, t, c, g, other or unknown
gaaananaatttcgttcttgtctctcaagntgcagtgcaacagcatgatcttggntcactgcaaccttcccctcccgggttcaagctattctcgtgcctcagcctcccaagtnnctgggattacaggtncccgccatcacgcccggctaatttttgtatttttagtaaaaacggggtttcaccatgttggccangctggtctcgaactcctgacctcaggtgatctacctgccttggcctcccaaagtactgggattacaggcagganccaccacgcccgganaccangttcttgacctaagtctgtaattaactgattcgggctaagccacttantatctctgggctttagttataaaatgaatnnacaggactcaagtttccttctggctccnaatggctatactttaaatttatttggttattcccnaatanccaaanaaaaaataaatcttatcatttctatcattaaaaaaagggnnatccttgtncccctttgn

SEQ ID NO: 9774 - DNA, 479 bp, Homo sapiens
  misc_feature (309)..(309): "n" may be a, t, c, g, other or unknown
  misc_feature (429)..(429): "n" may be a, t, c, g, other or unknown
  misc_feature (435)..(435): "n" may be a, t, c, g, other or unknown
  misc_feature (439)..(439): "n" may be a, t, c, g, other or unknown
  misc_feature (441)..(441): "n" may be a, t, c, g, other or unknown
  misc_feature (443)..(443): "n" may be a, t, c, g, other or unknown
  misc_feature (461)..(461): "n" may be a, t, c, g, other or unknown
  misc_feature (476)..(476): "n" may be a, t, c, g, other or unknown
aactttaacctaaaactttaattggaaagacaatcttataaaaatcttataacatattctagaaatggtccaaatactatcacaaatggaagaaagttcagcttgaggagcatccaatcatgtgaggtaaaagtcttctagtagaaccagcatgatcttccagaaaattacaaagtaaccattatctaccccgtcatctccttcttgcctggcatccccagagctgaagaaagggaagaaaaaaaatggatttgttttttgccatgaaaaatcttaacgtaaagattaatgcatcttgctgcttaaganaaaggtgttactttcactcggggtaaattaaatactaggattgagactaatctgttcacagccaaataggggtttactgaagctccaacgtttgaataaagaccacttattgggaagacncccccnaatncntnttattccttccctccacnaatttttattaagcntcc

SEQ ID NO: 9775 - DNA, 581 bp, Homo sapiens
  misc_feature (7)..(7): "n" may be a, t, c, g, other or unknown
  misc_feature (94)..(94): "n" may be a, t, c, g, other or unknown
  misc_feature (112)..(112): "n" may be a, t, c, g, other or unknown
  misc_feature (156)..(156): "n" may be a, t, c, g, other or unknown
  misc_feature (272)..(272): "n" may be a, t, c, g, other or unknown
  misc_feature (283)..(283): "n" may be a, t, c, g, other or unknown
  misc_feature (310)..(310): "n" may be a, t, c, g, other or unknown
  misc_feature (367)..(367): "n" may be a, t, c, g, other or unknown
  misc_feature (373)..(373): "n" may be a, t, c, g, other or unknown
  misc_feature (389)..(389): "n" may be a, t, c, g, other or unknown
  misc_feature (438)..(438): "n" may be a, t, c, g, other or unknown
  misc_feature (466)..(466): "n" may be a, t, c, g, other or unknown
  misc_feature (469)..(469): "n" may be a, t, c, g, other or unknown
  misc_feature (499)..(499): "n" may be a, t, c, g, other or unknown
  misc_feature (509)..(509): "n" may be a, t, c, g, other or unknown
  misc_feature (556)..(556): "n" may be a, t, c, g, other or unknown
  misc_feature (572)..(573): "n" may be a, t, c, g, other or unknown
  misc_feature (578)..(578): "n" may be a, t, c, g, other or unknown
gtcagancaagaacactttgttttggatttctcccttcccctcccacctcccacctctggaatataccgtctgctcaagtacccaagataaganttacacagatcagggcanaagaccgggaagaatgaaaaaagataaagggaaggaagtctccnctgaagaaaaaaagaaaaaaaataaaaataaaaaaaggtgcaaattgattaccttagtcctcctttgtctacccctgggctcctgggttaaagacatgtgtgcagccaaaatatantgttagggaanaaaaacccaacacgtcccttcttgtcncaaaacccaaaggtgagcctcaaatggttctgtctgtccaaaaggtgctccctccanggaaanggggcggaacaggtcnaaaacacatctccaggcacaaaagttttttggtggctgatggtgggganactggtttcccccccccaaaaggctgcnctncccccgggctggtggtgcttcccatccccnccccccctgnaggcaaatttttttcctggaaaccccccctgggggcccccggcggcnggaaaaaaaaaatgcnntttgnttc

SEQ ID NO: 9776 - DNA, 483 bp, Homo sapiens
  misc_feature (389)..(389): "n" may be a, t, c, g, other or unknown
  misc_feature (418)..(418): "n" may be a, t, c, g, other or unknown
  misc_feature (421)..(421): "n" may be a, t, c, g, other or unknown
  misc_feature (437)..(437): "n" may be a, t, c, g, other or unknown
  misc_feature (459)..(459): "n" may be a, t, c, g, other or unknown
  misc_feature (473)..(473): "n" may be a, t, c, g, other or unknown
  misc_feature (483)..(483): "n" may be a, t, c, g, other or unknown
gtagtttaaattttaaaacattgagataccacctcacaactattaaacactcaaagacaacattagtaactggctgtgttggggagggcctgaggaaaaaggcactctccgcattgtaggagaatacattgacaagagcatcatgaagggccattcagcgtctatcaaaacaacaaatgcatatgcccttagtattctgctatttcacttttgtggaatttttcctacatatataatcacaatcacatgaaatgacatgtgtataaagttattgattgcagcattgtttacagtagcacagtatcaaaaataaccaaattgacaccactagaaaaaccagctaaataaactgttattcccatcatgcaaggagatactttacagctgtnaaaatgaatgaagatactgtttgttaaantcntatgaaagattttccnagaatttacattttgaaataanccaggttccaagcncaaatgtttn

SEQ ID NO: 9777 - DNA, 412 bp, Homo sapiens
  misc_feature (300)..(300): "n" may be a, t, c, g, other or unknown
  misc_feature (303)..(303): "n" may be a, t, c, g, other or unknown
  misc_feature (339)..(339): "n" may be a, t, c, g, other or unknown
  misc_feature (349)..(349): "n" may be a, t, c, g, other or unknown
  misc_feature (358)..(358): "n" may be a, t, c, g, other or unknown
  misc_feature (369)..(369): "n" may be a, t, c, g, other or unknown
  misc_feature (374)..(374): "n" may be a, t, c, g, other or unknown
  misc_feature (404)..(404): "n" may be a, t, c, g, other or unknown
  misc_feature (407)..(407): "n" may be a, t, c, g, other or unknown
ccagacaccacaatgacttagagaacatttcatctccaagagctgatttcaaattatgtaacagtaaatgaaagcactctgtaactggtaaagcattacaaatgtcgtaatattcacgatttaaatcatatatggatgatgtcataaataattctaaaaagttggtattttcaacataatcacattttttaacaactagatttttgttaagcttttcagcactattccagaaatacttatagaggaaggacaactagtagacaaactgtcaccttatttcccaaattcacggttgggaanaanaactacttccactgaatgttaatgaaacattccacnaaatcccatnaatctttcnggacattcccnggtcnatggtccaagcagattaaaattactttccnatnacccc

SEQ ID NO: 9778 - DNA, 494 bp, Homo sapiens
  misc_feature (188)..(188): "n" may be a, t, c, g, other or unknown
  misc_feature (450)..(450): "n" may be a, t, c, g, other or unknown
  misc_feature (454)..(454): "n" may be a, t, c, g, other or unknown
  misc_feature (460)..(460): "n" may be a, t, c, g, other or unknown
  misc_feature (470)..(470): "n" may be a, t, c, g, other or unknown
  misc_feature (476)..(476): "n" may be a, t, c, g, other or unknown
  misc_feature (490)..(490): "n" may be a, t, c, g, other or unknown
  misc_feature (492)..(492): "n" may be a, t, c, g, other or unknown
aatctatgactacaggaaaacatttatttacatgccctctacaaaatggatttacaaaacatagtaactattagggtacatgaccttgctcctatcttccccattgtgcttcttctctatagaaaacccaatatgaaatgacaaagagtactgtactcagaataagaacttcatctatcataaatgtncacataaatatcagtgaattgtcatactcaagactcagattcaggaacttcttcatcagggcagcagtaatattccacaaaacatatttgtccatcttcatttctaatcatatactgtaatgaaaggaagcctctgttatctgtccgaatagataccttacaagataggactaatgcctttgtagagggtttcagtaaggaaatcttgtatctgttgacttgggtctgaatacaatgaaatgctcctccatcaaaatctttngganatccangggggaactncccgcntttccaaatttaanancc

SEQ ID NO: 9779 - DNA, 528 bp, Homo sapiens
  misc_feature (313)..(313): "n" may be a, t, c, g, other or unknown
  misc_feature (315)..(315): "n" may be a, t, c, g, other or unknown
  misc_feature (354)..(354): "n" may be a, t, c, g, other or unknown
  misc_feature (376)..(376): "n" may be a, t, c, g, other or unknown
  misc_feature (406)..(406): "n" may be a, t, c, g, other or unknown
  misc_feature (460)..(460): "n" may be a, t, c, g, other or unknown
  misc_feature (466)..(466): "n" may be a, t, c, g, other or unknown
  misc_feature (475)..(475): "n" may be a, t, c, g, other or unknown
  misc_feature (484)..(484): "n" may be a, t, c, g, other or unknown
  misc_feature (497)..(497): "n" may be a, t, c, g, other or unknown
  misc_feature (521)..(521): "n" may be a, t, c, g, other or unknown
  misc_feature (527)..(527): "n" may be a, t, c, g, other or unknown
aaaaatccatacaaatgatatttattactatttcttgtttaagccctcatgtatcttctctattgtatttttggattctgtaaacaaattactgtatcatgaccaatacttgctcaagatcaacattgaatcatggatttggtgtcactgagtgcaagccatgtgaggtctacatgtgctgggacataccattcaccaaacttctcagctgtttcacgactgtctctatcaacttctgtttgtctcgatcattcttcctgaactgagcaaatatattgttctttttgctagtatccttcatcttctccaaaanantaagggctgtgtttggattcacccgaaggtacttaaaanctggctgcccataatcagctangtaagtagaccaatcccaaaccataaacangtcaaggaattgtctgaaggtcaatgaatgctaactgcaaggtttccccccggnaaaccnggcacaagntccaaactngggaaaatttccnctttaaaacttttaaaaatggccngcccant

SEQ ID NO: 9780 - DNA, 441 bp, Homo sapiens
  misc_feature (225)..(225): "n" may be a, t, c, g, other or unknown
  misc_feature (238)..(238): "n" may be a, t, c, g, other or unknown
  misc_feature (240)..(240): "n" may be a, t, c, g, other or unknown
  misc_feature (265)..(265): "n" may be a, t, c, g, other or unknown
  misc_feature (283)..(283): "n" may be a, t, c, g, other or unknown
  misc_feature (297)..(297): "n" may be a, t, c, g, other or unknown
  misc_feature (346)..(346): "n" may be a, t, c, g, other or unknown
  misc_feature (366)..(366): "n" may be a, t, c, g, other or unknown
  misc_feature (368)..(368): "n" may be a, t, c, g, other or unknown
  misc_feature (379)..(379): "n" may be a, t, c, g, other or unknown
  misc_feature (404)..(404): "n" may be a, t, c, g, other or unknown
  misc_feature (430)..(430): "n" may be a, t, c, g, other or unknown
  misc_feature (432)..(432): "n" may be a, t, c, g, other or unknown
aagacgtagtctcactcttgctgcctaggctggagtgcaatggcacaatctcagctcactgcaacatctacctcttggaattaagcaattctcctgcctcagcctcccgaggagctgggattacaggcatgcaccaccacgcctggctaatttttgtatttttactggagacggggtttcatcatgttgatgatgaaaggtcccaaacctgaaacctttcacatntgaagcgaacatntnatcactacactacaaaaacccctcncagttcctggcacaaaanatattcctgaaatnttaccatctgctgtttttaactactagggtttccaatataacaaattcnactgcttttcaaaatttgantnataaatacggnaggaaacacaatccctcaggcaaanaggctgaaccctcatttacgggtccncncctaacccc

SEQ ID NO: 9781 - DNA, 503 bp, Homo sapiens
  misc_feature (1)..(503): "n" may be a, t, c, g, other or unknown
nnnnnnnnnnnnnnnnnnnnnnnnnnnnnnnnnnnnnnnnnnnnnnnnnnnnnnnnnnnnnnnnnnnnnnnnnnnnnnnnnnnnnnnnnnnnnnnnnnnnnnnnnnnnnnnnnnnnnnnnnnnnnnnnnnnnnnnnnnnnnnnnnnnnnnnnnnnnnnnnnnnnnnnnnnnnnnnnnnnnnnnnnnnnnnnnnnnnnnnnnnnnnnnnnnnnnnnnnnnnnnnnnnnnnnnnnnnnnnnnnnnnnnnnnnnnnnnnnnnnnnnnnnnnnnnnnnnnnnnnnnnnnnnnnnnnnnnnnnnnnnnnnnnnnnnnnnnnnnnnnnnnnnnnnnnnnnnnnnnnnnnnnnnnnnnnnnnnnnnnnnnnnnnnnnnnnnnnnnnnnnnnnnnnnnnnnnnnnnnnnnnnnnnnnnnnnnnnnnnnnnnnnnnnnnnnnnnnnnnnnnnnnnnnnnnnnnnnnnnnnnnnnnnnnnnnnnnnnnnnnnnnnnnnnnnnnnnnnnnnnnn

SEQ ID NO: 9782 - DNA, 409 bp, Homo sapiens
  misc_feature (78)..(78): "n" may be a, t, c, g, other or unknown
  misc_feature (161)..(161): "n" may be a, t, c, g, other or unknown
  misc_feature (184)..(184): "n" may be a, t, c, g, other or unknown
  misc_feature (255)..(255): "n" may be a, t, c, g, other or unknown
  misc_feature (305)..(305): "n" may be a, t, c, g, other or unknown
  misc_feature (317)..(317): "n" may be a, t, c, g, other or unknown
  misc_feature (340)..(340): "n" may be a, t, c, g, other or unknown
  misc_feature (344)..(345): "n" may be a, t, c, g, other or unknown
  misc_feature (365)..(365): "n" may be a, t, c, g, other or unknown
  misc_feature (387)..(387): "n" may be a, t, c, g, other or unknown
  misc_feature (406)..(406): "n" may be a, t, c, g, other or unknown
gattatttaaatagtttatttttgttaatgataggaatatctcctcagtaagttcaaaccattttataacaggggaanaataagctagtgttagatctggaaaagttaatatagcattatcttgaaatttcaggggtaaaaagtggttgactggaacttcnccttttttaaccaaacaatgttnaaataaacatatctgaatagaaaactgtatctggttcttttttatgtcaaatgtaaaatactttaataganaaaattccatttttctgcatctatttagatgatattacaataaaaggcantgtggattgganaacatagctagtgagaatattangttnngtaatttaaaaaaaaattancttttccctatgaaataaaatncatgatccccttaattccncct

SEQ ID NO: 9783 - DNA, 599 bp, Homo sapiens
  misc_feature (36)..(36): "n" may be a, t, c, g, other or unknown
  misc_feature (39)..(39): "n" may be a, t, c, g, other or unknown
  misc_feature (255)..(255): "n" may be a, t, c, g, other or unknown
  misc_feature (430)..(430): "n" may be a, t, c, g, other or unknown
  misc_feature (440)..(440): "n" may be a, t, c, g, other or unknown
  misc_feature (445)..(445): "n" may be a, t, c, g, other or unknown
  misc_feature (512)..(512): "n" may be a, t, c, g, other or unknown
  misc_feature (515)..(515): "n" may be a, t, c, g, other or unknown
  misc_feature (522)..(522): "n" may be a, t, c, g, other or unknown
  misc_feature (524)..(524): "n" may be a, t, c, g, other or unknown
  misc_feature (533)..(533): "n" may be a, t, c, g, other or unknown
  misc_feature (569)..(569): "n" may be a, t, c, g, other or unknown
  misc_feature (598)..(598): "n" may be a, t, c, g, other or unknown
gtataatgacttcttttcctttgggtaaatacctantantgggattgctggatcaaatggtaaatctacttttagtttttaaaggaatctccacactgttttccatagtggttgtactagtttacattcccaccaacagtgtaagagtgtttcttttcaccacatccatgccaacatctattatttttttgttatggccattcttgcaggagtaaggtggtatcgcagtgtggttttgatttgcatttccctganaattagtgatgttgaacatttttccatatgctcgttggtcatttgtgtatctccttgtgagaattgtctattcatgtccttagcccattttttgatgggatcgtttgtttttttcttgctgatttatttgcataccttgtagattctggatattagtcctttgtcagatgtatanattgtgaaanatttnctcccactctgtggggttgtctgttaactctgccgaattattcctttttggtgcaaaaccttttaanttnaattaantncccattaancaattaccctgtccttgttgcattgctttggggtcntgggcccaaaatcttgcccaaccaaattnt

SEQ ID NO: 9784 - DNA, 547 bp, Homo sapiens
  misc_feature (94)..(94): "n" may be a, t, c, g, other or unknown
  misc_feature (326)..(326): "n" may be a, t, c, g, other or unknown
  misc_feature (379)..(379): "n" may be a, t, c, g, other or unknown
  misc_feature (467)..(467): "n" may be a, t, c, g, other or unknown
  misc_feature (471)..(471): "n" may be a, t, c, g, other or unknown
  misc_feature (511)..(511): "n" may be a, t, c, g, other or unknown
  misc_feature (515)..(515): "n" may be a, t, c, g, other or unknown
  misc_feature (519)..(519): "n" may be a, t, c, g, other or unknown
  misc_feature (524)..(524): "n" may be a, t, c, g, other or unknown
  misc_feature (527)..(527): "n" may be a, t, c, g, other or unknown
caggattaggcacattttattccaaatcataaccataaagatttagaaaatcaaatacatcaaagaactttaaatctaaattacttttttaganactggggtaagtttgcatagtgaaattatgagcaccttttcaattctgttcactaaatttcatctctctcttcatatagtggtatttcaaaaggattcagttttcatgatacaggtgtaagactcctttcaaacgtttttaaaatacaacgtataaaaaaatgtggactgaagcctttagattgaacttaaagttctactgaatgtcaaaacaagcctaagttgaatataantaattcattgcctcaaaatatagtctaaattttaaaagaatgttgattctganacattacatgcagcaggggaaaaaaactgcaaatgcccaaaataacatgatatctatttggtgttccacactcctgggtggtaattcnaaanggggaaacttggtgatttctgctttgtcggcatatctatnggtncgtntcccnatnttactttgacttattttaaa

SEQ ID NO: 9785 - DNA, 622 bp, Homo sapiens
  misc_feature (536)..(536): "n" may be a, t, c, g, other or unknown
  misc_feature (558)..(558): "n" may be a, t, c, g, other or unknown
  misc_feature (571)..(571): "n" may be a, t, c, g, other or unknown
  misc_feature (579)..(579): "n" may be a, t, c, g, other or unknown
  misc_feature (586)..(586): "n" may be a, t, c, g, other or unknown
  misc_feature (601)..(601): "n" may be a, t, c, g, other or unknown
  misc_feature (605)..(605): "n" may be a, t, c, g, other or unknown
atttttgaaaatatcatgatagtgtttacaaatgcacacaactttgagcaaagctttacaaatccttcataccatacaaagcaaatgagaaaataatgtcaattcatttctaccccaaacctagttcttaggagaaaattcgcaggaagagaggtatgagtagtttcacagaatacattttcaagaattttttaaaaactgaaactccaatgcccagaacaagataaacagtatccttagcagttagcactgttaataaatctcagatacacaaaaatcaagttccagagggcaaagcatttaattacagtccacaacgagcactgttgtgattcatataaaacatagttctctccaatttctacacaaaccgctcttttaatttatttaattagatgaacaatgaaaatcgttttccttttcagcatttatctaagatgttagaaataacaaagtagttgcaataaagtgtttgaaatatttaataagaatgttcgaaccttataccaaattaattggtgaaaaaaagaaaaaanaattcctcctccaaccaacccnttttcctaaaatnaaaatacnttcccangggaaaaaatttctngggngaattacacccccaacc

SEQ ID NO: 9786 - DNA, 560 bp, Homo sapiens
  misc_feature (16)..(16): "n" may be a, t, c, g, other or unknown
  misc_feature (343)..(343): "n" may be a, t, c, g, other or unknown
  misc_feature (345)..(345): "n" may be a, t, c, g, other or unknown
  misc_feature (405)..(405): "n" may be a, t, c, g, other or unknown
  misc_feature (490)..(490): "n" may be a, t, c, g, other or unknown
  misc_feature (503)..(504): "n" may be a, t, c, g, other or unknown
  misc_feature (534)..(534): "n" may be a, t, c, g, other or unknown
  misc_feature (546)..(546): "n" may be a, t, c, g, other or unknown
  misc_feature (551)..(551): "n" may be a, t, c, g, other or unknown
  misc_feature (556)..(556): "n" may be a, t, c, g, other or unknown
gcctgcagattcttanagaacgtgggtaaactgtgctaaaagcttcctaatacattaagaaagtttgatgaaaggtactaaaaccagaaacttttattttaggaagtaaacttgtatcaacaagaaaattccctgtatttccagggataataattcctcatctgcttatttgaccctcactttccttttagactttatatctttccgattgaatgtatacatttttaactcagaaaaataatccacatgacttttaaggtgttcatcatgcccatctttcaccattgaaaattaaacaagtaaagggaagtccaagtacaaagctaccgctatgttttcggananatttgaaacaatctatttacacatgaaatattattaacatcaaaaaatgttttggctcancatgttgtttaaaatgattctctcagttccaaccaatcttctattcctagcgggccaattgccctaccaaaaagggactgcatgntgtctacaaaggnntttcctcccctttcttaaaacacacttccnccctggaaaacncctgnactanaacc

SEQ ID NO: 9787 - DNA, 339 bp, Homo sapiens
  misc_feature (55)..(55): "n" may be a, t, c, g, other or unknown
  misc_feature (65)..(65): "n" may be a, t, c, g, other or unknown
  misc_feature (81)..(81): "n" may be a, t, c, g, other or unknown
  misc_feature (87)..(87): "n" may be a, t, c, g, other or unknown
  misc_feature (186)..(186): "n" may be a, t, c, g, other or unknown
  misc_feature (265)..(265): "n" may be a, t, c, g, other or unknown
  misc_feature (285)..(285): "n" may be a, t, c, g, other or unknown
  misc_feature (298)..(298): "n" may be a, t, c, g, other or unknown
  misc_feature (304)..(304): "n" may be a, t, c, g, other or unknown
  misc_feature (315)..(315): "n" may be a, t, c, g, other or unknown
  misc_feature (318)..(318): "n" may be a, t, c, g, other or unknown
  misc_feature (323)..(323): "n" may be a, t, c, g, other or unknown
atatatacattagaattttttccttttattcttgttcacatcttccaaagctgancttcgtttcnaaaggaaagataccanaagcangaagaaggtccttgggaagggaagtggaatctccctcctctagcccccttgctacctcttaacaggcttcaaagtcagaatacagccatcagctgagancagttcattttggcacactgggaggccggctgtgcacaccggacctctctagtgggggatcaggtcctctgctctccantggggcctggaacagctccngtgagatgccccncctgtnggctgggggtncancacanaacctcagctccccca

SEQ ID NO: 9788 - DNA, 614 bp, Homo sapiens
  misc_feature (89)..(89): "n" may be a, t, c, g, other or unknown
  misc_feature (466)..(466): "n" may be a, t, c, g, other or unknown
  misc_feature (509)..(509): "n" may be a, t, c, g, other or unknown
  misc_feature (601)..(601): "n" may be a, t, c, g, other or unknown
  misc_feature (604)..(604): "n" may be a, t, c, g, other or unknown
  misc_feature (610)..(610): "n" may be a, t, c, g, other or unknown
aaaatgtgctcagtgttaactttattgataataaccaaaaacaaacctaatattttatgattttaaaattatttttaagcacaaaatanacccatgttggggatgaataacatgtctgagtttgttaattttgtctgctacttttccctatatttccttgtttccttcatcctaaaatttttaaaaatgaaaactttaatcattgttgcatgtttaaactattgaatattttcttttgttaactgaagtaaaaggaaacattcttgtagaattatggaaactaataatgcagtaggacttaaaattgaatgttaggaggttcttcgttttaagaatcttcccgtgggagaagtttccatcgaactgttatatcaattttatcatcaacatttcccagcgcctgctctttacagagttctaagaacacctgctccaaggtagcctgagagaggctgtattcctccangttgaaggtctgtttcactgcctttaatttgaaaaaggctganacagaaggtggacatcccccacaggtaacttacatgccataaagaagaatatcttcccgccaaccaccgtgggaaaacctccaaattccgtntgnaaactncccc

SEQ ID NO: 9789 - DNA, 421 bp, Homo sapiens
  misc_feature (411)..(411): "n" may be a, t, c, g, other or unknown
  misc_feature (414)..(414): "n" may be a, t, c, g, other or unknown
  misc_feature (417)..(421): "n" may be a, t, c, g, other or unknown
atctttaaaaacagatttaatgtgttaaaaaaaaatagaatcaagtggtgtgcttcgccactgagatgattgtgctgtggctccggggccacatagcaccagggctcgatagcagagaggagtttcggccctcgtccagtgcatgtgactggtgcaggggcggaggcccagccgcacgggggccagagcaggaacacagccacctgttccaacaggcgctgtgccttgtatgccccgtacatgtgcctgccctgagaggagcatgggccaggcctctcttccagctgtgcccccagggtgccagtgaggcagggcgacctctcaccaacagagctcctccaagccatgctggatttggattcctggaaccccctgtacccatgcggtgggccacccccagggggagggganganatnnnnn

SEQ ID NO: 9790 - DNA, 573 bp, Homo sapiens
  misc_feature (66)..(67): "n" may be a, t, c, g, other or unknown
  misc_feature (344)..(344): "n" may be a, t, c, g, other or unknown
  misc_feature (354)..(354): "n" may be a, t, c, g, other or unknown
  misc_feature (367)..(367): "n" may be a, t, c, g, other or unknown
  misc_feature (429)..(429): "n" may be a, t, c, g, other or unknown
  misc_feature (442)..(442): "n" may be a, t, c, g, other or unknown
  misc_feature (495)..(495): "n" may be a, t, c, g, other or unknown
  misc_feature (530)..(530): "n" may be a, t, c, g, other or unknown
  misc_feature (534)..(534): "n" may be a, t, c, g, other or unknown
  misc_feature (554)..(554): "n" may be a, t, c, g, other or unknown
  misc_feature (560)..(560): "n" may be a, t, c, g, other or unknown
  misc_feature (562)..(562): "n" may be a, t, c, g, other or unknown
  misc_feature (571)..(571): "n" may be a, t, c, g, other or unknown
cgggcactgaaatcttttattcgttaatttagtttctggcaagtgtttcctcaaaatcatcaagtnnttccttgaacgtaaaaccacacattaaaaatgttattccactgaaaatgactcctatgcaaatatcgacatgtgatgtgtgtccaaatgccagagcattttgagaaaagaatcctctgcaaataaaattaaggtaaaagctgagtcagggatgatccgattcccaccccaggaaatgacctggagctgcaccaactcagcgaggttggagctgaaaccctgagttaataatgatcaaaagggacaaaacaggaaggcctggggaccgtggacagggnaagtgcgcanccctgattgccantgggcggaacaaggtcaggctcggggaaacaagaagggttgttgggcgttggccctaaacanaacagcctggccnaagctgggggccactgttcctgaagccaaaagaaccaggttggttgggggccntttggaaaggaataaaaaggcctaaaaaaaacccnctgnaaagttccttttaaagcctnttcaancnaaaaatccntt

SEQ ID NO: 9791 - DNA, 434 bp, Homo sapiens
  misc_feature (29)..(29): "n" may be a, t, c, g, other or unknown
  misc_feature (344)..(344): "n" may be a, t, c, g, other or unknown
  misc_feature (356)..(356): "n" may be a, t, c, g, other or unknown
  misc_feature (385)..(385): "n" may be a, t, c, g, other or unknown
  misc_feature (400)..(400): "n" may be a, t, c, g, other or unknown
  misc_feature (410)..(410): "n" may be a, t, c, g, other or unknown
  misc_feature (424)..(424): "n" may be a, t, c, g, other or unknown
  misc_feature (433)..(433): "n" may be a, t, c, g, other or unknown
caaataattattggtcatcggtcaagcanagtcttctgaggtctctatcttaaaacagctgcagggataagggacatcactacctactgtctttggattacatgtgattctgaaaactattcaatcctgaaatgtaatcaaatggccaaatacaaccccaatttaccactgatttttacgtaaagttgagtctttgatcacaatgctgttccttaagaaatgatcaataactgctgagagatggttgaaaaatgccttttccccacattttggtttgtttgttgtttgctgactttacttggcaagagttattgggcctcaaatcagatatttacaactgtaanacaactgggaancagggaaaagggaaaaggcaaggggggtnggaaaaaggactacnaaaaaaaatnttttcttttcaaangttaaaacna

SEQ ID NO: 9792 - DNA, 454 bp, Homo sapiens
  misc_feature (4)..(4): "n" may be a, t, c, g, other or unknown
  misc_feature (63)..(63): "n" may be a, t, c, g, other or unknown
  misc_feature (69)..(69): "n" may be a, t, c, g, other or unknown
  misc_feature (82)..(82): "n" may be a, t, c, g, other or unknown
  misc_feature (109)..(109): "n" may be a, t, c, g, other or unknown
  misc_feature (207)..(207): "n" may be a, t, c, g, other or unknown
  misc_feature (229)..(229): "n" may be a, t, c, g, other or unknown
  misc_feature (251)..(251): "n" may be a, t, c, g, other or unknown
  misc_feature (277)..(278): "n" may be a, t, c, g, other or unknown
  misc_feature (282)..(282): "n" may be a, t, c, g, other or unknown
  misc_feature (313)..(313): "n" may be a, t, c, g, other or unknown
  misc_feature (332)..(332): "n" may be a, t, c, g, other or unknown
  misc_feature (366)..(366): "n" may be a, t, c, g, other or unknown
  misc_feature (376)..(376): "n" may be a, t, c, g, other or unknown
  misc_feature (403)..(403): "n" may be a, t, c, g, other or unknown
  misc_feature (410)..(410): "n" may be a, t, c, g, other or unknown
  misc_feature (441)..(441): "n" may be a, t, c, g, other or unknown
  misc_feature (445)..(445): "n" may be a, t, c, g, other or unknown
  misc_feature (448)..(448): "n" may be a, t, c, g, other or unknown
ccanaaacttgacacaatagtactttatttttcacttatccaactgcctcgtacaaatacaantggganttgcaaatgacanaggtttggctctgcacagttttttcanaaatccaggcttctggtgatttactctgtgtaacacatagcttcccaagtcacatttaatgtcaacatgaaaggctgcacatgggagggttttatganccaggtataaaaattgcacatntcacttccactcacattggaantaatggccaaaatttaataatacccnnctcnaaaaaggctggaaaattgcctgggctatgtnttcaggacaaaaggaatcnggtttgatgaaaaataaccggtgtcaaccataancactattatnttctaggcactttgctgggggattcantgatgancaaaaaacatccttgatgaacaaaaatgacnttcntantaaaca

SEQ ID NO: 9793 - DNA, 318 bp, Homo sapiens
  misc_feature (199)..(199): "n" may be a, t, c, g, other or unknown
  misc_feature (240)..(240): "n" may be a, t, c, g, other or unknown
  misc_feature (242)..(242): "n" may be a, t, c, g, other or unknown
  misc_feature (280)..(280): "n" may be a, t, c, g, other or unknown
  misc_feature (287)..(287): "n" may be a, t, c, g, other or unknown
  misc_feature (310)..(310): "n" may be a, t, c, g, other or unknown
  misc_feature (314)..(314): "n" may be a, t, c, g, other or unknown
  misc_feature (317)..(317): "n" may be a, t, c, g, other or unknown
acagactatttgtttattatgaaactaactggtaaagcagagtaaatcccattctatattatagcactacaaacatccttagtcattccttcatttgttcattcattcattcatgcattcagtgagtatttcttaagctcctacagtgtaccaggaggcactctgttcattgtggcattacaaagataaagattaaggnacgtactctgccctcaaggagctcccaatctaattgtgcananagatgtgaaaatgaagcatgaaactccatcgtgaggancgccganaacaaaagtctgctcgaagtgangcanaant

SEQ ID NO: 9794 - DNA, 575 bp, Homo sapiens
  misc_feature (13)..(13): "n" may be a, t, c, g, other or unknown
  misc_feature (15)..(15): "n" may be a, t, c, g, other or unknown
  misc_feature (98)..(98): "n" may be a, t, c, g, other or unknown
  misc_feature (206)..(206): "n" may be a, t, c, g, other or unknown
  misc_feature (216)..(216): "n" may be a, t, c, g, other or unknown
  misc_feature (235)..(235): "n" may be a, t, c, g, other or unknown
  misc_feature (291)..(291): "n" may be a, t, c, g, other or unknown
  misc_feature (469)..(469): "n" may be a, t, c, g, other or unknown
  misc_feature (520)..(520): "n" may be a, t, c, g, other or unknown
  misc_feature (537)..(537): "n" may be a, t, c, g, other or unknown
  misc_feature (550)..(550): "n" may be a, t, c, g, other or unknown
  misc_feature (560)..(560): "n" may be a, t, c, g, other or unknown
  misc_feature (566)..(566): "n" may be a, t, c, g, other or unknown
  misc_feature (568)..(569): "n" may be a, t, c, g, other or unknown
gttttgtttgtananacagggtttctctatgttgcccaggctgatcttcaactcctgggctcaagtgatatccccggctctgcctcccaaagtgctanaatttcaggcgtgagcccccgtgcccagtcagcattggctttcacatacattcacttgctttattttctttacacctgtgtcatatattaaaaaactacacattaganaatttaaaanatttgccaaagttgctcanaaagtgatctgatgctaagatggtgtccttccacttgtactacccctatagcctanaagtataccattaatccatgtcctcctttataacttggagtcacacatggatcatgctgtttcagttatcttgtctaatttgatttctaacattgttattgattctacccctaagtgccccaccttaaaccacaaaatgttaaaaatgctggatcatttctacaatgttatctctaancctggtgaaccaaaaaattgctaaactactttgtgcaacattacaatggcntgctgttactttatttnccaatccaaaatnttcaaaaatnaaattnannccaact

SEQ ID NO: 9795 - DNA, 518 bp, Homo sapiens
  misc_feature (201)..(201): "n" may be a, t, c, g, other or unknown
  misc_feature (258)..(258): "n" may be a, t, c, g, other or unknown
  misc_feature (262)..(262): "n" may be a, t, c, g, other or unknown
  misc_feature (280)..(280): "n" may be a, t, c, g, other or unknown
  misc_feature (401)..(401): "n" may be a, t, c, g, other or unknown
  misc_feature (426)..(426): "n" may be a, t, c, g, other or unknown
  misc_feature (440)..(441): "n" may be a, t, c, g, other or unknown
  misc_feature (450)..(450): "n" may be a, t, c, g, other or unknown
  misc_feature (467)..(467): "n" may be a, t, c, g, other or unknown
  misc_feature (488)..(488): "n" may be a, t, c, g, other or unknown
  misc_feature (511)..(511): "n" may be a, t, c, g, other or unknown
ggatttatgttgtcaataaacattttattagttccttgtatggataagaagcttaaagtcaatgactaattcatgccatatacacatattcctgttttagattttctattagcaaacatcttgttcaattgttgttgggagttttgagtacattcagaaaatgaaaccccacaatcactgtttacaacaaatgagtatgtntttttcctaataaaatgaagctgcttgaaaaaaacataccttaaaattaagaatgtnctcntcacttaataagaatgtnctcattattaaacaataggcaaatcaaacaaactactaaagtggcaatgctcgggattttgagttccgccccaaacttgaaaataaagtaaacagccctcaaactttgaaataaatggatncccccgtgaaattaatttgcctatncaaaaaacgaattnncccaacccntccaccctccgaagggntttttcccccactttatccancctttcgggcaaaatgggtaccnttaattt

SEQ ID NO: 9796 - DNA, 555 bp, Homo sapiens
  misc_feature (3)..(3): "n" may be a, t, c, g, other or unknown
  misc_feature (499)..(499): "n" may be a, t, c, g, other or unknown
  misc_feature (517)..(517): "n" may be a, t, c, g, other or unknown
  misc_feature (522)..(522): "n" may be a, t, c, g, other or unknown
  misc_feature (529)..(529): "n" may be a, t, c, g, other or unknown
  misc_feature (545)..(545): "n" may be a, t, c, g, other or unknown
  misc_feature (549)..(549): "n" may be a, t, c, g, other or unknown
  misc_feature (553)..(553): "n" may be a, t, c, g, other or unknown
gtncttaagtaatttattttaaaattataagatttacagtgccttgattatgcaaaatagcataatggaaattaaaccaaatcaataaaccaaagagaaagaaaacttaattttctctagtatccatacttaaaccatctttgtaagtatctgatgtcccaaccatgtcttatgtagaaagtataatcgtttcaaatgtttcacttgcaggtttaatttctcattttcaatttttatgaactgtaatgcaatttcaaatcctattatacctagtgtttatactgcaacagcagcaaatctcacatgtgtaatcaaatgtggaactggggcacagcttctagctgtagacagaaattatacactgcattcagtccaggagagtacattacattaaccagagcgtagagtttagtacacttattgcagggtggtatttctttccctctgatctgaatcagctgagctgctgagcagacatattactggtgtggatagtaanactgctgtgggggctganggaangggtatnaagctgctggggtccnggtntgancc

SEQ ID NO: 9797 - DNA, 434 bp, Homo sapiens
  misc_feature (164)..(164): "n" may be a, t, c, g, other or unknown
  misc_feature (224)..(224): "n" may be a, t, c, g, other or unknown
  misc_feature (358)..(358): "n" may be a, t, c, g, other or unknown
  misc_feature (364)..(364): "n" may be a, t, c, g, other or unknown
  misc_feature (386)..(386): "n" may be a, t, c, g, other or unknown
  misc_feature (406)..(407): "n" may be a, t, c, g, other or unknown
  misc_feature (425)..(425): "n" may be a, t, c, g, other or unknown
  misc_feature (433)..(433): "n" may be a, t, c, g, other or unknown
ctcaagctggtctcaactcttggcttcaagcaatcctcctacctcggcctcccaaagtgccaggattacaggtgtgagccactgtgcccagcctatgctacatctttctaatcccattctgtatatactgtgattttactttcctgaaggggcaaagaatgaanaattaacagcaatcagcaagaaactggtttctctcttactgacaactcctctactccaanacagccttccatggttgtaactaatgctgttagtcaatattacagtttgcccctttctggggatgtgacaggattgcaatttctgtcctctctgtggttaaaaaggggttctgttacaattcctggccatacantatgantaatgtgccaaaaaatgggtanctccattaacttgggatccnnaatgtggagaagttatanttatgttna

SEQ ID NO: 9798 - DNA, 593 bp, Homo sapiens
  misc_feature (92)..(92): "n" may be a, t, c, g, other or unknown
  misc_feature (118)..(118): "n" may be a, t, c, g, other or unknown
  misc_feature (179)..(179): "n" may be a, t, c, g, other or unknown
  misc_feature (234)..(234): "n" may be a, t, c, g, other or unknown
  misc_feature (258)..(258): "n" may be a, t, c, g, other or unknown
  misc_feature (284)..(284): "n" may be a, t, c, g, other or unknown
  misc_feature (356)..(356): "n" may be a, t, c, g, other or unknown
  misc_feature (363)..(363): "n" may be a, t, c, g, other or unknown
  misc_feature (379)..(379): "n" may be a, t, c, g, other or unknown
  misc_feature (383)..(383): "n" may be a, t, c, g, other or unknown
  misc_feature (429)..(429): "n" may be a, t, c, g, other or unknown
  misc_feature (436)..(436): "n" may be a, t, c, g, other or unknown
  misc_feature (460)..(460): "n" may be a, t, c, g, other or unknown
  misc_feature (504)..(504): "n" may be a, t, c, g, other or unknown
  misc_feature (507)..(507): "n" may be a, t, c, g, other or unknown
  misc_feature (515)..(515): "n" may be a, t, c, g, other or unknown
  misc_feature (525)..(525): "n" may be a, t, c, g, other or unknown
  misc_feature (561)..(561): "n" may be a, t, c, g, other or unknown
  misc_feature (563)..(563): "n" may be a, t, c, g, other or unknown
  misc_feature (572)..(572): "n" may be a, t, c, g, other or unknown
aggtagtgggtgtattataaaatttttttaatgaacatatgtttacaatgaaaaatacaaactaatgatttttttttcacgtagctttagantcaaactattcacccaacagcaaggntacttgtgggaacagaaaggaaactataatacttccctttcatctcctcaaccactcatanatggcctggctattgagtcaaattatttattcaggatgtcatcaattctctgtanatgatatgccaaggcaaacagcanaaatcacttctaaattctgacagaantccagattttgcccttcacatatgccagtgctctccaagtaaaaatgggctctacactgggctagacactcnccagaangggatgcccacgccanacanctgctccacttgcagtccttcctctggcttcttacacccattacantgaaaanggtgcgggacccatacaacccagncaggaagaatgacaggctttgcaaacccgtggtcaaaataaaanccnctccacancggggcaaanatggccttgacccaaacctggggggggctgcagctntncattaaaangttttggcccaaacactggcc

SEQ ID NO: 9799 - DNA, 588 bp, Homo sapiens
  misc_feature (108)..(108): "n" may be a, t, c, g, other or unknown
  misc_feature (144)..(144): "n" may be a, t, c, g, other or unknown
  misc_feature (277)..(277): "n" may be a, t, c, g, other or unknown
  misc_feature (351)..(351): "n" may be a, t, c, g, other or unknown
  misc_feature (357)..(357): "n" may be a, t, c, g, other or unknown
  misc_feature (392)..(392): "n" may be a, t, c, g, other or unknown
  misc_feature (485)..(485): "n" may be a, t, c, g, other or unknown
  misc_feature (495)..(495): "n" may be a, t, c, g, other or unknown
  misc_feature (505)..(505): "n" may be a, t, c, g, other or unknown
  misc_feature (512)..(513): "n" may be a, t, c, g, other or unknown
  misc_feature (552)..(552): "n" may be a, t, c, g, other or unknown
  misc_feature (575)..(575): "n" may be a, t, c, g, other or unknown
  misc_feature (585)..(585): "n" may be a, t, c, g, other or unknown
catcactatcatatatattatgttgtcttaccattcaaactgttggcactatacctaatccacagtaaacaggattatcattcccataatatgatctttcttatgaanaatttggtaacagtattctattgtagttttcatganaaggcttttcctattcaccaaattgactcggttccttgtcagtatgaataatgacccaaggtttactggggatggtgacaatgtaggaagggtccctcgcctcattcagtgccttctcagaggccctctccanaacagccatgtgtgacattctgatgtggtcatttctatttacaataatatacatatttttctgctgcatgcgtncaacantgttcaatccagaacccaccccccaggggggtttnctcacactgtttctctcaaccgtggctgctctgataaacactgaaacactgatttctgaacaaaacctttcccccaaaatcccccccttgttngggtttgtcnccattatttnttgtccnnattttatccaattggaacctttgctaaaggcctcccccnctccccaccccctttggggtccncccccttttnaat

SEQ ID NO: 9800 - DNA, 416 bp, Homo sapiens
  misc_feature (91)..(91): "n" may be a, t, c, g, other or unknown
  misc_feature (131)..(131): "n" may be a, t, c, g, other or unknown
  misc_feature (217)..(217): "n" may be a, t, c, g, other or unknown
  misc_feature (238)..(238): "n" may be a, t, c, g, other or unknown
  misc_feature (244)..(244): "n" may be a, t, c, g, other or unknown
  misc_feature (260)..(260): "n" may be a, t, c, g, other or unknown
  misc_feature (333)..(333): "n" may be a, t, c, g, other or unknown
  misc_feature (375)..(375): "n" may be a, t, c, g, other or unknown
  misc_feature (386)..(386): "n" may be a, t, c, g, other or unknown
  misc_feature (390)..(390): "n" may be a, t, c, g, other or unknown
  misc_feature (396)..(396): "n" may be a, t, c, g, other or unknown
  misc_feature (402)..(402): "n" may be a, t, c, g, other or unknown
  misc_feature (405)..(405): "n" may be a, t, c, g, other or unknown
ctttctctgcatattatttatctattgctgcataacaagttagaccaaaactgagcaacttaaaacaacaaacatcgattatctcacagantctctgcttctaggttcactaatgtggctgtgggcagganacttcattttttaccacgtaagtctctttataggcctgctcatagcatggcagctagcttcccccagagcgagtgagccaagatanattgggggcggtgggtggcanaaaaanagggctcaagtaaaanctgcagtgtcttttataacctaatcttggaagtggcatgccatcacttctgccatattctattggtcacaaanacaactttggtacattgtgggaggggacacacacagaatgtntacaccaaganacanggatcnttttancanctgtattattt

SEQ ID NO: 9801 - DNA, 402 bp, Homo sapiens
  misc_feature (50)..(50): "n" may be a, t, c, g, other or unknown
  misc_feature (106)..(106): "n" may be a, t, c, g, other or unknown
  misc_feature (176)..(176): "n" may be a, t, c, g, other or unknown
  misc_feature (179)..(179): "n" may be a, t, c, g, other or unknown
  misc_feature (259)..(259): "n" may be a, t, c, g, other or unknown
  misc_feature (272)..(272): "n" may be a, t, c, g, other or unknown
  misc_feature (307)..(307): "n" may be a, t, c, g, other or unknown
  misc_feature (335)..(335): "n" may be a, t, c, g, other or unknown
  misc_feature (337)..(337): "n" may be a, t, c, g, other or unknown
  misc_feature (350)..(350): "n" may be a, t, c, g, other or unknown
  misc_feature (357)..(357): "n" may be a, t, c, g, other or unknown
  misc_feature (361)..(361): "n" may be a, t, c, g, other or unknown
  misc_feature (378)..(378): "n" may be a, t, c, g, other or unknown
gaagcttttaaacaatgagcttactgtgagcaaacagaagcaaggactcnaagagataattagctcatgcatctggtgctggctaataattttcacatgaatgaanaaaccactctatgttaactgtatttatttttaaaaaatagtttgaaatggtaataaaatgcaattttcanaancatcttggtgatcgagtaaaactgcttaatttaaaaaataattcagttacttccacctggcctggggtggataacatgtntcaaaaacttccntcccactaaattctggcaaatggattgatctttcncaatatatatatatatatatatattttncnccatttcctcctnatggaancccnaaaaccaggaagaaccncccgttttgaaaaaaaaaatgttt

SEQ ID NO: 9802 - DNA, 502 bp, Homo sapiens
  misc_feature (64)..(64): "n" may be a, t, c, g, other or unknown
  misc_feature (80)..(80): "n" may be a, t, c, g, other or unknown
  misc_feature (103)..(103): "n" may be a, t, c, g, other or unknown
  misc_feature (379)..(379): "n" may be a, t, c, g, other or unknown
  misc_feature (382)..(382): "n" may be a, t, c, g, other or unknown
  misc_feature (448)..(448): "n" may be a, t, c, g, other or unknown
  misc_feature (460)..(460): "n" may be a, t, c, g, other or unknown
  misc_feature (470)..(470): "n" may be a, t, c, g, other or unknown
  misc_feature (473)..(473): "n" may be a, t, c, g, other or unknown
  misc_feature (481)..(481): "n" may be a, t, c, g, other or unknown
  misc_feature (492)..(492): "n" may be a, t, c, g, other or unknown
  misc_feature (498)..(498): "n" may be a, t, c, g, other or unknown
ggtatcagaacataactattttattacaaaacttaacattatttacaaaatgaaaaaataatcnaatgactattgcaggncaaagttaaaggtttttcactcnatgattgaagaaaaattaagcaatatttccatgcactcacaccagatcatttctgaaatatgcaaactcttaaaattcatgttagtaaaactttaatgtattcataatacttgctatgtttattagaagatggtcaaaaaaaatccatggttctgtacaataatattaacagtttgttcattttcctttaatattttttggcttccatgaacactcgtagattgaacattctgcaagtaagaattataatagtacctctgtcccttgctgaattcntcnccacaagaaaaacacaaatagtttaatgcttttgcactaaactgaataattattactcccaaattnttttaactgaanccctccttgntantcaatggntggattctttnaaaccnttaa

SEQ ID NO: 9803 - DNA, 608 bp, Homo sapiens
  misc_feature (44)..(44): "n" may be a, t, c, g, other or unknown
  misc_feature (86)..(86): "n" may be a, t, c, g, other or unknown
  misc_feature (126)..(126): "n" may be a, t, c, g, other or unknown
  misc_feature (461)..(461): "n" may be a, t, c, g, other or unknown
  misc_feature (480)..(480): "n" may be a, t, c, g, other or unknown
  misc_feature (554)..(554): "n" may be a, t, c, g, other or unknown
  misc_feature (570)..(570): "n" may be a, t, c, g, other or unknown
  misc_feature (580)..(580): "n" may be a, t, c, g, other or unknown
  misc_feature (584)..(584): "n" may be a, t, c, g, other or unknown
  misc_feature (589)..(589): "n" may be a, t, c, g, other or unknown
  misc_feature (593)..(593): "n" may be a, t, c, g, other or unknown
gggagtattatttattccaataaacaaaaatgttttatttcccnttcaatggtatatatcttaaattgctggaacatacaagtatnaaaataagattattttagaaaactccagttttgaagggcncgacaatagttcagacatttgtcagtagctatgaagccacttttaacatggaatgaatatccctttactccaactcttggtcttattacatttttaaatcaaatcagcgtgctggaaatagagaaaaattcccaaagggaaatataaaataattttaagcattttcagaaatacaagttacacttaagaaacttgtattaaaggatgttaatctgagataaacagaaaacaaacgttttgcaaagcactactttttgcatctgtttgaggatacacagtttgcagctctcctgccagaagcaaaatactgactctagcacagcagaaaaggctcnactttaagaaaaaaatgantggtcgctttccatgactgaacataacatattaaactttaagaattttaacaatgccaattaccaccatagtanaaaatactccttttanaatacaaaantccnctttntttncccttaaaaatctcc

SEQ ID NO: 9804 - DNA, 588 bp, Homo sapiens
  misc_feature (186)..(186): "n" may be a, t, c, g, other or unknown
  misc_feature (188)..(188): "n" may be a, t, c, g, other or unknown
  misc_feature (193)..(193): "n" may be a, t, c, g, other or unknown
  misc_feature (492)..(492): "n" may be a, t, c, g, other or unknown
  misc_feature (538)..(538): "n" may be a, t, c, g, other or unknown
  misc_feature (553)..(553): "n" may be a, t, c, g, other or unknown
  misc_feature (565)..(565): "n" may be a, t, c, g, other or unknown
  misc_feature (567)..(567): "n" may be a, t, c, g, other or unknown
  misc_feature (574)..(574): "n" may be a, t, c, g, other or unknown
  misc_feature (586)..(586): "n" may be a, t, c, g, other or unknown
gagacagagtcccgctgtcccaggctggagtgcagtggcgcaactatggctcaccgaagcctcagtcctccaggcccaagcgatcctcccgcctcagcctccagagcagccgggactatcagcatatgccaccacacccggctaattttcttgattttcttttcttcctttttttttttttagtananatganacctcaccctgttgcccaggctggtcccgaactcctgagctcaagtgatcctcctgctttggcctcccaaagtgctgggatcacaggcctgagccaccatgcctggcctcagagctgtttttttctgctattggcttctagttttatttcactgtggtcagaaaagatacttggtatgacttcagtcttcttaaacttgttaggacttgttcgtgactgttatggtttgaatgtttgtcccctcctaaacttatatgttggagatttaatcaccaatgcaacagttttggggaagggangcctaatgggaagtgttaggtcatgaagggctttaaccttggtgantggaataatgccgcncttggaaaaaancnaattggnaatggggttccncc

SEQ ID NO: 9805 - DNA, 542 bp, Homo sapiens
  misc_feature (146)..(146): "n" may be a, t, c, g, other or unknown
  misc_feature (162)..(162): "n" may be a, t, c, g, other or unknown
  misc_feature (190)..(190): "n" may be a, t, c, g, other or unknown
  misc_feature (270)..(270): "n" may be a, t, c, g, other or unknown
  misc_feature (289)..(289): "n" may be a, t, c, g, other or unknown
  misc_feature (292)..(292): "n" may be a, t, c, g, other or unknown
  misc_feature (379)..(379): "n" may be a, t, c, g, other or unknown
  misc_feature (490)..(490): "n" may be a, t, c, g, other or unknown
  misc_feature (492)..(492): "n" may be a, t, c, g, other or unknown
  misc_feature (516)..(516): "n" may be a, t, c, g, other or unknown
  misc_feature (518)..(518): "n" may be a, t, c, g, other or unknown
  misc_feature (525)..(525): "n" may be a, t, c, g, other or unknown
  misc_feature (531)..(531): "n" may be a, t, c, g, other or unknown
  misc_feature (538)..(538): "n" may be a, t, c, g, other or unknown
gactgaattgaaaatagttttatagcagaaaactgagaaacaagaaaacattaaaattgcaccacagaatctgaggtttcaaagatctgtttgaaatatcttcatttcattaatttgaaatttggggcaggatatgatcttaagantctaaacattcaaganacgagggcaagaaagccagtcacatgtngaataccaagtccaaggcacgcgtcctgcggtcaggacagtgttctaggtgtgaactcacttaccgtggggcctatgaancaggagtgtgtggccttcnaanttcgaatgtgttcatgtgggtgtgtagcgtgtgaatcggacatggaaaaaaaaaaatcccctatctgcccagtcaaaaataaatgtncacctgaaaatcagatgcaacactaacttgcaaagattcccacaacataaaaaaaaaatgatgctttcatgttgctgggccgtggacaatgtggaaaaactgaagcgtttncngcgctgttgtcaaaacaactcctntncaaacanggggtngaatttngctt

SEQ ID NO: 9806 - DNA, 577 bp, Homo sapiens
  misc_feature (3)..(3): "n" may be a, t, c, g, other or unknown
  misc_feature (27)..(27): "n" may be a, t, c, g, other or unknown
  misc_feature (168)..(168): "n" may be a, t, c, g, other or unknown
  misc_feature (214)..(214): "n" may be a, t, c, g, other or unknown
  misc_feature (268)..(268): "n" may be a, t, c, g, other or unknown
  misc_feature (379)..(379): "n" may be a, t, c, g, other or unknown
  misc_feature (382)..(382): "n" may be a, t, c, g, other or unknown
  misc_feature (422)..(422): "n" may be a, t, c, g, other or unknown
  misc_feature (442)..(442): "n" may be a, t, c, g, other or unknown
  misc_feature (472)..(472): "n" may be a, t, c, g, other or unknown
  misc_feature (516)..(516): "n" may be a, t, c, g, other or unknown
  misc_feature (519)..(519): "n" may be a, t, c, g, other or unknown
  misc_feature (532)..(532): "n" may be a, t, c, g, other or unknown
  misc_feature (542)..(542): "n" may be a, t, c, g, other or unknown
  misc_feature (552)..(552): "n" may be a, t, c, g, other or unknown
  misc_feature (566)..(566): "n" may be a, t, c, g, other or unknown
  misc_feature (575)..(575): "n" may be a, t, c, g, other or unknown
ganacagggtctcactctatcacccanactggattgcagtagctcaatcacggctcactgaagcctcaaccttctgggctcaagtgatcctccagcctcagcctcccaagtaggtgctgctataggcacccatcaccaaacccaactaatgtggtttattttttgtanaaatggggtttcactatgttacccaggctggtctcaaattcctganctcaagcaatcctcccaccttggcctccctaagtgctaggattacaagcatganccactgcacctggctgacattttaaaataaaggttaagtgctatggtctgaatgtttgtgacccccaaaattcctgtgttgaaatctttacccccaaggtgataacactanganggtggtaagtgagcctgtaagcctttgggaagtgattaanggggaagggcatcctgaaanggattaatgcccttataataaaagcctcanaaaactccctccacctatctaccatgttaaaatccccatctgtnaancaagaaaacaagnctcaccaaanaccaaatctnccggcaccttgatnttggacttnca

SEQ ID NO: 9807 - DNA, 610 bp, Homo sapiens
  misc_feature (238)..(238): "n" may be a, t, c, g, other or unknown
  misc_feature (451)..(451): "n" may be a, t, c, g, other or unknown
  misc_feature (554)..(554): "n" may be a, t, c, g, other or unknown
  misc_feature (563)..(563): "n" may be a, t, c, g, other or unknown
  misc_feature (597)..(597): "n" may be a, t, c, g, other or unknown
  misc_feature (600)..(600): "n" may be a, t, c, g, other or unknown
  misc_feature (602)..(602): "n" may be a, t, c, g, other or unknown
  misc_feature (604)..(604): "n" may be a, t, c, g, other or unknown
gtttgctttaggcttacactgatctttcttctctagtttcctaagatggaaacttagattatgaattttaaatctttttaatctcttctaatataggcattcaatattataatttatctccaaccactactttcactgcttcctataaattttgatacattgtattttcatttttatttagttcaaaacattttaaaatttctgttcagacttcttctttgacccatctggtatctanaagtgttttgtttaatctccagttactttgagatttcccatctacgtttctgtttttgattttgtttaatttcctctgagagcacactttatatggtttgtattctttgaaatttgtaaggtgtatcttaaggccaagtatgtagtctatcttggtgctctgggatgaatttctgcacagatgcaacctctgtgggtggaaccaggatgaaantatatgcatctgtgaaaaactggccttccatctgttttctgatgcaaccaaaatgcttcagggctcgtcttatctggaaggttgaatggctacaaaactttanggggctccngttaaaactcaaactgaaaaatcctggtccccgntcngnantctttt

SEQ ID NO: 9808 - DNA, 583 bp, Homo sapiens
  misc_feature (16)..(16): "n" may be a, t, c, g, other or unknown
  misc_feature (270)..(270): "n" may be a, t, c, g, other or unknown
  misc_feature (297)..(297): "n" may be a, t, c, g, other or unknown
  misc_feature (302)..(302): "n" may be a, t, c, g, other or unknown
  misc_feature (325)..(325): "n" may be a, t, c, g, other or unknown
  misc_feature (328)..(328): "n" may be a, t, c, g, other or unknown
  misc_feature (371)..(371): "n" may be a, t, c, g, other or unknown
  misc_feature (381)..(381): "n" may be a, t, c, g, other or unknown
  misc_feature (383)..(383): "n" may be a, t, c, g, other or unknown
  misc_feature (413)..(413): "n" may be a, t, c, g, other or unknown
  misc_feature (426)..(426): "n" may be a, t, c, g, other or unknown
  misc_feature (515)..(515): "n" may be a, t, c, g, other or unknown
  misc_feature (523)..(523): "n" may be a, t, c, g, other or unknown
  misc_feature (550)..(550): "n" may be a, t, c, g, other or unknown
  misc_feature (559)..(559): "n" may be a, t, c, g, other or unknown
  misc_feature (564)..(565): "n" may be a, t, c, g, other or unknown
  misc_feature (567)..(567): "n" may be a, t, c, g, other or unknown
agtttgttttcagtanagacaaggtctcactatgccgcccaggcaagtctcgaactgctgggttcaagtaatttacccaccttggcctcccaaagtgctgggattacaggcatgagccatcacacctggccaatttttctaaaagtctgaaattaagtcaaaattttgaaaaagttatagcaattatggcaatctcaattatgggtaaatgtgtgtcacattatctcctttacattttaagtatttcataattaaaaaaaaaaagcaganaaaattgtttatcagaggaaacctcanaaganatgaggcagtcgtcagcaagtanaangctccctttcaggaaactgaaaccgggtgccaagtggctgcanaacgggtganancttagcccccacctctccactggaacctantgaccccatgcanataacaacctgcccaactcttcaccctgacctggcatcatatttatctataactggcagttcttctctgacgggataaattaataaacnttaaaacncctctaaaattttttacctgttgttcncgccgggtntgccnntnttcactccccttttgt

SEQ ID NO: 9809 - DNA, 602 bp, Homo sapiens
  misc_feature (2)..(2): "n" may be a, t, c, g, other or unknown
  misc_feature (8)..(8): "n" may be a, t, c, g, other or unknown
  misc_feature (337)..(337): "n" may be a, t, c, g, other or unknown
  misc_feature (367)..(367): "n" may be a, t, c, g, other or unknown
  misc_feature (444)..(444): "n" may be a, t, c, g, other or unknown
  misc_feature (472)..(472): "n" may be a, t, c, g, other or unknown
  misc_feature (492)..(492): "n" may be a, t, c, g, other or unknown
  misc_feature (506)..(506): "n" may be a, t, c, g, other or unknown
  misc_feature (517)..(517): "n" may be a, t, c, g, other or unknown
  misc_feature (556)..(556): "n" may be a, t, c, g, other or unknown
  misc_feature (568)..(568): "n" may be a, t, c, g, other or unknown
  misc_feature (587)..(587): "n" may be a, t, c, g, other or unknown
  misc_feature (591)..(591): "n" may be a, t, c, g, other or unknown
anataaanagttttgctctgtcgcccaggctggagtgcaatggcatgatcttggttcactgcaaccttcgcctcccaggttcaagtgattctcgtgcctcagcctccgagtagctgggattacaggcagctgccaccacgcccagctaatttttgtacttttagtaaaggcagggtttcaccatgttgcccaggctggtcttgaactcttgacctcaggtgatccacccgcctcagccccccaaagtattgggattacaggcatgagccactgcacccggcctaggcatctttatttctatgtatagaaagccttccttaattttccccccaaaganaaattattgtttagtattttgaatgaaganctcagtttagcaatttaaatcaagaaattatacaaattgttccatggagattaaaaagaaaaaggagctcagcttcncctaagtgacataagcccaatataaaanatatgttggatatcttgaancccactccctttanaatcccctccntctttaaaaacataatgtttaattccaaccctgaaaccnccattatgattnaaattaactttgaaaaatnattnaactttgaaac

SEQ ID NO: 9810 - DNA, 605 bp, Homo sapiens
  misc_feature (229)..(229): "n" may be a, t, c, g, other or unknown
  misc_feature (300)..(300): "n" may be a, t, c, g, other or unknown
  misc_feature (498)..(498): "n" may be a, t, c, g, other or unknown
  misc_feature (504)..(504): "n" may be a, t, c, g, other or unknown
  misc_feature (544)..(544): "n" may be a, t, c, g, other or unknown
  misc_feature (564)..(564): "n" may be a, t, c, g, other or unknown
  misc_feature (575)..(575): "n" may be a, t, c, g, other or unknown
  misc_feature (588)..(588): "n" may be a, t, c, g, other or unknown
  misc_feature (591)..(591): "n" may be a, t, c, g, other or unknown
gttcaaaggttttactgctcatcctgagaagactgtacatactaagaaagtaacaacctggggaaatggctgaagttccaaaagactccagacttcttacaggtttcatctctcttctgtggccactaacttcccaaggaggcagtgcccaaaagccctgtggttttttgatccgttgtacttcgatagctcctcctttccctagatccagcagaactctagacatgtnagacatagttcacaaaacaacagttatgaaccaacaaatacttggctcacggttatgagccactgaagtcngtcagacttaaggacaactagacagagctcccattttctgtcatctgggcaggaaccaatctcctgttgtataaaatgaccttctggtactttctggaatcttgcttcctcatctgttaagtgaggctaataccgcttactcatagtttggttgtgaagatgaactaagaacatgacatattaccgttttaaattgtnccacanacctgctttaaccaaatgccgcaaatctccggtttcctcnacatataaaaaacaattctnactgccagggntgaaacccccaanttncctaaacaaaaaaa

SEQ ID NO: 9811 - DNA, 609 bp, Homo sapiens
  misc_feature (171)..(171): "n" may be a, t, c, g, other or unknown
  misc_feature (421)..(421): "n" may be a, t, c, g, other or unknown
  misc_feature (513)..(513): "n" may be a, t, c, g, other or unknown
  misc_feature (544)..(544): "n" may be a, t, c, g, other or unknown
  misc_feature (546)..(546): "n" may be a, t, c, g, other or unknown
  misc_feature (569)..(569): "n" may be a, t, c, g, other or unknown
  misc_feature (594)..(594): "n" may be a, t, c, g, other or unknown
gaattctaaaatacctttggattatataaaattacattgtaaagttacaaatgttgctcattcttgagaaatgtttgaatgtttaaataatgttgccataatacatattatttcacgacattaaaaaaaacaatggtgaatacaaggtatcatcattttaagggtaaaganataaagcaagtacatatacaaatccactggaaaagctaagtttggagctgatttcctctcttgaattgtaaaatttcagtaatacacagtcactatctactgctggaataatgcctgagcaatttaggtaaagatacaaacaataacaaaaaccctgcccaaatattcaaacttggagaattctagttaaaataatagaaaaatataaaatttatccttccaaaaaaaggtatctaagacaaaggtatanataccccatgtaaattatcacaagtcatatgtgaatcaaccttttctgtattccttaaagttgttcaatcgactgatgaaaaaacaagctcntattcaaaaaaactttcaaaacacacctacnantaacttattaatgccgaaatttnttttaaaaaacagctattccctganttctttaaggaaaat

SEQ ID NO: 9812 - DNA, 468 bp, Homo sapiens
  misc_feature (5)..(6): "n" may be a, t, c, g, other or unknown
  misc_feature (10)..(10): "n" may be a, t, c, g, other or unknown
  misc_feature (16)..(16): "n" may be a, t, c, g, other or unknown
  misc_feature (35)..(35): "n" may be a, t, c, g, other or unknown
  misc_feature (55)..(55): "n" may be a, t, c, g, other or unknown
  misc_feature (122)..(122): "n" may be a, t, c, g, other or unknown
  misc_feature (194)..(194): "n" may be a, t, c, g, other or unknown
  misc_feature (220)..(220): "n" may be a, t, c, g, other or unknown
  misc_feature (240)..(240): "n" may be a, t, c, g, other or unknown
  misc_feature (273)..(273): "n" may be a, t, c, g, other or unknown
  misc_feature (307)..(308): "n" may be a, t, c, g, other or unknown
  misc_feature (361)..(361): "n" may be a, t, c, g, other or unknown
  misc_feature (380)..(380): "n" may be a, t, c, g, other or unknown
  misc_feature (411)..(411): "n" may be a, t, c, g, other or unknown
  misc_feature (414)..(414): "n" may be a, t, c, g, other or unknown
  misc_feature (416)..(416): "n" may be a, t, c, g, other or unknown
  misc_feature (429)..(429): "n" may be a, t, c, g, other or unknown
  misc_feature (445)..(445): "n" may be a, t, c, g, other or unknown
  misc_feature (463)..(463): "n" may be a, t, c, g, other or unknown
gtttnngtanaaatanggtttcacatgttgaacangctggtctcgaactcccggnctcaagtgatctgcctgccttggcatcccaaagtgctgggattacaggtgtgagccacgcacccggntggatttcaatatttgttagccctataagaaaactgtctttcacctcctccaacagggaaagggagacaganaaatctgaggaatgctgataccaganaaagtcctccaggggagcanaagcagatggagggctgcttggtcacaacatantctcgaccattctgacacacggatgacttgcgtnnccgcagaaactgttctttgtagcccaaaatgcagccatcttcataatcttcanggtctgtggagtgtgccanccatatggtatagtccttctcttccctaaangananacacactgttcangaaagtaccagcacanaacccccacgggaagcantgcca

SEQ ID NO: 9813 - DNA, 576 bp, Homo sapiens
  misc_feature (45)..(45): "n" may be a, t, c, g, other or unknown
  misc_feature (129)..(129): "n" may be a, t, c, g, other or unknown
  misc_feature (169)..(169): "n" may be a, t, c, g, other or unknown
  misc_feature (317)..(317): "n" may be a, t, c, g, other or unknown
  misc_feature (327)..(327): "n" may be a, t, c, g, other or unknown
  misc_feature (381)..(381): "n" may be a, t, c, g, other or unknown
  misc_feature (406)..(406): "n" may be a, t, c, g, other or unknown
  misc_feature (455)..(455): "n" may be a, t, c, g, other or unknown
  misc_feature (473)..(473): "n" may be a, t, c, g, other or unknown
  misc_feature (478)..(478): "n" may be a, t, c, g, other or unknown
  misc_feature (489)..(489): "n" may be a, t, c, g, other or unknown
  misc_feature (544)..(544): "n" may be a, t, c, g, other or unknown
  misc_feature (547)..(547): "n" may be a, t, c, g, other or unknown
  misc_feature (550)..(550): "n" may be a, t, c, g, other or unknown
gaggtttcacacaaacagcatttattattaatttgcttccatganaaaacaccgttacatcagatccctgtggacaagctgctaccaggtacatcttctgtcttctgtttctgcttctggggacattanacttcctatggactctcctaagcctcctaaggcagttggntgatggtcttcaaaaattgtctttctgccctctccactctgcctctcctgttttgacctctgtcttcctccccatgacagcatgagctcagtgaggacagggacttttgtgatcttggttgcaccccagtgcctggaacaggctgcanactcctgtanatgtgagacttctcagggccctccacacccttggtgttttttttttctcccccnattgttgaagttttttgctgaaganagtgtttcacgtcctgcttatatttttatttgaagtgtctctgatatanttattattatcattttcnaaatntggccccgatnattaatccggaaaacaaaaacttaaaatttcctacccttacaattccattcaatntanttncctttttgaacccgtcccccctgttt

SEQ ID NO: 9814 - DNA, 532 bp, Homo sapiens
  misc_feature (135)..(135): "n" may be a, t, c, g, other or unknown
  misc_feature (288)..(288): "n" may be a, t, c, g, other or unknown
  misc_feature (324)..(324): "n" may be a, t, c, g, other or unknown
  misc_feature (345)..(345): "n" may be a, t, c, g, other or unknown
  misc_feature (355)..(355): "n" may be a, t, c, g, other or unknown
  misc_feature (359)..(359): "n" may be a, t, c, g, other or unknown
  misc_feature (400)..(400): "n" may be a, t, c, g, other or unknown
  misc_feature (428)..(428): "n" may be a, t, c, g, other or unknown
  misc_feature (482)..(482): "n" may be a, t, c, g, other or unknown
  misc_feature (494)..(494): "n" may be a, t, c, g, other or unknown
  misc_feature (501)..(501): "n" may be a, t, c, g, other or unknown
  misc_feature (512)..(512): "n" may be a, t, c, g, other or unknown
  misc_feature (521)..(521): "n" may be a, t, c, g, other or unknown
  misc_feature (526)..(526): "n" may be a, t, c, g, other or unknown
  misc_feature (532)..(532): "n" may be a, t, c, g, other or unknown
gtttttgattttaagaaggaattcttttccaaagttacttccaagtaaattacatttcatgctgggatacctgcttatgtgcatcacattttgacaaagggcagtggctcgctaacactaacatgaatttaaggnccagcatcattgcaatttgtcactcttcatcctcatcctcatcataataccgatttctctttatctgttcttccacagagagctctttgaccacttctccctcccagagttccacatcctgggatttctgattctgagtagtgaattcttcancaaaggtgttgtctacaaaactcgaccaattcaganacttgggttcttgtggagatngttgtttgangaanctgttatcatcttcatcggaatctgcaccattttctacaanaatctcattctcctctccaactatgacntccctaattctctccccgtctctccttaaaatccttgtttggccagtttttttnccccatcccatnctccttnaaaccttgggntttcccttnttccnttttgn

SEQ ID NO: 9815 - DNA, 537 bp, Homo sapiens
  misc_feature (215)..(215): "n" may be a, t, c, g, other or unknown
  misc_feature (217)..(217): "n" may be a, t, c, g, other or unknown
  misc_feature (297)..(297): "n" may be a, t, c, g, other or unknown
  misc_feature (308)..(308): "n" may be a, t, c, g, other or unknown
  misc_feature (313)..(313): "n" may be a, t, c, g, other or unknown
  misc_feature (356)..(356): "n" may be a, t, c, g, other or unknown
  misc_feature (375)..(375): "n" may be a, t, c, g, other or unknown
  misc_feature (379)..(379): "n" may be a, t, c, g, other or unknown
  misc_feature (399)..(399): "n" may be a, t, c, g, other or unknown
  misc_feature (401)..(401): "n" may be a, t, c, g, other or unknown
  misc_feature (443)..(443): "n" may be a, t, c, g, other or unknown
  misc_feature (467)..(467): "n" may be a, t, c, g, other or unknown
  misc_feature (495)..(495): "n" may be a, t, c, g, other or unknown
  misc_feature (500)..(500): "n" may be a, t, c, g, other or unknown
  misc_feature (515)..(516): "n" may be a, t, c, g, other or unknown
  misc_feature (526)..(526): "n" may be a, t, c, g, other or unknown
aaaaaagtacattcccctgtggagttttatcttgttttaaaaagctgctcctgcagcaacatcttgttgaaacactgctgttttagggtccacagcctaagtacgggcaaagtgctctttttagtcatcaaaatacaagggtttccctggacacttggtaaccaagcaggttttaaagtgcactattgtgtccaaacactaggaccgttcagcananctctgaaaagggctgggttcagttccatcctccgtgctactgtctatgtcctgctccattgctgtctcctcatcatccanctgttgactantgaanttgtttagctcaagaacccactgggctccccaccacattgganctggagtgacaaggaatancatnctgaggaaatacccggaatnanaattctgctggaatctctccaccttcctttggccaaattctnaataccctgaactggcctttccangcccgcgggtggaatcaattttccctgntcttnggggaaaaacccccnntggatggacnccaaaaaggaa
